United States Patent Application Publication US 2014/0221463 A1 - sequence listing, part 2

SEQ ID NO: 537 - DNA, 8332 bp, Homo sapiens
aggtctccgcccctcggatcccacggggtcccttgcggccctcccactcctcgcaccgttggatcgctttgctcacggcgctatctctcgataaagttgttgttgcggcttccgccgcgggtggaagaagatggcgtcgggtggtggtggctgtagcgcttcggagagactgcctccgcccttccccggcctggagccggagtccgagggggcggccgggggatcagaacccgaggctggggacagcgacaccgagggggaggacattttcaccggcgccgcggtggtcagtaaacatcagtctccaaagataactacatcccttcttcccatcaacaatggctccaaagaaaatgggatccatgaagaacaagaccaagagccacaggatctctttgcagatgccacagtggagctatccttggacagcacacaaaataatcagaagaaggtgctagccaaaacactcatttctcttcctcctcaggaagccacaaattcttcgaagccccagccaacctatgaggagctagaggaagaagaacaggaggatcaatttgatttgacagtcggtataactgatcctgagaagataggggatggtatgaatgcatatgtagcctacaaagttacaacacagacaagcttaccattgttcagaagcaaacagtttgcagtaaaaagaagatttagtgactttctgggtctttatgagaagctttccgagaagcactctcagaatggcttcattgtccctccgcccccggagaagagcctcatagggatgacaaaagtgaaagttgggaaggaagattcttcttctgcagaatttcttgaaaaacggagggccgctttagaaaggtaccttcagaggattgtaaatcatcctaccatgttacaggaccctgacgtcagagagttcttggaaaaagaagagctgccacgtgccgtgggtacccagacattgagtggtgctggtctcctcaagatgttcaacaaagccacagatgccgtcagcaaaatgaccatcaagatgaatgaatcagacatttggtttgaggagaagctccaggaggtagagtgtgaggagcagcgcttacggaaactgcatgctgttgtagaaactctagtcaaccataggaaagagctagcgctgaacacagcccagtttgcaaagagtctagccatgcttgggagctctgaggacaacacggcattgtcacgggcactctcccagctggctgaggtggaagaaaaaattgagcagctccaccaggaacaggccaacaatgacttcttcctccttgctgagctcctgagtgactacattcgcctcctggccatagtccgcgctgccttcgaccagcgcatgaagacatggcagcgctggcaggatgcccaagccacactgcagaagaagcgggaggccgaggctcggctgctgtgggccaacaagcctgataagctgcagcaggccaaggacgagatcctcgagtgggagtctcgggtgactcaatatgaaagggacttcgagaggatttcaacagtggtccgaaaagaagtgatacggtttgagaaagagaaatccaaggacttcaagaaccacgtgatcaagtaccttgagacactcctttactcacagcagcagctggcaaagtactgggaagccttccttcctgaggcaaaggccatctcctaatggaccaaggaccccagagcccacctgtgtgacgctgcctttttatacactgtcctcctccaccttgatggacccctagtgatgcatcctgcctaggctggacttaaccccttcctccctgtccccacgaccaactgtccccagttactctaaccgttatttcatttagcttccatatatattttcttacctaagagaatagtttcctgctttaagcaaaagacctacaataggtggtggaattatgggatggggtggagtattgatataaatatataaatacaaatgtatatttttcaggatgtggtttaggaactgggaataacgttttctgttactcctgatggtgccatgaaaaggttatgtaataaaatattttaaaatcaggtcacatgactcagaatgttggtggtttttgcttaggctggggagcagttgggaatcaggtctggaatactcctaaccaagaagttgcccaggtatagtaagtttttctctaccgttcacaagttttgtgctgctgcttccctctggaaatggggtttctttctctccgcctacctcagctacctgttctgagggtctcaatctgtttcgtattcccacttctttagggaaggagttttaaaaacatctcttaaaataagaggagcaaaatctattaaaacctattctcctgcaaaggaggcagagactttctctctctcttttttttttttttttggtgtccctatcattaagcaagagcctttctcttttattcttcctgcttccctaagctgctcagggttctctgagtcttgccctctgatggcaagtcttatatataactaaacctatttttgtcacccatcaaaacacatcctcagtagactgtgtgaaggtgtgaaggtctgataatgacttgatgctttgtctccatagacatgaaagccatgccctctgcctctagatagggtgatccaagagctcctgaaccttaggaggttcaaagaagctctactgtctgtgcccaggaggtagcctgccagcaagagccctcaggagttgcacacacagccaaagggtgttcacacagatctctgccggtctagccaggggaggccagagtctcgtcagtcaaggatgggcttcccccttagctgtgtccacagctgctcaagctatactggtcagagtgggctttgaagctcctttgtgagctcgagctgctgactgccactatgggagccttgccacctccagcccctccatcccaaagacgctcctgccactggggccccaggtcctgctgtatcagttctctttggtggggggctaaggtttggggcgaggcaacctgagacaagaaaacgcagtaaacattctgattccctgtacacagatgcagcaccaggggaagggccagtggtgcaagtatttctttttaacaggtgaagtttttggaaaaagtcactctccctacccctcagtatccttaccatcaactttggttttatccttccagtctttattatatgcttgcttttacatagttgtaataatatacacataaagtattttgtatcctgcttttatcattcaacattgtacatgttataagcattttactatattgttatatatcttcacaaagttgatctgtaaagctgtgtaatttgaaggcatccatagggtgactgtaccataattttgattcatcccttgttgttggattcttggtcaggggttgtttgttttgttttattggtaactttaaaattttgaatacaatttcagatttacagaaaagttgcaggaatatcacaaagaactcctatatatcttttatccagatttactgagtgtttacattttatcccatttgccttatctatatttcatgttgcattttcttaatcatttgagaataatttgcacagataccccattatgcccaaaacagtatgcatttccctaagaacaggacattctcttctaagagaagaagagaattactttaagcattattcagtatttttttaagtattattatcaaaatcaggaagtttaacagtgatttaatactgttatctaacccatgattcatatttaaattttgccatttatcccaataatgtcctttgtagccattcttttaccttgtgcaggatcatgttacatttgtaaacgtgtgtctctcaatactgcagattcctcaactttcttttgtctttcattaccatgacatttttgaagaatacaggctattttgtcgaatgttcctcagtttggatttgtgtgatggttccgcatgactaggtgagggttttgcattctgggtgggaatatcacagaagcagtgtgtcgtcagtgcgtcgtaatcagcatataatgtcagttggtcccattaatgttgttaactctgttcaccgcttaggttggtgtctgccagatttcattttaaatttacgatttcctctttgtaatttacaagtaatttgtggggagatactttgagactatataagtattttgttcctcattcaccagttatatagtatcagttgattagtcttgtcccagttattactgtcatgattgaccaacatgatttcctaactccataatgccttctacatttattggttgacattctacatacaaagaaaaacatcctttctcaccatttatttattcacttgtttatcaatatggatgcagggattcctgttttactcagagttgcaagccattgctttgattttatcttgattctcaaattgtcccagatttatagcggcctcttgtgtgtttgtagcttgctcccatcatgttttgagtactttcttaccttctggcataacaagatgttccaggctcatcttgaatgttccctaccctagccctggaatcagccatttctccagggagtcttggttccttataatggagaatggtatttatttatttttatttgatttgattattattactatttttgagacagagtctcgctcttgtcgcccaggctggattgcaatggcacaatctcagctcactgcaacctccacctaccaggttcaagcaattctcctgcctcagccttccaagtagctgggattacaggtgcctgcccccacacccagctaatttttgcatttttggtagaaatgggggttttaccatgttggggaggctggtctcgaactcctgacctcaggtgatctgcccacctcaacctcccaaagtgctgggattacaggtgtgagccaccatacccagccagagaatgttatttagaaaccaagatctgggtgccaaatgtgctgcttgttactggaatgtcattgcctctaggctctcaccatacagtgcaaagagatgatagatagatagatagatagatagatagatagatagatagatgatagatatagatagatagatagattgattgatttgtagaaacaagataggttagagatacctgacataaatagatactaaaaatcatgaattcacactgatgctttgagaccagccctgtaggtttattccagtctgcccccttttccatgttgttaactctttcctccagagagacaaagatttcaggttgctttgttaagttccatctaatgatcattctgacgtaagtctgtttttcttatttccttggaatgatgtctcctctggtttcagaacttcctcctctgcttcctgtatcctgaggctggcggggccagttgtctttagggcttgtgcatttttgtaaagagcttgcacgtgtggaaatcaagtaggccagtagtgggttaggggtactgagccagaagcctctacaaggaataacaggagcacaaaggaagaaggtggtattccagctggggacccaggagggaggactttgtggagaacctgatgcttgaactgagtctaaaaggtgtaaaagtgtttgttgcttctgcctccctgtctgtctggcagggtgaggtaggcgcatctagggaaatgtcaagtggcttggtgtagggtaaagtcagtgaggcccatggagaaaaacgagcaggagccacatcacatgggtgtctgataggacctgggaggcgctttccacattaccattgtcgcttcgtgatctggacacaccagaaggcgtgagactggaggcaggaagagcagccaggcttatccctaccctcaggagagctgaaaagggcaggtatggtggggccagagctcaggagagtttcggaaccactgagatcggtccttgatttgatgagaggcttgaggggagagggaggtagctaggatgccccgcaagcttctggcccagacactgggcagacaatgaaaccctttgtaacacatgaggcaataggtttggggcagatgggaggggaagcagtggtgggggcagtgagtgctgaaggtgttttaagaagcggctctgggccaggcacagtggcttatgcctgtattcctagcattttgggaggccgaggtgggagaatcacttgagcccaagaatttgagaccagcctggggaatatagtgagaccctgtccctacaaaaataaaaacaactagctgggtgtgtggtggtgcatgcctgtaggcccagctacgcgggaacatcacctgagcccaggaggttgaggttgcagtgagctacagttgcgccactgcactccagcctaggtgacagagcaagatcttgtctcaaaaaaaaaagcagctctggatgggaagggaggccagttgctttaagtaggggagatagagttaaaggaggctttgttttatttaaaggtgggacaaacttaagcatgttaataaaattcagagaagagaaagagaatgactatcagagccatgtttggaagaaaatggggtccagagcacaggaaggggacctgtgttcagagggtgcctcactgctgaggccacaggaaagaatctgtaggtggaggggaggccgaagaggggaagtttcatgcttgataattaaaattttctgagataggaatgtcatatttacctatttaagccaagtttttttagataaaaggtatggaacctgctttccccttggctagttcagcgtttgggctccggagtgctgaagatgaggactggacttcgagctggtgtgatcccagtattcagtgtcagtactcagtgacaaaataaatgagagaaacgggaataagaattgtcgcctacacaaaaataccagcaactgttaactcttcccagaagattttcattctgaatgctcctgtagctaggaaccctaaaaagtctttgaagcaactcaagttttaaaaaaggggaggaactcctggaaatctcaggatggggccaagatgtggctggagagtgtgtggtgatggagggcgtgtcttttgccgagcacactcagggcccacgggaagcccatagacttcaaggacatcaagccccaaggtggtgggattttccccaccagtacttggcagcctagggggaaggggagggcgggagaagataatggggatccctggctccaaacataggaggacacatctgtgctacagtgcgcacatgcctggatgtacactctgtctttggagacactggctaagattctctgctccatgtttggacagggtcgtgcctgatctgagataaatggacaagaacaactgaagcctgtcttctggtgcatgtgtcacctgccgataactgcatcttgtgataaagttgggtgatttacagtctccaccaaatgctaaactctggggtcttacgcctttataactccatgggccccagcaaaggttcaggctcaaaacaggtgtcaaatagataactgttgaatgattgttccccagttgcaggctctgccacctggcgttcatactgtctgtgaaaggacccagctcacctttccctctttatctcccagtccttcccaacagcgccgacacctcatggaaactgattgcaaatgtgctacttctcacttctgtgtggcccgaggaggctgggttaatgctgggcttggtaccttaagcaccctttctcccttccccatcttcattctcagaattacacctgtctgaagcaggcattttccaatgccctagatgggaatataagtgtaaggagatgtgaagcatttgcctgtgtgtcagaacattcactgaggatcctcataggcacttctagaaaccaaatccttgaagatgactaaccagaaatgcccgtcatagcactgtttacagttgcaaaaactgaagccaattgaaatgtccatcaggaggggattaaatgaattatggtacagttacaccgttgaatattttacagccattgaagatgatatatagctatattcattgacaaggaaaactcatattttttagtgaaaaaagcaggttatagaattgcatgatattcacatttatataaaactttatatatgggaaggatgttgattgaattgttaataactatggtcacctctagagatggaagtttgcattacctttaatttttaataccattttgtattgcttaaaatttgtatgtattatcgttaaaataagaaaaatcaaataaagctattttcattatgggaaaacaaaaaaaaaaaaaaaaaaa

SEQ ID NO: 538 - DNA, 14110 bp, Homo sapiens
gcggccgccatggacgagcaggcgggtcccggcgtcttcttcagcaacaaccacccgggcgccggcggtgccaaggggctcgggcctctggcggaggctgccgcggccggcgacggggcggctgcggcgggggcggcccgagcccagtacagtctcccggggatcctgcacttcctgcagcacgagtgggcccgcttcgaggtggagagagcccagtgggaggtggagcgggcggagctgcaggcccagattgccttcctgcagggagaaaggaagggccaagaaaatttgaagaaggatcttgtgaggaggatcaaaatgttggagtatgctcttaaacaggaaagagccaaataccacaagttgaaatacgggacagaattgaatcagggagatatgaagcctccaagctatgattctgatgaaggtaatgaaacagaagtgcagccacaacaaaacagccagttaatgtggaaacaaggtcgacaactactcagacagtatctacaggaggtgggttatacagatactattctagatgtgaaatctaaacgagtgcgagctttgttgggcttttcaagtgatgtcacggacagggaagatgacaaaaatcaggactcagttgtaaatggcacagaggctgaagttaaagagacagcaatgattgcaaaatctgagttaacagattctgcctccgtgctggataatttcaaattccttgaaagtgcagctgcagatttcagtgatgaagatgaagatgatgatgttgatggaagagagaaaagcgtcattgatacttcaacaattgttaggaaaaaagcattgcctgacagcggtgaagatcgagatacaaaagaagctctaaaggagtttgacttcttggttacatcagaggaaggagacaatgaatctagaagtgcaggcgatggaacagactgggaaaaggaagaccagtgtctcatgcctgaagcctggaatgtggaccagggagtaattaccaaactcaaggaacaatacaaaaaggagagaaaggggaaaaagggggtgaagaggcccaataggtcaaaactacaagatatgcttgctaatttgagagatgttgatgaacttccttcattgcagccatctgtgggttcaccttccagacccagcagctccaggcttcctgaacatgaaattaatagggcagatgaagtggaagcattgacatttcctccttcttctggaaagtcattcatcatgggagcagatgaagcccttgaaagtgaactgggacttggagaactagcaggccttacggtggccaatgaagcagactcactaacttatgatatagcaaacaataaagatgcattgaggaagacatggaaccctaagtttacattgagaagtcactttgatggcatccgagcccttgctttccatcccattgagcctgttttgataacagcatcagaggatcacacattaaaaatgtggaatttacagaaaacagccccagccaaaaagagcacttctcttgatgtagaacctatctatacattcagagcccataaaggtccagtgctttgtgtggtaatgagcagcaatggtgagcagtgttacagtggtggtactgatggactgatccagggctggaataccactaatcccaacatcgacccctatgattcttatgatccttctgttttacgaggccctctgctaggccacacggatgcagtctggggtttggcttatagtgcagcacatcagcgtttgttgtcctgttcagcagatggcactctgcgtttatggaatacaactgaggttgctccagcactaagtgtatttaatgatactaaagaactgggaatccctgcctctgtggatctagtgagcagtgacccgagccatatggtagcatcattcagcaagggatatacaagcatttttaacatggaaacacaacaacgcattctcactttagaatccaatgtagatacaacagccaactcttcctgccaaataaatagagtcatcagtcatcctactcttccgatcagcatcactgctcatgaagacaggcacatcaaattctatgataacaatacaggcaaactgatccactcgatggtagcccacctagaagctgttacaagtttagcagttgatcccaatggcctttacttgatgtctggcagtcatgactgttcaatacgtttatggaatctagaaagtaagacgtgtatccaagaattcacagctcatcgaaaaaagtttgaagaatcgattcatgatgtagctttccacccatccaaatgctatatagccagtgctggagctgacgcactggctaaagtctttgtatgacgcaatgcatcatcttcaccttctagctgtttataagtaatcaactgcacacaagagatacagaagacgagggcaagaatcatctcgtcctgcccttttgttctgctgaaggagcacagagaacatttgttgaagtatagttttgcaattcatatactgttttctaaaactaaggtttgttcaggttgctgcaagctcagctgaatctgtgagcctgaggtctgtttcaaatttctccccaataggcgcctttatttctgaggtggttctaattcgctaggcaggcctgagcgaatacaagtttagcttgtccctgttgagtaagtagggcatgctacaatggataatttaaaagcttgatagctgggactgaatagaagaaaacgggaaacttagaccaagttctcccctgagaaatcttgttaaaacacattaagtagtcaaaatagtaatctttatcatatctgccatattaacccctttgtgtataatgaccaggcagtgttaaactgagtttttaatttgactctcctttcagctgttcacataaagcacctggcaaagcattttacctgttagggggagaaaaatgcaataatatgttaaatatattattattcagaaatgctagacaaatagtttgcaagcagatttctatattgtattacagttttgaaaacagatttggtatcattctaaagtttagctatcaagcactcaccattgtgaagaatagttgatcgactctgcttttactaacagatttaacttattcaggtttgaaattctgtttatttttaagggtaaacagggcatatctctttaataatttctattttaaaattcactttattcatgtgacatttatagtaccagagtgattatttcataccaatgaaatcttacttttcagtgactgaaaagatagaatttatttgctaataatcatttatcaacacccacctaatcatgcttcagatgatctgtgctctttcttctttgtcacgttcaagttatctgacatctaccaagaacagttcataattattaatagcccaaagagtatggttaacttcacgcagctgcttttgcagaagcactaataaaaacaaatattttgtaccctagaagtcctctattaatccctgtaagaatctcctggaaacctggatgaaagagtttaatgccaaatattggctaaaaagttctgtctttctctctccctattcctcccccattgtttaattgagatatacatgttttaatgggcagtggatcagtattgtttctggggaaatccacaccttaaaaggccaggcttccccagcccaacttacctgtgacccacctacatgtgttcaccttttgggattctgaagaccctgctatctagacctagtctcctgtcataaagacattatttctatagtggtttatgtctctcttactctttgtcccaaatgacagagaccaatctagaaattggaaataaattattaacgtccaactttccaccaaaaaacatataaataggctcttagattttaaaaatattaaatctatagatattttaaccaattaaaacaatttctacatattccattccccacattttccatcgtcataacaatgatgcttctcatgatacgtacatctactccttgaaaaagtattctggtggtggtgtggctaatgattgacaaatatttctgtaaaatttctgcctgtttgcctctagaattctgcattatacaggcaaattttctttaaagctagagacttgtgctaaatttgcctgattttcatacagatatgctgtagtaatacagctaccttttcatttcatctttgtgctttggttaacaagcaggctcaagagactgctttgtgtaattaaatgaattgacctaaacatgagctgtcaggtgaatacttaatatttccatgcagatacagaattccatattgtgttcagtaaatttcttttggttcttcacagtgaagaaagaatgtttctaacctaacatttgtagaaggatactggaaaattccttccaggaaggaaggaaggaagatgccattacttggtgtatttatgatggatgaccacaaagctattgttctaccagttattaattaccttctaagatcttcagttactgctttattaatgtcactgaaattctaaaaaccaggacattcttcccccgttcattttatgcttcatggttgaaatttttctgtcagtgagtggaaaataaccatgagatacatagactgtagcgcaaatggaactgttgaaagttccttagaaagccagtgctgtggcattggagactacggagagagtcttctctaccagcactgcatgatctcagcctagaaatgagccaaagctgtcttccaaccagagtagcatatacatgtgtctgacttttcccctagcctgttgaacattcaatgaaaattcacagaatgaacaaattcaatgtttaaacagccattgaaatgctttcatagtgcttcatttgtaaatattttgtttgaaatgtattggaatagtatgaaaattagcgggaggtttggatccctgccttattttcatatgctgtggatacatctctgggagcttgcagcacccttctcaaaactcaactgtcatatggagctcatttgctactcaaaccatagacagattatttaacaaaagtgatataatgaccttcagtatttttctattgaacaagtttaacaacttttgccattaaacaaatacttagttatgcaaaatatttcgcttttataatcattttagttatgactaaaacgggggaaattgagctgcatcactgatgatgaactttgtgagaaattttttttttaatctgactttcattccttcagtattcttgctataaatttcttttggagataatgatgaagatttatttgaaaatgtctaaaatgtatgtatattttataaatatatattatatatattgtaagaatatatataatatataaactatatatatatatatatatatatatatatatatatatatataaaccataggtgcattttactgttttgtattttcatttttggaggtagtatacacagcagataatgatgagtatgatgagtgttgtgctgtttgcttttgcagtataatatatagttctaagtgtttaaattactgtatatacaatattcattataggctagcatgcttgttttaaagactgtcattctagtgtattaaaatctgaatgtaagaaaacctggctattcaaatgtgaattgaaaaatattttattctcagtactgaactatttccattgaacattcagactttttaacaaaaacaaatatcatcaagaaggcaatagctagaaaatgagaggtgcctttaaaaaaaaaaatgcagccttacagtgaggatgaagattgagtttggggagggggtgggagggggggcacagagagagagagagagttagtgtgtgtgtgtgtgtgtgtgtgtgtgtgtgtgtgtgcatgcatgcgtgtgtgtgtgtgtgtgtgtgtttaccaatctgtgaaggtcctgatttgtgaccatcaatgtctttttaatgtatctgctcaacttctaggacttcaggggacatttcatgcgctttgtgctcttctgagcaccatatatactttccaagaattttgaatgtgaattcctagaaatttcagtagagaaaacaatagctattctttaattatagtaaagttcaggtagaaggagaaattatttgttcaccaaaattatgggatctcattaatgttggctaagtaaatgtaattttttaaaggctcactttttaatacttcatatatttccctcttacaaaacagcatgtcatgaagttcttatgtggtaaagattcaactagtaaatatttttaggttaaatacctgaactagttaaaattccacctaagaatagtcttaaaatatttaaaaagcatctctcatatctacctctttgtcattgctgccattttaactgaagcaaatctttatgacatctgaaatgatggttggatgcaattaaaaaaaaatctatgttggtgcttttctcaggctttgtcatttaagttatattgtattaagatgtcacaaatcagactgaaaggcttagaattaattttgtttttctttgaaagaattgcttaaaattaaccatcaatgtttttagcgagtggagataatgaatctttggttggtgtctgtctgtgtgatgttttcaaccaatagccaaataattattgaacttacatgaaaaagagtgctaagtataattttatttagattactttattctttgaaagtgactacaaggctattaagtacataatcattcattttatttactcagaagttgcctctccattactgttaacttgtttagtaatttatataattgcagtacttttaagtgttggacactgggattcaggttgtatacaaagtagtagctgacgaaaaatatgtatatttttgtgaaatgtatcaagccctaaagttcattttagagaaaggcccagaaaaacgtatctgtgtttaaaaacaaaggacaggtcattcgtcaatttgaatcatttttacttttgccactacaaactttttaattggcaatatccatcatccaactggatcttcatgtcagtgtcagggatgccaggttgacaaagtatttaacagatcctttcagtttttgttttgtttttttaattctaaaaaaaacaaatgttaggccaaacagatccctagatcccactcattgattctggcggtattcctaaagtggtgcttagggggtcagaattttctggatctttgctaatccaagctttagatttaatttaaccaggaccacatgcttgtcatctctctgatgcaaattttcaaaatcattttaatttagattctaatgtctgcctgggtttttaacaggctgtgaaccagtgagtgccttgttaatgtagaatgatttttcccccctgggtgggtgttagttagctcctctctgaaaatgtctcagagaatggtattttaattgacttgtagagagctgctaaatttgttattatcagcaatcagaaagtctttggtctaccacacatctccctccctactatctcttcattgtttggctgaagtttgcctcttgtgagaaaacaatacaactccccttctccacacactttttttccagcccagattaataggtatcccctaccctaatcccaactctatgatctaataccttttttaggaggaaccacttctttttaatattgaaatctgctggttactttatgttttctcaagttcagttgactagagctgaccacagggtgtcatcaattcagattcctaaataaccctttctctccacacccagtcctccagctggtgagccctgggccagattgtttgatcttcaggtattttaaattttagttacatcaattaatgtaaattaatccaaatgctaatttttgtggtgcaagaagtttcttatgtaaattcagggtatggataagctaattaagatatccatctttggtggctctaagtgtattatttgtttttaaataaagtgtacaaatatagataacatgctataggtgtctcatgaattggaatatttgtcagatttgggatctagctgtggctttacagtaatcagttaaattaacatagtctgatttggggcttttgggggaggagttgtagaggggtgcagagaaataaaaggatattagacaaagtatacatgagtccaaaattaatgaaccagtcttaattactgattgtgaggaaggagaagtttatagagaatttgggcctctgaaaagccaaattaaaatagcttctaggattgggtcagtggtactttcagagacacatatgtttaatgaataggttttatgtttttcaaatgttcagtttaaatggcttttaaaatttatacacatatataaatacaatgtttttattttttgtttcgctacttaacagacatacacaagccttccacactccctgccccttcaaatcaacattatttttcaaggcctttggcctgcccagaactcacagtctttttgttccaatcaggatccacaatacaatatgaaatttaaaaggcatctcttctgatatccttgaaactatccaccattgtttggtgttctgtatgctggtatactaatgagtattatatcctttggtatgtacacacattttcagtagtgttggaaacacctcttttatctttttaatgagaactgagacatgattagcttgagtaattttggagatctatctcaggaggtcattaaaactccaaaaattattcacggattgatgaacctcctggggtcagcctaagattgccaggtagtattctgacctcctctgggtttcccaagatcactgatgttttgcagggccccagcattgtcctggcacataaaatattcccagaacaccttgggagtcaagcataccttttaacctaaacattataatcatggagcatccctccgcctgttacttctcaggatgaccagaacactccagttctctaaggaagcactgacatacggctctgaaaattggaatccgttttctgaaacacaaattttaactcagtaagttttgtatatcaaatgattcaaaacccaccaaacataaaatgactcgcttctaagtatcactcaaaccctacaaaacctaaccctttccttattcctaattgatatttcactaaaggtaatggtagtttcagttagattggaagtcattatttgggtgagcaaagtctgcaataacctactgataggaaggacctatttcatagaaaagtatcttgtccttggtgatttagccattcaccttacgtgaagagtggtccagatgccagctccacattgactttttctgtgtccctctttaggtaattaacccagtgatgtaaaggagagcccacagtaaaacatctgttaaacagcacttggagtactatagtgttattaatttatgtgctataatttcttatgccatcataaaatctagtgtatgtaccaggttcccaattcattgcctcaaacaaaagatttttaaaaattctaatagcatcaaattaagggtaatggtagggaaacccatcatccacaattaaatatgcccaaactgaaaactttaagaaaaaaaagcacatggaaagcaacgttttacattaatcgtgagttgtagaaataaacagcttgtggtttgtatatgtgccgaaatgttaaagtatgctggcatccaactacttccctttggaaatgggaccaagacaataatttttcatgcataaacaaaattaacttagagcaaaagtaattttatcagaaacagtttattttgggggctggataacttgggtgagagtgtggggaaagaagtaccttaccaaaaaggagaagcaactgaccctgtggcctgagccacattgtcttccatttcaacttcaatgggctggcagtataccacttctgacctcaaagaatgaatggttccaattctggcttgtcattggtccttgttatctaaattaaatatttttaggaaatatatcaaaagtatcctagagccccatggcaaagtgtcagaggaaatagttttcattatattttaggaagctgtaaaaatataagcccaagtattttgtgtcatctgcatatgtcaggatgaagaccaggcatgtaagaaatatcctaaagtagccaagtgataatctcatgaaaaaatatgagaatcgtttttacagagtgagttctcttttgaatggttttgactatgcttttaaaaacatttttaaaatgtacttacatctttttcgatagcccacgtatttcagaatatcctcttgatagaataatatcactcagtgtgatttttagaaaaagaaaaactcggtggtctcatatcttttgacagttgtttgtgaataataccctccccaacaaccttcccagtactcaactgctatgtaagaatgctttcttatgtggtaaatgtctcagtattttgctgcctggtatttgttcagtttccttgtatatctcagggtcagaaggaatcaggctttctcccaactctgaaacattcagacttactttctttttggtcagccttttaacaagcaagacaataaactccttttgtcagaatcgatttgattaaaaaaaaaaaaaaagaatgtgctccttatttctcattgctgtagaatacgtaggaatacacatctactaatcacaattaaaaaataagagaatctttagaaacatcattgctttctggaggtagaaattttgaacttgaaggttgtagttccaggcaattttgtgcccttgaggtgtccaattgatagtatagcttgcctctgctaataaatacacaaaagttttctttcctgtgattttcagaaattatttttggaatacaaagattaataaggaatatgtgatgtttatctcctgcatttcaaaatcttctggattttttttgaggcatgaggagcaggtaatgagattttttttctgaatatcttgattctctcccttaacccagattttgcatattatgcattgctcatttgtcacctacaaaaataaaggttaatgattatttgtttgcttttgtctatataagctccctaaggcacagaccatgttcgtttttcttatgttcctcttagcactgtgcctggtgccttgccatataaaaggtaccctataaatatttgttggctgagtaatcagagagcccatttcaaaatctaaattatacaaatcatcaaagaccaaaaaaaaaaaaaaaaaatctcttgacagttgatgctcaaatgcatttggttctgtggagcttatcctgagattgaggtctgcaccttgactggagaggaatttggactttacctcacaggtagcaacaaaatgcctgagtagcaacgtctttatactgcacagttccagtcctgcctgcgtgaaaactgagcagagcatggtggggacaggaaggtgtccctaaaccctgttgatgacctcccatctatccccggacccccatatctcctctgctcatcccctgttccccactggcctctgatcagttgaaagggagcttttctagcctggaacctgagcctgccttgattatcctgggctcagaacaggtccacttccacactctttccttgcaacctacagatggccctactgactgctgttgtccaggagaaagacgaacctcccagtggaatcttgtcaggaaaggcatccctctggggagctttctttggagaggaaaattctgggacaaagttcctcaggatgctctcaggctggtttttgtcttgaagattttatagtaattgtaccaatgtttattaactctcctaggaacatctctgtctttggttttctgacagcactccagcagggcccagggctttagctgaacagtgcaattgttttaggaataaaacagtcaacaagttagagaccaactatttatatttaatattcaaatgactttaaatcattaaaagaatcagcaaattacatatgaaatattcaacgaataatctcaacattaaacatataccatgtaagaactgtcattaaaattactaaaaatatgattcctttaagatcagttcaacacagaagaaagcaggaatttggcctggacaataggacatttattgtctgttagattttagacaagtcaactcttctaaattggcttctcatctatgaaatggggataatagatctgcctaattaggttgatttgagataacggatgtaaaacacctaataaaataagcatccagcaaatgacttgttcactctctgaatacagacttctggtcatgtagttcggtcacactcctgatagcttctagaacatcagggttttaggagaaataggttaaaatgaacatcaagagtagcagaagactactttccttaatatttgagtgccagctatatgccacacagttctagttgctggcagtcagcagtaaacaaaaacttcacctgatgcagcacattccaggtgggggaacaagtgaaaatatagggaatattagtgataagtgcagagggaaaaaaaatagagcagggaagggggatgatttgatgtttttcaggttaagaaagtgacagaaatgaatttaaatgcaaaaaacaatgcataaagattcataatggcaaaacgaagcatgtcccatcataccccttcattcctacctccctgatatgtatctttctaattattcatacaaatgtgtatacccagttattacatatggggttttattctacatattatgctgcacttgctttttctaatataatgtgtatcatgagcaccttacaaatttttaaaggtctctcaaatttatcagtaaacatatacagtctaacgttaatgagaagatattttggtgggcagtttgctttaaataaatgggatcatgtacgttctctgcatctcacatttctcatttaacaatgtaggatgagaatttctctaagtctatcatagctcttatttcctttttattattacaataaacattcctgtgtatatgtttgtcaccatgatggttttacgtctgcggaatagattccctggagtaggattgctgcattgaggagtatgtatatttaaatttttaaataaatattgacagattgtttcccaaagtggccggaacagtttttatttccatcagtaaatgtataaaaacacttttcccttaatactcatggcaataactattgtaacattaaaaaatacgtagaaaaaagaaaaaaatcctggtggatgtagtgatttttcagtgttattttaatttccattttcctgactactataaatgtagacatcttttcaaatgttttggtcatctggattgcactcagaactgaattatctattcaaagttctgtaggttagaactccagggaaactcaactgggctgtctgttcaaggcccaacaaggctgaaatgaaagtgtcttccagggtgggtactcaactaaagctctgaggaggaattcgcttccagcctcattaaagtcagaggatggaggtccctgtctcctagctgactgtcaaatctgatcctttagaggttgctccgtggtccttgcacgtggtcccttccaccttcaaagcttgccagggtgcatcaaattatttttatactttgactctacttctaccagccagagaaaactgcttttaaagggctcttgtgactagtttaagcacacccagattgttaaggtcaactgattagtagctttaattacatctgccaagtccctctgccctgcaatgtaacatcaaccatggaagtaacatgaggggcagagttcatgggggccatcttagaattctgcctaccacaaatattcgtagttatacttttatatacatttttaaatttttcttatttttggtccatatgtttgtaccgtttgtctttttagttaactagtttgtgaaagcattttgtatgttgtacaatatatgttcagattttcttatcttggatgcaaacatttttttccaactcttgtaagttgtctgttgaccacattcaaaagtactttttccaaataaaactttgccttttgaatttca

SEQ ID NO: 539 - DNA, 3023 bp, Homo sapiens
tcctcaacacaaactttccgtcccgctcgctccctcctccgcgctcggcgcctcccgctccagcccggctcattccgcacattccggccagccccctccccacgaccccccttccccggccccccttgcggctccctcgggcccggcggagcggcccggccggagcgcccccgcgagctcggaccaggctcagccgcccagtgggctcaggcccagagcccagagcaaccagcacaatagcgtccaacagctggaacgccagcagcagccccggggaggcccgggaggatgggcccgagggcctggacaaggggctggacaacgatgcggagggcgtgtggagcccggacatcgagcagagcttccaggaggccctggccatctacccgccctgcggccggcggaagatcatcctgtcagacgagggcaagatgtacggccgaaatgagttgattgcacgctatattaaactgaggacggggaagactcggacgagaaaacaggtgtccagccacatacaggttctagctcggaagaaggtgcgggagtaccaggttggcatcaaggccatgaacctggaccaggtctccaaggacaaagcccttcagagcatggcgtccatgtcctctgcccagatcgtctctgccagtgtcctgcagaacaagttcagcccaccttcccctctgccccaggccgtcttctccacttcctcgcggttctggagcagcccccctctcctgggacagcagcctggaccctctcaggacatcaagccctttgcacagccagcctaccccatccagccgcccctgccgccgacgctcagcagttatgagcccctggccccgctcccctcagctgctgcctctgtgcctgtgtggcaggaccgtaccattgcctcctcccggctgcggctcctggagtattcagccttcatggaggtgcagcgagaccctgacacgtacagcaaacacctgtttgtgcacatcggccagacgaaccccgccttctcagacccacccctggaggcagtagatgtgcgccagatctatgacaaattccccgagaaaaagggaggattgaaggagctctatgagaaggggccccctaatgccttcttccttgtcaagttctgggccgacctcaacagcaccatccaggagggcccgggagccttctatggggtcagctctcagtacagctctgctgatagcatgaccatcagcgtctccaccaaggtgtgctcctttggcaaacaggtggtagagaaggtggagactgagtatgccaggctggagaacgggcgctttgtgtaccgtatccaccgctcgcccatgtgcgagtacatgatcaacttcatccacaagctgaagcacctgcccgagaagtacatgatgaacagcgtgctggagaacttcaccatcctgcaggtggtcacgagccgggactcccaggagaccctgcttgtcattgcttttgtcttcgaagtctccaccagtgagcacggggcccagcaccatgtctacaagctcgtcaaagactagggtgccctctgcgcctccttaaggatgcagggtgagcatctcctctccacacctgcctggcacccctgggggggtccaggattgaggattcatctacctgccaggcctcaggcccaggacccaggaggcctccccacctaccccagcacacacactccctgccactgttctgcgctttaattgtgggagaagagaggagaggagggctcagcggtggggcagcctgtccggggcgctgacccaccatcaccctgctctgcccagcctcgcgtgacctcagagaggtggggataggggacaccttcagcctccagcatgtgtggccactgtacccccacccacccttgggggagcatgatgggcaggtgagggcaggatggagaccaagggagtcagtgagcagaggccctgggagtgtccggttggggttggactgaggacagaggggcccacacttccttgcccctttgtgtcccaggcctggtgcccagactccttgcatggcttgtgtggtcctcagactccgcacagcgagcgtaggtctctgggtttcagatgaagtgcccaggctccaggaagttgagggacccacaggagaggtgggcagagctggagttctcatccagggctgcttgtccccagagcccaggtttatactacctccctggggcgggggctggccgcagggtaggggagaggctctgcagtgtggagtggagcctcatcgaggggcgctgggttaggggagcacctgtttcagactgggcatgaagaagggagcacagcagctactagaccccattagcacctcattagcccacaagccagccaggggccccaggaagatggggcaccccccagcaccctccagattgagagcaaggtagaggaaggagtcccagcctctgggcagaccagaggcccagagggagagagtagcagaaggcttttgatttttctcttgcctgaggcttgaatctgacaaacccttggtgggcactgctcccttaggttcttccccacctcaatctacctgcctagagtagcagctcccagacccagttctgggactgaaggttaacccttcacctgctgtcccttcttaacacccaggcccccagagccagctgggcctgtccagcagccacctgtgggtatttatgagtttcatatgaagtactgtgccccttcccttcctcatcccgaccctgcccgagcttcctgaaggtcctcactgtttgcatatcgctcaggccacctccaaaccccacctaggttttataatgtatattatatatttttttgtgtatttttaaaatccagctgtgatgggttatatcataaatgcagcttggggttggagcaggggccctcaaaggcccagctcctgctcaaaaaaaaaaaaaaaaaaaaattaaagttatttgtttgtgggtcagtcatgtaaaaaaaaaaaaaaaaaaaaaaaaaaaaaaaaaa

SEQ ID NO: 540 - DNA, 5820 bp, Homo sapiens
agccgctgcgcccgagctggcctgcgagttcagggctcctgtcgctctccaggagcaacctctactccggacgcacaggcattccccgcgcccctccagccctcgccgccctcgccaccgctcccggccgccgcgctccggtacacacaggatccctgctgggcaccaacagctccaccatggggctggcctggggactaggcgtcctgttcctgatgcatgtgtgtggcaccaaccgcattccagagtctggcggagacaacagcgtgtttgacatctttgaactcaccggggccgcccgcaaggggtctgggcgccgactggtgaagggccccgacccttccagcccagctttccgcatcgaggatgccaacctgatcccccctgtgcctgatgacaagttccaagacctggtggatgctgtgcgggcagaaaagggtttcctccttctggcatccctgaggcagatgaagaagacccggggcacgctgctggccctggagcggaaagaccactctggccaggtcttcagcgtggtgtccaatggcaaggcgggcaccctggacctcagcctgaccgtccaaggaaagcagcacgtggtgtctgtggaagaagctctcctggcaaccggccagtggaagagcatcaccctgtttgtgcaggaagacagggcccagctgtacatcgactgtgaaaagatggagaatgctgagttggacgtccccatccaaagcgtcttcaccagagacctggccagcatcgccagactccgcatcgcaaaggggggcgtcaatgacaatttccagggggtgctgcagaatgtgaggtttgtctttggaaccacaccagaagacatcctcaggaacaaaggctgctccagctctaccagtgtcctcctcacccttgacaacaacgtggtgaatggttccagccctgccatccgcactaactacattggccacaagacaaaggacttgcaagccatctgcggcatctcctgtgatgagctgtccagcatggtcctggaactcaggggcctgcgcaccattgtgaccacgctgcaggacagcatccgcaaagtgactgaagagaacaaagagttggccaatgagctgaggcggcctcccctatgctatcacaacggagttcagtacagaaataacgaggaatggactgttgatagctgcactgagtgtcactgtcagaactcagttaccatctgcaaaaaggtgtcctgccccatcatgccctgctccaatgccacagttcctgatggagaatgctgtcctcgctgttggcccagcgactctgcggacgatggctggtctccatggtccgagtggacctcctgttctacgagctgtggcaatggaattcagcagcgcggccgctcctgcgatagcctcaacaaccgatgtgagggctcctcggtccagacacggacctgccacattcaggagtgtgacaagagatttaaacaggatggtggctggagccactggtccccgtggtcatcttgttctgtgacatgtggtgatggtgtgatcacaaggatccggctctgcaactctcccagcccccagatgaacgggaaaccctgtgaaggcgaagcgcgggagaccaaagcctgcaagaaagacgcctgccccatcaatggaggctggggtccttggtcaccatgggacatctgttctgtcacctgtggaggaggggtacagaaacgtagtcgtctctgcaacaaccccacaccccagtttggaggcaaggactgcgttggtgatgtaacagaaaaccagatctgcaacaagcaggactgtccaattgatggatgcctgtccaatccctgctttgccggcgtgaagtgtactagctaccctgatggcagctggaaatgtggtgcttgtccccctggttacagtggaaatggcatccagtgcacagatgttgatgagtgcaaagaagtgcctgatgcctgcttcaaccacaatggagagcaccggtgtgagaacacggaccccggctacaactgcctgccctgccccccacgcttcaccggctcacagcccttcggccagggtgtcgaacatgccacggccaacaaacaggtgtgcaagccccgtaacccctgcacggatgggacccacgactgcaacaagaacgccaagtgcaactacctgggccactatagcgaccccatgtaccgctgcgagtgcaagcctggctacgctggcaatggcatcatctgcggggaggacacagacctggatggctggcccaatgagaacctggtgtgcgtggccaatgcgacttaccactgcaaaaaggataattgccccaaccttcccaactcagggcaggaagactatgacaaggatggaattggtgatgcctgtgatgatgacgatgacaatgataaaattccagatgacagggacaactgtccattccattacaacccagctcagtatgactatgacagagatgatgtgggagaccgctgtgacaactgtccctacaaccacaacccagatcaggcagacacagacaacaatggggaaggagacgcctgtgctgcagacattgatggagacggtatcctcaatgaacgggacaactgccagtacgtctacaatgtggaccagagagacactgatatggatggggttggagatcagtgtgacaattgccccttggaacacaatccggatcagctggactctgactcagaccgcattggagatacctgtgacaacaatcaggatattgatgaagatggccaccagaacaatctggacaactgtccctatgtgcccaatgccaaccaggctgaccatgacaaagatggcaagggagatgcctgtgaccacgatgatgacaacgatggcattcctgatgacaaggacaactgcagactcgtgcccaatcccgaccagaaggactctgacggcgatggtcgaggtgatgcctgcaaagatgattttgaccatgacagtgtgccagacatcgatgacatctgtcctgagaatgttgacatcagtgagaccgatttccgccgattccagatgattcctctggaccccaaagggacatcccaaaatgaccctaactgggttgtacgccatcagggtaaagaactcgtccagactgtcaactgtgatcctggactcgctgtaggttatgatgagtttaatgctgtggacttcagtggcaccttcttcatcaacaccgaaagggacgatgactatgctggatttgtctttggctaccagtccagcagccgcttttatgttgtgatgtggaagcaagtcacccagtcctactgggacaccaaccccacgagggctcagggatactcgggcctttctgtgaaagttgtaaactccaccacagggcctggcgagcacctgcggaacgccctgtggcacacaggaaacacccctggccaggtgcgcaccctgtggcatgaccctcgtcacataggctggaaagatttcaccgcctacagatggcgtctcagccacaggccaaagacgggtttcattagagtggtgatgtatgaagggaagaaaatcatggctgactcaggacccatctatgataaaacctatgctggtggtagactagggttgtttgtcttctctcaagaaatggtgttcttctctgacctgaaatacgaatgtagagatccctaatcatcaaattgttgattgaaagactgatcataaaccaatgctggtattgcaccttctggaactatgggcttgagaaaacccccaggatcacttctccttggcttccttcttttctgtgcttgcatcagtgtggactcctagaacgtgcgacctgcctcaagaaaatgcagttttcaaaaacagactcagcattcagcctccaatgaataagacatcttccaagcatataaacaattgctttggtttccttttgaaaaagcatctacttgcttcagttgggaaggtgcccattccactctgcctttgtcacagagcagggtgctattgtgaggccatctctgagcagtggactcaaaagcattttcaggcatgtcagagaagggaggactcactagaattagcaaacaaaaccaccctgacatcctccttcaggaacacggggagcagaggccaaagcactaaggggagggcgcatacccgagacgattgtatgaagaaaatatggaggaactgttacatgttcggtactaagtcattttcaggggattgaaagactattgctggatttcatgatgctgactggcgttagctgattaacccatgtaaataggcacttaaatagaagcaggaaagggagacaaagactggcttctggacttcctccctgatccccacccttactcatcacctgcagtggccagaattagggaatcagaatcaaaccagtgtaaggcagtgctggctgccattgcctggtcacattgaaattggtggcttcattctagatgtagcttgtgcagatgtagcaggaaaataggaaaacctaccatctcagtgagcaccagctgcctcccaaaggaggggcagccgtgcttatatttttatggttacaatggcacaaaattattatcaacctaactaaaacattccttttctcttttttcctgaattatcatggagttttctaattctctcttttggaatgtagattttttttaaatgctttacgatgtaaaatatttattttttacttattctggaagatctggctgaaggattattcatggaacaggaagaagcgtaaagactatccatgtcatctttgttgagagtcttcgtgactgtaagattgtaaatacagattatttattaactctgttctgcctggaaatttaggcttcatacggaaagtgtttgagagcaagtagttgacatttatcagcaaatctcttgcaagaacagcacaaggaaaatcagtctaataagctgctctgccccttgtgctcagagtggatgttatgggattctttttttctctgttttatcttttcaagtggaattagttggttatccatttgcaaatgttttaaattgcaaagaaagccatgaggtcttcaatactgttttaccccatcccttgtgcatatttccagggagaaggaaagcatatacacttttttctttcatttttccaaaagagaaaaaaatgacaaaaggtgaaacttacatacaaatattacctcatttgttgtgtgactgagtaaagaatttttggatcaagcggaaagagtttaagtgtctaacaaacttaaagctactgtagtacctaaaaagtcagtgttgtacatagcataaaaactctgcagagaagtattcccaataaggaaatagcattgaaatgttaaatacaatttctgaaagttatgttttttttctatcatctggtataccattgctttatttttataaattattttctcattgccattggaatagatatctcagattgtgtagatatgctatttaaataatttatcaggaaatactgcctgtagagttagtatttctatttttatataatgtttgcacactgaattgaagaattgttggttttttcttttttttgttttgtttttttttttttttttttttgcttttgacctcccatttttactatttgccaatacctttttctaggaatgtgcttttttttgtacacatttttatccattttacattctaaagcagtgtaagttgtatattactgtttcttatgtacaaggaacaacaataaatcatatggaaatttatatttataaaaaaaaaaaaaaaaaaaaaaaaaaaaaaa

SEQ ID NO: 541 - DNA, 1182 bp, Homo sapiens
attgtgtcagaggaagcaaccatgcaggtgctaaccaagcgttaccccaagaactgcctgctgaccgtcatggaccggtatgcagccgaggtgcacaacatggagcaggtggtgatgatccccagccttctgcgggacgtgcagctgagtgggcctgggggccaggcccaggctgaggcccctgatctctacacctacttcaccatgctcaaggccatctgtgtggatgtggaccatgggctgctgccgcgggaggagtggcaggccaaggtggcaggcagcgaagagaatggaaccgcagagacagaggaagtcgaggacgagagtgcctcaggagagctggacctggaagcccagttccacctgcacttctccagcctccatcacatcctcatgcacctcaccgagaaagcccaggaggtgacaaggaaataccaggaaatgacgggacaagtttggtagaccttggacactagggaagatcccttcacatgatagaagacagactctttgatgaggtcggcggagcagttcactagccaatgatgagagcagaaaggcctagacctgcagccagaagtgaaggcggctcagttctccgggatgcttctctacctcctgagcaccaattcctggattccagtcactggctcacctttagaatgtctgttgctattcactgctcccctcgctcctcttaacagcttggggaggtgaccagtggttcaggagggactagacaattacctgtccagtgtggtatggtaggaagagtgtaggtgttggcacgtgaccaaaattcacatccctcctcatggcagtcattcagtatgtgtacttgtacaagttatttaacccattggagcctaaattccctcatctataaaatggggataatattatctacctcacaagcttatgaaaactaaacatgatgaatcaaaagcacttggcatgtgagggctattaaaatagcctgattttttttttctccccctctccccaatgtatttgctctggcccttgctttttaccctccagagctaagaggtagcagagtctcttgggatgagtgattcaccctcttacttggcgaccactgatgagatcaacaacaggtgaactataaacctattatttattgcagaactaataaaaaatccaaagccttgtatttgtaaa

SEQ ID NO: 542 - DNA, 2014 bp, Homo sapiens
aggcggcttttggtcacaggctcccgagttctcctagctggggctgcggagctggggggagggaagagaggaaaggggagggggtgcctggagaggcggaggctcgcgcgcctgcgcatccagctccagggaccctaggttttctatgggattcccaatctgcagcagagatttacccgagcgtgttgcggcagcggctgggcttgcaaggcgcgatccaagagggatttaagcagcccagagctccagagaaaaagagagcgagagagaaccacacacagagacggcttaagcgtttacccgaattaaatatatatttttaaaaagaactgttgagttttatcattttcgttaagtgaccgtgcgcagcgctgtaactgcaggatggggaagcagaatagcaaactggcccctgaagtgatggaggacctggtgaagagcacagagtttaatgagcatgaactcaagcagtggtacaaaggatttctcaaggactgtccaagtgggaggctaaatctcgaggaatttcagcagctctatgtgaagttctttccttatggagacgcctccaagtttgcccagcatgccttccgaaccttcgacaagaatggggacggcaccattgacttccgagagttcatctgcgctctgtccatcacctccaggggcagctttgagcagaagctgaactgggccttcaatatgtatgacctggatggtgatggcaagatcacccgagtggagatgctggagatcatcgaggctatctacaaaatggtaggcactgtgatcatgatgaaaatgaatgaggatggcctgacgcctgagcagcgagtagacaagattttcagcaagatggataagaacaaagatgaccagattacactggatgaattcaaagaagctgcaaagagcgacccttccattgtattacttctgcagtgcgacatccagaaatgagctgatgtcaatgctatggactgcacaaaagtctcaatgttccattcagtctgcagctattcacacacacacacacacacacacacacacacacacacacacacacaaatattgcttggactacctataaatggacttgcttcttgtgtttgaaacactcgtgtgcatgagaatgtcatttgctaatgaattttaaaagcatatataaaacaaaacaaacaacctgccacaatgtgatatgtgtaatatcatttcataaaaatccctcttcctccaaagcctgggcagaaatgtgctgcaaagagttatatgacttcttgttcatgttttgctaatgctcgtatctccttgattacataatgttagtagcactgagacccccatggtaatgtaacttaattataagctatgtcactaccctcctgtaaaatactattggacagacacagagggacccttggctcctgtgtctggtccacacaccacagaagcttgtattatcagtgaatataaatgtactacatttgcatgccttttgggtttgccttaattcttacctcatttgcatcctatcgatctggaaagagctgttttggatgaatgcagtataaaatgtaaaaaccctgctaaatgacttattgattaagtatatctatctatatatacatatacacaaagatattatttatcgaaagtaaaaaagatggaagtgtattggtttctgtttgaattttcaaaggcttccaatgtggtggcaataaatgtcccaaataaatttataacaattgattttccccctaattcttattttataattttaaaattgcagcagttgctagcaacaacttactaaatctactcttaaatatacaactttggaatttgaagaattaatgacaacaaaagggaaaaaagcaactttccaacttttcatccaggctcccaaaagagggacaacgaacatggcatgtgaaaagtaaaacagatttgttcattccgaaaaaaaaatgttcattctatgacaataaattttatctcagtgtgaaaaaaaaaa

SEQ ID NO: 543 - DNA, 4055 bp, Homo sapiens
ccgacccgctaggccccgcgcggctcggatccggcggcgctgtttcggtcgggagtgggtgggagagaagccggggcaggggaggagccgccggagctgtcggagccgtgacacccagggcagctacactcagaagccacaaggaatgctagtggagcccctcatccctcccagcttctcttccaagctgccccgtggggcttgatccaggaagctacttcagaaagtagacaatcattccaagggtacaacaaggtttaccacaatgtgagggactcagccattgcaaattgtacagatgagggcccttggaagaaaatcctcgctgtgtccaggctgaggcggggggctaatgacagtgtgagctctagatggtgtgagaccaccccaaagccaagaaatggctacagccgtggaaccagaggaccaggatctttgggaagaagagggaattctgatggtgaaactggaagatgatttcacctgtcggccagagtctgtcttacagagggatgacccggtgctggaaacctcccaccagaacttccgacgcttccgctaccaggaggcagcaagccctagagaagctctcatcagactccgagaactttgtcaccagtggctgagaccagagaggcggacaaaggagcagatcctagagctgcttgtgctggaacaatttcttaccgtcctacctggagaactacagagctgggtgcggggccaacggccagaaagtggcgaggaggcagtgacgctggtggagggtttgcagaaacaacccaggagaccaaggcggtgggtgactgtccatgttcacggccaggaagtcctgtcagaggagacggtgcatttaggagtggagcctgagtcacctaatgagctgcaggatcctgtgcaaagctcgacccccgagcagtctcctgaggaaaccacacagagcccagatctgggggcaccggcagagcagcgtccacaccaggaagaggagctccagaccctgcaggagagcgaggtcccagtgcccgaggacccagaccttcctgcagagaggagctctggagactcagagatggttgctcttcttactgctctgtcacagggactggtaacgttcaaggatgtggccgtatgcttttcccaggaccagtggagtgatctggacccaacacagaaagagttctatggagaatatgtcttggaagaagactgtggaattgttgtctctctgtcatttccaatccccagacctgatgagatctcccaggttagagaggaagagccttgggtcccagatatccaagagcctcaggagactcaagagccagaaatcctgagttttacctacacaggagataggagtaaagatgaggaagagtgtctggagcaggaagatctgagtttggaggatatacacaggcctgttttgggagaaccagaaattcaccagactccagattgggaaatagtctttgaggacaatccaggtagacttaatgaaagaagatttggtactaatatttctcaagtgaatagttttgtgaaccttcgggaaactacacccgtccaccccctgttagggaggcatcatgactgttctgtgtgtggaaagagcttcacttgtaactcccaccttgttagacacctgaggactcacacaggagagaaaccctataaatgtatggaatgtggaaaaagttacacacgaagctcacatcttgccaggcaccaaaaggttcacaagatgaacgcgccttacaaatatcccctaaaccggaagaatttggaagagacctcccctgtgacacaggctgagagaactccatcagtggagaaaccctatagatgtgatgattgcggaaagcacttccgctggacttcagaccttgtcagacatcagaggacacatactggagaaaaacccttcttttgtactatttgtggcaaaagcttcagccagaaatctgtgttaacaacacaccaaagaatccacctgggaggcaaaccctacttgtgtggagagtgtggtgaggacttcagtgaacacaggcggtacctggcgcaccggaagacgcacgctgctgaggaactctacctctgcagcgagtgcgggcgctgcttcacccacagcgcagcgttcgccaagcacttgagaggacacgcctcagtgaggccctgccgatgcaacgaatgtgggaagagcttcagtcgcagggaccacctcgtcaggcatcagagaacacacactggggagaaaccattcacgtgccctacctgtggaaaaagcttcagcagaggatatcacttaattaggcatcagaggacccactcagaaaagacctcctagctaggtccccatgtgaggagatctgctttcagccctcacctaagggaggtgaggaagaggaaaagccctcttgtcagcctgggaagaccttttcgagggagtctccctgacctgctcagatctgacattacctcttcctgcaactaaacacgagcctgggcagaacctctcagccttcctctacgccttgaggggatgtttcatccaaagtacaacctgaattgaggcttctccttcactggagtgcacctgcctctacctcatgggtataaagtaggagaactaagagacttaagaggtcgtggttcctatatcgtccaaaaaataggctgttacatatcctaaagactgctcaacagcttcaagttgaaagtggccaaggacagccccttaggtttgggaagggacgagcctgaaggattctgtctttactggggtcaaatcttaaagcacacagctctggactcaagacaggaggtttgcgtcctgatggctttgccacacattcacaggataactgcatagatccctcgctgtctgattcacttcttaccatgcactttcctttgatgctgaggagaaatggaagtgggcgaaaaatctcaaggctgcttcatgtggaccttgtcaagctgctccctcccccagcgtcaaattgttatcaggtgccaaacactgctagaaaggagggcctagtcagaagcctctttccatacgagttttggttttgtttttaatatttttttctattaaaatactcatgcatttaaccttcccgttattcaaccagtctcttggttgcatccctagcacttctactacaagtgagatggtagtgtttgagtgcttattgagtaaagcataattcggtcataatgaaatcgttcacattccctcatatgcacaagcccaccaaccccttcacaccccccttcacaggggtcgtatgagtaaggggatttggaaactgtcaacttacaaaggcactataacaattacagaatcatgattgccatgggccactttatttacatgaagacaactggagaacgactaagaccaaattatggaaaataagaaaaagctgttgctggcaagaccatcaagactgttctgacaccctgtccccatcatccctgactgagtactctgacatcacggaaagtgttgaacctgggaccctgaggaattcaccaggagtaaatggctttcatgtatttgtgttgtttgctttttcttacgtgattttatgttcatagagctagaaagtagcatctcatgatggcccaacaatctctgttgccagttaaaggttccttggagatgaggctgaataattatgaacctcaccttctctgattgtgggagtggcaagaactggggagacgtcctccataagtggagcacagggtatggggttaaagcatgacagggagagtcttctgtgcctggtttcttctcctctatctcataatgcattatgggcccgaggaataggggagggttaataagactccaaccctaatggcccaacagggaaattctcattttggtcgatgatattctgatggactggtttggtcttaataccagtcaaccgttgtccttctggaaatatacatatatgaaataaataaaggtaacacttgcagccaagttccctggtttctgggacttcccatcttacccattccttttccagggcttc

SEQ ID NO: 544 - DNA, 15964 bp, Homo sapiens
gagccgagctgggagatggcggcggcagcggcggcgccgagagtgtgagcaccgcccgggagccgccggcccgggcgcagcgcgaccccgaccccgcccgcccgcctgcccgccatgggcaacgaggtcagcctggagggcggcgctggcgacgggccgctgccgcccggcggcgccggccccggcccgggccccggccccggccccggcgcaggaaagccgccttcagcaccggccggtggcggacagctccccgcggcgggagcagcgcggtcgaccgcggtaccaccggtccctggccccggccccggccccggtcccggccctggcccgggcagcacttcccggagactggaccccaaggaacccctgggtaaccagagagcagcttccccaactccgaagcaggcttctgctaccactcctggccatgagagcccccgagagacaagggcacagggaccagcaggccaggaggctgatggtccccgcaggacgctgcaggtagacagcaggacacagagatcagggcggtccccctcagtgtcaccggacagaggcagcacccccacatcaccctactccgtccctcagatcgccccccttcccagcagcacgctgtgtcccatatgcaagacttcggacctcacgtcgacccccagccagccaaacttcaacacctgcacccagtgtcacaacaaggtctgcaaccagtgtgggttcaaccccaaccctcatctcacccaggtgaaggagtggctctgtctgaactgtcagatgcagagggctctgggaatggacatgaccactgcacctcgctccaagagccagcagcagctgcactccccagccctgtctcctgcccactccccggccaaacagcccctggggaagccagaccaagagagatctcggggcccaggaggaccacagcctgggtcccgccaggctgagacagccagggccacctcagtgccggggcctgcccaagcagctgcccctccagaggtggggagggtgtctcctcagccccctcaacccaccaagccttccacagctgagcccaggccacctgcaggagaggccccggccaaaagtgccaccgcagtgcccgctgggcttggtgccactgagcagacccaggagggcctcactggtaagctcttcggccttggcgcgtcactgctaacccaggcgagcaccctcatgtctgtgcagcccgaggctgacacccagggccagcctgcccccagcaaggggacacctaagatcgtcttcaatgatgccagcaaggaggctggcccaaaacccttgggctcagggcccgggcctgggccagcacctggagccaaaactgagcctggggctagaatgggtcctggatctggacctggagccctgccgaaaactgggggaacaaccagtccaaagcatggcagagcagaacatcaggcagcatcgaaggctgctgccaagccaaagaccatgccgaaggaaagggccatctgcccactgtgccaagccgagctcaacgtgggcagcaagagcccagccaactataacacatgcaccacctgcaggctccaggtgtgcaacctgtgtggcttcaacccaacaccccacctggtggagaaaacagagtggctctgtctgaactgccaaaccaagcggctactggagggcagcctaggagagccgacccccctgccgccgcccacctcacagcagccccctgtaggggcccctcaccgtgcatctggaacatcccctctgaagcagaaagggccacaggggctgggccagccttcaggccccctgcctgccaaggccagccctctatccaccaaggccagccctctgcccagcaaggccagcccccaggccaagcccctcagggcttctgaacccagcaagaccccaagcagtgtccaggaaaagaagacccgagtccccactaaagctgagcccatgccgaagccacctccagagactaccccaacccctgcgactcctaaagtaaagagtggggtgaggagggctgaacctgccacccctgtcgtcaaggctgttccagaagcccccaagggtggggaggcggaggacctggtgggcaagccttactctcaggatgcgtctcggagcccacagagcctcagtgacacaggctattcctctgacggcatctctagctcccagagtgagatcacaggagtcgtgcagcaggaggtggaacagctggacagtgcaggggtgacagggccacatccacccagcccctccgagatccacaaggtggggagcagcatgcggcctttgctgcaggcccagggcctggccccaagtgagcggagcaagccactctccagcggtactggcgaggagcagaagcagcggccccactccttgtccatcacgcctgaggcctttgactctgatgaggagctggaggatatcctggaggaagacgaagactctgctgagtggaggcgccggagagagcagcaggacactgccgagtcctcagacgactttggcagccaattgaggcacgactatgtggaggacagcagtgagggtggcctgtcccctcttccaccccagcccccagcccgggcagcagaactgactgatgaggatttcatgcgacggcagattctcgagatgagcgccgaggaagacaacctggaggaggatgacactgccacctccgggcgtggcctggccaaacatggcacccagaaaggtggccccagacccaggcctgagcctagccaagaaccagcagcactgcccaagaggcgcctgccccacaatgccaccacgggctatgaggagctgctccctgagggaggctcagcagaggctaccgatggcagtgggaccctgcagggtgggctccgtcgcttcaagaccattgagctcaacagcacgggaagttatggtcatgagttggacctgggccaaggcccagaccccagtctggaccgggagcctgagctggagatggagagcctaacgggctcccctgaggaccgctcccgtggtgagcactcctctacattgcctgcctccacacccagctacacctcgggcacctctcccacctctctgtcctccctagaggaggacagtgacagcagccccagccgcaggcagcgtctagaagaagcaaagcagcagcgcaaggcccggcaccgctcccacgggcccctgctacccaccatcgaggactcctcagaggaggaggagctgcgggaggaagaggagctgcttcgtgagcaagagaagatgcgggaggtggagcagcagcgcatccgcagcacggcccgcaagacccggcgggacaaggaagaactgcgggcccagcggaggcgagagcgctccaagacaccacccagtaacttgtcacccatcgaggatgcctccccgacggaggagctgaggcaggcggccgagatggaggagctacaccgctcctcctgctctgagtactcaccctcaccctcccttgactctgaggctgaggccttggatggtggccctagccggctttacaagtcaggcagtgagtacaacctgcccaccttcatgtccctctactcaccaaccgagacaccctccggcagctccaccactcccagttccggacggccgctcaagagcgctgaggaggcttatgaggagatgatgcgcaaagctgagctgctccagaggcagcaaggccaggcagcaggggcccggggaccccatggcggcccctctcagcccacaggcccccggggcctgggctccttcgaatatcaagacactacagaccgtgagtatggccaggctgctcagcctgccgcagagggcacgccagccagcctgggagcagccgtgtacgaagaaatccttcagacatcacagagcatagtccgcatgcggcaggcctcctcacgagacctggcttttgctgaggacaaaaagaaggagaagcagtttctaaatgctgagagtgcatacatggacccaatgaagcaaaatggtggcccccttacccctggtaccagtcccacccagctcgctgcccctgtgtccttctctacccccacctcctcagacagcagcgggggccgagttattcccgatgtccgtgtcactcagcattttgcaaaggagactcaggaccccctcaagctgcacagctctcctgcctcccccagctcagcctccaaggagataggcatgcccttttcccagggccctgggaccccagccaccacagctgtggctccttgtccagctgggctgccacgaggatatatgactccagcctccccagcaggctccgagcgtagtccttcaccatcttccacagcccacagctatggacacagcccaaccactgcaaactatgggtcccaaactgaggatctaccccaggcccccagtggccttgctgcagctggacgagctgctagagagaagcccttgagtgcgagtgacggtgagggtggcactcctcagccttcccgggcatattcctactttgcaagctccagcccacctctctccccgtcttccccctcagagagtcccacattctcccctggcaagatgggcccaagggccacagcagagttctctacacagacgccaagtccagcccctgcctcagacatgccacggagccctggtgcccccactccatcacctatggtagcccagggtacacaaacaccacatcgacccagcacgcctcgcctggtgtggcaggagtcctctcaagaggctccctttatggtcatcacgctggcatctgacgcctccagccagaccaggatggtacatgccagtgcctccacctccccgctctgctcacctactgaaacccagcccaccacccatggctacagccagacaacacctccgagtgtgtctcagctgcccccagagccacctgggccacctggctttccacgggtgcccagtgctggtgcagatgggcccctggcactatatggctggggtgccctccctgctgagaacatctccctgtgccggatctcctctgtccctgggacgtctagggttgagccaggccccaggacccctggcactgcagtggtagacctccgtacagctgtcaagcccactcccatcatcctcactgaccagggcatggacctcacctctcttgctgtggaagcgaggaagtatggtcttgccctggatccaatcccaggacggcagtcgaccgccgtgcagcccttggttatcaacctcaatgcccaggagcataccttccttgctactgccaccaccgtgagcatcaccatggcctcgtctgtgttcatggctcaacaaaagcagcctgtggtctatggagacccctaccagagccgccttgactttggccagggtgggggtagccctgtgtgcctggcccaggtcaaacaagtagagcaggctgtccagacagccccataccgaagtgggccccggggaagacccagggaggccaagtttgccagatataacctacccaaccaagtagctcctctggccagaagagacgttttgatcactcagatgggcaccgcccagagcattggcctcaagccaggcccagtgccagagccaggtgccgagccccaccgggccacccctgcagagctgcggtcacatgctctgccaggtgccaggaagccacacacagtggtggtgcagatgggagagggcacagcaggcactgtgaccacactgctcccagaggagcctgcgggtgccctggaccttaccgggatgaggcctgagagccagctggcatgctgtgacatggtctacaagctcccctttggcagcagctgcactggcaccttccacccggcccccagtgtgcctgagaagagcatggcagatgctgccccacctggccaaagcagcagccccttctatggtccccgggaccctgagcctcctgagcccccaacctaccgggcacagggggtggtggggcctgggccccatgaggagcagaggccctacccacaaggcctgcctggtaggctgtactcctccatgtctgacaccaatttggctgaggctggcctcaactaccatgcccagaggatcgggcagctcttccagggtcctggacgagactcggctatggacctcagctcactgaagcactcctacagcctgggctttgcggatggacgctacctagggcagggcttgcagtatggctcagtcacggacctgcgtcatcctacagaccttttggctcacccgcttcccatgcggcgctatagctcagtgtcgaacatctactcagaccacaggtacggcccacggggagatgcagttggcttccaggaggccagcctggcccagtacagtgccaccacagcccgtgaaatcagtcgcatgtgcgctgccctcaactccatggaccagtatggtgggcggcatggcagtggtggtggtggccctgaccttgtgcagtaccagccccagcacgggcccgggctcagtgctccacagagtctggttcccctcagacctggactccttggtaaccccacctttccagagggccacccaagtcctgggaacttggcccagtatgggcctgcagcaggccaaggaacagcagtcagacagctgctgccgtccacagccactgtacgtgcagctgatggcatgatctactcgactatcaataccccaattgctgcaacactgcccatcaccacccagcctgcctcagtcctgcggcccatggtgcgtggtggcatgtacaggccttacgcatctggtggaatcacagccgtgccactcaccagtctgacacgtgtgcccatgattgccccccgggtacctcttggacccacagggctgtaccgctatcctgcaccaagtagatttcccattgcttccagtgttccacctgcagaagggcctgtctatctggggaaacctgctgctgccaaggcccctggggctgggggcccttcaaggccagagatgccagtaggggctgcacgggaagagcctcttcccacaaccacccctgctgccatcaaggaggctgcaggagccccagctcctgccccactagctggccagaagccaccagcagatgctgctcctgggggtggcagtggggccctcagccggccagggttcgagaaagaggaagcatcacaggaggagaggcagcggaagcaacaggagcagctgctccagctagagcgggagcgggtggagttggagaagctgcgacaacttcggctgcaagaggagctagagcgggaacgtgtggagctgcagaggcaccgtgaggaggagcagctgctggtgcagcgggagttgcaggagctgcagaccatcaagcaccatgtgctgcagcagcagcaagaggaacgccaggctcaatttgcactgcagcgggaacagctagcgcagcagcgtctgcagctggagcagatccagcagctgcagcagcagctgcagcagcagctagaggagcagaagcagcggcagaaggctccctttcctgcagcctgtgaggcacctggccgagggcctcccctagcggctgctgagttggcccagaatggccagtattggcccccccttacacatgcagccttcattgccatggcagggcctgaaggacttgggcagcctcgtgagcctgtgctgcaccggggtctccccagctctgcctcagacatgtcactgcaaacggaggagcagtgggaggccagccgtagtggcatcaagaagcggcactccatgccacgcctgcgggatgcctgtgagctagagtctgggactgagccctgtgtggtcaggaggattgccgacagcagcgtgcagacagacgatgaggatggggagagccgctacctcttgagtcggcgacgccgggcacggcggagtgctgactgcagtgtgcagacggacgacgaagacagtgctgagtgggagcagccagtgcgccgccgcaggtctcgtcttccccgccactcagactcaggctctgacagcaagcacgatgccactgcctcatcatccagtgctgctgccactgtgagggccatgagcagcgtgggcatccagaccatcagtgactgctccgtgcagacggagcctgaccagctgcccagggtctctccagccatccacatcacagctgccaccgatcccaaggtggagatcgtcaggtacatatcggcgccagagaagactgggcgtggggagagcctggcctgccagacggagccagatgggcaggcccagggtgtagccgggccgcagcttgtagggccaactgccatcagcccctacctgcctggcatccagatcgtcaccccagggcctctgggcagatttgaaaaaaagaagccagatcccctggagattgggtaccaggcccacctgcctccggagtctctctcacagcttgtgagccgccagcctcccaagtcccctcaggtcctctactcaccagtctcacccctgtcccctcaccggctcctggacacctcctttgcttccagtgagaggctgaacaaagctcacgtgagtccccagaagcacttcacggctgacagcgctctccgccagcagacgctgcctcgccccatgaagaccctgcagcggtccctgtctgaccctaagcccctcagccccaccgccgaagagtctgccaaagagagattctccctctaccagcaccaggggggactgggtagccaggtgtcggcgttgccacccaacagcctggtccgcaaggtgaagcggacactgcccagcccccctccagaggaggctcaccttcccctggctggccaggcctccccacagctgtatgcagccagcctgctgcagcgagggctgacggggcccaccactgtccctgctaccaaggccagcctgctccgggagctggaccgggacctgcggctggtggagcatgagtccaccaaactgcgcaagaagcaggcagagctggatgaggaggagaaggagattgacgccaagctcaagtacctggagttgggtatcacacaacgcaaagagtctttggccaaagaccggggtggccgtgactacccacccttgcgtggtcttggcgagcatcgtgactacctatcggacagtgagctcaaccagctgcggctccagggctgcaccactcccgctggccagtttgtggacttccctgccactgccgctgctcctgccaccccctctggtcccactgccttccagcagccccgcttccagcctccagccccacagtattctgcaggcagtggtgggccaactcagaacggattcccagcccaccaggcccccacctaccctggccccagcacgtacccagctcctgcctttcctcctggtgccagttacccagctgagcctggcctgccaaaccagcaggctttccgccccacaggccactatgcaggccaaacacccatgccaaccacacagagcaccctttttccagtccccgctgatagccgtgccccactgcagaagccacgccagacatcgctagccgacttggagcagaaggtgcccaccaactatgaggtgatcgccagccccgttgtgcccatgtcttcagccccatctgaaaccagctacagtggcccagcagtgagcagcggctatgagcagggcaaggtccctgaggtgccccgggctggtgaccgtggcagtgtgagccagagcccagcccccacctacccctctgactcacactataccagtctggagcagaacgttcctcgaaactacgtaatgattgatgacatcagtgaactgaccaaggacagcacctctactgctcctgatagccaacggctggagcccctggggccaggcagcagtgggcgtccagggaaggagcctggagaaccaggtgtccttgacgggcccacactgccctgctgctatgccagaggagaagaggaatctgaggaggactcatacgatccccgcgggaagggtggccacctccggagcatggagagcaatggtcgaccagccagtacccactactatggtgacagtgactacaggcatggggctcgagtagagaagtatggtccagggcccatggggcccaagcatccctccaagagcctggctccagctgccatctcctcaaagcgcagcaagcaccggaagcagggcatggagcaaaagatatccaagttctcgcctattgaagaggccaaagacgtagagtcagacctggcgtcctaccccccacctgcagtcagcagcagcctggtctctcggggcaggaagttccaggatgaaatcacctatgggctcaagaagaacgtgtatgagcagcaaaaatactatgggatgtccagccgggacgcagtggaggacgaccgcatttatggcgggagcagccggtcccgggcaccttctgcatacagtggggagaagctgtccagccacgacttcagtggctggggcaaggggtacgaaagggaacgggaggctgtggagcgacttcaaaaagcgggccccaagccctcatccctaagtatggcccacagccgggtacgaccccccatgcggagccaggcctctgaagaggagagccccgtcagtcctttggggaggccccgccctgccggagggcccctccctcccggcggggatacctgcccacagttctgctccagccactccatgcctgatgtccaggaacatgtcaaggacggacctcgggcccacgcatataagcgtgaggagggctacatcctggatgattcccattgcgtggtttccgacagcgaagcgtatcacctgggccaggaggagacggactggtttgataagccccgggatgcccgctctgaccggttcaggcaccacgggggccatgcagtttcctcctcctcccagaagcgaggccctgccaggcacagctaccatgactacgatgaaccccctgaggagggcctgtggcctcatgatgagggtggcccaggccgccatgcctcagccaaggaacaccggcacggtgaccacgggcggcactcaggccgccacactggtgaggagccgggacggcgtgctgccaaaccacacgctcgggacctgggtcgccatgaggcccggccccactctcagcccagctctgctccagctatgccgaagaagggtcagcctgggtatcccagctctgctgagtactcacagccatcccgtgcttcatccgcataccatcatgcctctgacagcaagaagggctcccggcaagcccactccgggcccgctgcactgcagtcaaaggcagaaccccaggcgcagccgcagctgcaaggtcggcaggcagctccaggaccacagcagtcacagtcaccatcatccaggcaaataccctctggggcagcatcacgccagccacagacacagcagcagcagcaaggtcttgggctgcagcccccacagcaggctctgacacaggctcggctgcagcaacagagccagccaaccacccggggctcagcccctgctgccagccagcctgcagggaagcctcagccaggccccagcacagccacaggtcctcaaccagcaggaccgccacgggcagaacagacaaatggctctaaagggacagccaaagcaccgcaacaggggagggctcctcaggcccagccagcaccaggacctggacctgcaggtgtgaaggctggagccaggcctggaggaaccccaggggctcccgccggccagccaggtgccgatggggagagcgtgttctccaagatcctccctggcggggcagccgagcaagctggcaaactgacggaagctgtctctgcttttggcaaaaaattttcctcattctggtgaccatgcccagcatggctcttgaagaaatgaagagaggtatcattgctgtggaaaaatctctggagtcagaggcctgggcgcagctctggactctgcgtataacacatctacaatctggcaaacccttggcccaaagactcaccaggtgggacgtggcaggcaggcctcagttgaggacgtgatgttttctcacagcagctgcctgggtgaagcatctgctggacaagtcggaccactggccaggggacctttgattgtctttccagagatgctgctctctgcagggcaccaccttcaaggcacagcccttgttgggagggagaaccctctccagaaaccctgccaccatggtgtcttgccgtacttcccacagccgcctttttgcggcctggccggccaggcttcccgtgcgttatacacagagtttgggcacacactgccctccctccgagatgccagaagtttttccacagccttggagaggggctttgactgagggctgggggccctgggctccgtttccttcacattccagctggcccggatccctctgtggcacagggccctgcccgtcacatgccctctgggtgacatcggagcagacctccatgtggccaggggttgggagaactttacaaacattaggacctaacactgtctcatcgctgaaataagaggccatagcaccgaaaagcagcgtgggcgccggctgaggcttctcccagcccgtgggtggcagcgtgctagcacactgccaccatctcaaagccatccccctagccatcgtgagcatcccagcggcaccgccattgtctcaaccagccggctcctcgtctgtacacctggggatttcttttgatttcaagaacagccttaatcattccagtttgatttacgtgtatacctcataaacatttttcttttgtttctctctccccctttctctcttctcttggctcactcccttgcctctccccctccaccaccaccttgtgactgatggtttggtttcctctctgctctgcccctgctcagcacagggagaatgttgacttagaagcaatagggggcagcaggccaccaagagcacaaccccagggcgaggtctggggaggcctcccagcccgcctctgtttactgtgcaattccagtcgttcttaagccatcaccagtgggtgtactcagagcagaggggccaggacttctgccagccaagggaaaggcccagagccctgtgcgggggaatgtggcactgtctatccatccggtggactgggcagcattcctccccagggctcttcccttgggggcctcctttcatctggggcacagccacaagtctcatctctaacgttctatgcaatgaaatataaaccctcaatgacaactgttaatatttaataaattccatgttatgtataaggagttaattgcaaacatgcaattgagaaactggatagatacactcataaaacccccacccctccccaccccacccctgctcccattgtgtgtgtgaaattctcagtctgtggcatgtttgacctgtggcaggactcgctgctgccaggtgagtcaccgcctgtcctgcagtggagcatgcacagctcgcagcctctttgcacgatttcatccattttaaatgcttgaccctcttgcttggagttctttttgcctcagaacctctccttcaggagcacttctagctgacttctgcacaagctagtgaggacctgccagaattgttgcctgagcgtgccaggctgcagggcaggcagtaaaaggcccccacataccctgcagttttctctgtccaggacagcaggtaaaaaggaatccccagagcagacgcaatggtaggagcctgcacaggatgtgtgtgtatggacattctgaaggtttgctgtaggatatctgtctgtctgtcattttcccttcctaccccaaccctgagccagaggcatctgacagccctttcccagagggcaccacgcaagggcagagctgggcggcatccacagccagagaggcagaggcaagagcagagccaggctgtgcccgagggaccccagctcttgactgcacctgtttcatgcctctcctctgtggctaggaggctcaaaggactgtgagccaggagatctgggctggagctagggggtcaatggatgctcaggaagagctgggcctttggcacttgtggtgagaacagttgacagtggtcatctggaactgttcatataaacagtggcttcaagctaagtttcttgtgaagtttctcaatagcaaatcttacagaaggtcctgtgtgaccctctctgcatctgtccccaggacctatgctccctgctcacccccttctccaaagcccaagcgtcccgctgctcatcagcttttttaccattgagccaggagtgcggcaggcagtacctgcctgacccttcaaggcctgaccttcgtccagagtgctctggtttgcaccatgcatttctcaggggtccgcatttctcatgcttttctataagatctacacaccccttcagagagggctcctcgctcacctctggtagctatggatgggacaggaagctgccaacctttgtgttggacttaacacccttgcctttctgggacttggcctcaccccacccatggaatacctgcctcatcccaaagatcaggtatgggctgaatgcagccatctgagcaagggctgagggaagccatcacctaacacctctggccacccaggaccaggtctgtgtggggatgtgccttggagaccaaggcaatagtcctttccactacaggccaggggatgggacaagaagtagggaacaggcagggaaatgttaggaggtcagcctccagcaggcctagtctcaggctctaaagtactgacttttcagcaaatttcctttctggccaagccctctgagtttgaaattctgacatctgccactcctcatcccccactgtacccacaggatacatcatcgcccctctgtgaaggtggctggagcaggcctctggtccatggactgtccttcctggcccttgcatggatgcagttgtgactctggggacaatgcagccagaagctgagggaccagcacttggtgccttggaaagtagagagcaacagacacatctccaaatgggcaaggagtctctagcatgcagcccaggccttctccatacccctctccccagcatcatgagcaagggcattgcctcctctctctgctcacttcagggcccagtgcactcacttcacagtgacagccctcccctacaatccttgggcagagcatgtggtctgagggcccacagtgaaagaacagcagtggtggcaactatgccttgccttctggagcctgtagggagttttccaggcaggtcctttgccaggacagcatggtcctgccctgttgtcccgtctgctctcctcttacccacccccatgctgtaaatacttgtcatcatggactccaacagggttagagggacaggcctaatcaactgaaactcctcggagatgccatctctgtctccctgggtgccagcagccctgctgccatgtgcactggggtggcactggagagccatggcagtcgtgagatattgtatgtgtatgcacatgatcatgtgtgtatgtgcgtgcgtgcgtgcgtgtgtgtgtgtgtgtgtgtttctgcctcattcagtttctggggtcaaatcagctccttctctccaagtgcactaccctggagagtggtggccactcaataccttttcctctagctttcatgtcttgtttttgctttccccttcctcctccctctctccctttctttccttctctccttctttatttgaggggggaagagtgctgtacaaagtcaaacaaacaagtttacagttgtaagtgcaatgacccgagtcctccacatgaccttgtgaattgtgtgctgtccttctgtgctctgtgagaactcgtggtacttcagtgtccctccccctgtattgtgacaaggtaattctgtggtatcagaataaaaggacttgatataaacaacctaaaaaa

SEQ ID NO: 545 - DNA, 19432 bp, Homo sapiens
atggacagccagaagctggctggtgaggataaagattcagaaccggcagctgatggacctgcagcttctgaggacccaagtgccactgagtcagacctgcccaacccacatgtgggagaggtctctgtccttagttctgggagtcccaggcttcaggagactcctcaggactgcagtgggggtccggtgcggcgttgtgctctctgtaactgcggggagcccagtctacacgggcagcgggagctacggcgctttgagttgccatttgattggccccggtgtccagtggtgtcccctggggggagcccagggcccaatgaggcagtgctgcccagtgaggacctatcacagattggtttccctgagggccttacacctgcccacctaggagaacctggagggtcctgctgggctcaccattggtgtgctgcatggtcggcaggcgtatgggggcaggagggcccagaactatgtggtgtggacaaggccatcttctcagggatctcacagcgctgctcccactgcaccaggctcggtgcctccatcccttgccgctcacctggatgtccacggctttaccacttcccctgcgcgactgccagcggttccttcctatccatgaaaacactgcagctgctatgcccagagcacagtgagggggctgcatatctggaggaggctcgctgtgcagtgtgtgaggggccaggggagttgtgtgacctgttcttctgtaccagctgtgggcatcactatcacggggcctgcctggacactgctctgactgcccgcaaacgtgctggctggcagtgccctgaatgcaaagtgtgccaagcctgcaggaaacctgggaatgactctaagatgttggtttgtgagacgtgtgacaaaggataccatactttctgcctaaaaccacccatggaggaactgcctgctcactcttggaagtgcaaggcgtgccgggtgtgccgggcctgtggggcgggctcagcagaactgaatcccaactcggagtggtttgagaactactctctctgtcaccgctgtcacaaagcccagggaggtcagactatccgctccgttgctgagcagcataccccggtgtgtagcagattttcacccccagagcctggcgatacccccactgacgagcccgatgctctgtacgttgcatgccaagggcagccaaagggtgggcacgtgacctctatgcaacccaaggaaccagggcccctgcaatgtgaagccaaaccactagggaaagcaggggtccaacttgagccccagttggaggcccccctaaacgaggagatgccactgctgcccccacctgaggagtcacccctgtccccaccacctgaggaatcacccacgtccccaccacctgaggcatcacgcctgtcaccaccacctgaggaattgcccgcatccccacttcctgaggcattgcacctgtcccggccgctggaggaatcgcccctctctccgccgcctgaggagtctcctctgtctcccccacctgaatcatcacctttttctccactggaggagtcgcccttgtctccaccggaagagtcacccccatctcctgcacttgagacgcctctatccccaccacctgaagcatcgcccctgtccccaccatttgaagaatctcctttgtccccgccacctgaggaattgcccacttccccgccacctgaagcatctcgcctgtctccaccacctgaggagtcacccatgtcccctccacctgaagagtcacccatgtctccaccaccggaggcatctcgtctgttcccaccatttgaagagtctcctctgtcccctccacctgaggagtctcccctttccccaccacctgaggcatcacgcctgtccccaccacctgaggactcgcctatgtccccaccacctgaagaatcacctatgtcccccccacctgaggtatcgcgcctatcccccctgcctgtggtgtcacgcctgtctccaccgcctgaggaatctcccttgtccccaccgcctgaggagtctcccacgtcccctccacctgaggcttcacgcctctccccaccacctgaggactcccccacatccccaccacctgaggactcacctgcttccccaccaccggaggactcgctcatgtccctgccgctggaggagtcacccctgttgccactacctgaggagccgcaactctgcccccggtccgaggggccgcacctgtcaccccggcctgaggagccgcacctgtccccccggcctgaggagccacacctatctccgcaggctgaggagccacacctgtccccccagcctgaggagccatgcctatgcgctgtgcctgaggagccacacttgtccccccaggctgagggaccacatctgtcccctcagcctgaggaattgcacctgtccccccagactgaggagccgcacctgtctcctgtgcctgaggagccatgcttgtccccccaacctgaggaatcacacctgtccccccagtctgaggagccatgcctgtccccccggcctgaggaatcgcatctgtcccctgagcttgagaagccacccctgtcccctcggcctgaaaagccccctgaggagccaggccaatgccctgcacctgaggagctgcccttgttccctccccctggggaaccatccttatctcccttgcttggagagccagccctgtctgagcctggggaaccacctctgtcccctctgcccgaggagctgccgttgtccccatctggggagccatccttgtcgcctcagctgatgccaccagatccccttcctcctccactctcacccatcatcacagctgcggccccaccggccctgtctcctttgggggagttagagtacccctttggtgccaaaggggacagtgaccctgagtcaccgttggctgcccccatcctggagacacccatcagccctccaccagaagctaactgcactgaccctgagcctgtcccccctatgatccttcccccatctccaggctccccagtggggccggcttctcccatcctgatggagccccttcctcctcagtgttcgccactccttcagcattccctggttccccaaaactcccctccttcccagtgctctcctcctgccctaccactgtccgttccctccccgttgagtcccatagggaaggtagtgggggtctcagatgaggctgagctgcacgagatggagactgagaaagtttcagaacctgaatgcccagccttggaacccagtgccaccagtcctctcccttccccaatgggggacctttcctgccccgcccccagccctgccccagccctggatgacttctctggcctaggggaagacacagcccctctggatgggattgatgctccgggttcacagccagagcctggacagacccctggcagtttggctagtgaacttaaaggctcccctgtgctcctggaccccgaggagctggcccctgtgacccctatggaggtctaccccgaatgcaagcagacagcagggcagggctcaccatgtgaagaacaggaagagccacgtgcaccggtggcccccacaccacccactctcatcaaatccgacatcgttaacgagatctctaatctgagccagggtgatgccagtgccagttttcctggctcagagcccctcctgggctctccagacccggaggggggtggctccctgtccatggagttgggggtctctacggatgttagtccagcccgagatgagggctccctacggctctgtactgactcactgccagagactgatgactcactattgtgcgatgctgggacagctatcagcggaggcaaagctgagggggagaaggggcggcggcgcagctccccagcccgttcccgcatcaaacagggtcgcagcagcagtttcccaggaagacgccggcctcgtggaggagcccatggaggacgtggtagaggacgggcccggctaaagtcaactgcttcttccattgagactctggtagttgctgacattgatagctctcccagtaaggaggaggaggaagaagatgatgacaccatgcagaataccgtggttctcttctccaacacagacaaatttgtcctaatgcaggacatgtgtgtggtatgtggcagctttggccggggggcagagggccacctccttgcctgttcgcagtgctctcagtgctatcacccttactgtgtcaacagcaagatcaccaaggtgatgctgctcaagggctggcgttgtgtggagtgtattgtgtgtgaggtgtgtggccaggcctccgacccctcacgcctgctgctctgtgatgactgtgatattagctaccacacatactgcctggaccccccactgctcaccgtccccaagggcggctggaagtgcaagtggtgtgtgtcctgtatgcagtgtggggctgcttcccctggcttccactgtgaatggcagaatagttacacacactgtgggccctgtgccagcctggtgacctgccctatctgtcatgctccttacgtagaagaggacctactaatccagtgccgccactgtgaacggtggatgcatgcaggctgtgagagcctcttcacagaggacgatgtggagcaggcagccgatgaaggctttgactgtgtctcctgccagccctacgtggtaaagcctgtggcgcctgttgcacctccagagctggtgcccatgaaggtgaaagagccagagccccagtactttcgcttcgaaggtgtgtggctgacagaaactggcatggccttgctgcgtaacctgaccatgtcaccactgcacaagcggcgccaacggcgaggacggcttggcctcccaggcgaggcaggattggagggttctgagccctcagatgcccttggccctgatgacaagaaggatggggacctggacaccgatgagctgctcaagggtgaaggtggtgtggagcacatggagtgcgaaattaaactggagggccccgtcagccctgatgtggagcctggcaaagaggagaccgaggaaagcaaaaaacgcaagcgtaaaccatatcggcctggcattggtggtttcatggtgcgacagcggaaatcccacacacgcacgaaaaaggggcctgctgcacaggcggaggtgttgagtggggatgggcagcccgacgaggtgatacctgctgacctgcctgcagagggcgccgtggagcagagcttagctgaaggggatgagaagaagaagcaacagcggcgagggcgcaagaagagcaaactggaggacatgttccctgcttacttgcaggaagccttctttgggaaggagctgctggacctgagccgtaaggccctttttgcagttggggtgggccggccaagctttggactagggaccccaaaagccaagggagatggaggctcagaaaggaaggaactccccacatcgcagaaaggagatgatggtccagatattgcagatgaagaatcccgtggcctcgagggcaaagccgatacaccaggacctgaggatgggggcgtgaaggcatccccagtgcccagtgaccctgagaagccaggcaccccaggtgaagggatgcttagctctgacttagacaggatttccacagaagaactgcccaagatggaatccaaggacctgcagcagctcttcaaggatgttctgggctctgaacgagaacagcatctgggttgtggaacccctggcctagaaggcagccgtacgccactgcagaggccctttcttcaaggtggactccctttgggcaatctgccctccagcagcccaatggactcctacccaggcctctgccagtccccgttcctggattctagggagcgcgggggcttctttagcccggaacccggtgagcccgacagcccctggacgggctcaggtggcaccacgccctccacccccacaacccccaccacggagggtgagggcgacggactctcctataaccagcggagtcttcagcgctgggagaaggatgaggagttgggccagctgtccaccatctcacctgtgctctatgccaacattaattttcctaatctcaagcaagactacccagactggtcaagccgttgcaaacaaatcatgaagctctggagaaaggttccagcagctgacaaagccccctacctgcaaaaggccaaagataaccgggcagctcaccgcatcaacaaggtgcagaagcaggctgagagccagatcaacaagcagaccaaggtgggcgacatagcccgtaagactgaccgaccggccctacatctccgcattcccccgcagccaggggcactgggcagcccgccccccgctgctgcccccaccattttcattggcagccccactacccccgccggcttgtctacctctgcggacgggttcctgaagccgccggcgggctcggtgcctggccctgactcgcctggtgagctcttcctcaagctcccaccccaggtgcccgcccaagtgccttcgcaggacccctttggactggcccctgcctatcccctggagccccgcttccccacggcaccgcccacctatcccccctatcctagtcctacgggggcccctgcgcagcccccgatgctgggcgcctcatctcgtcctggggctggccagccaggggaattccacactaccccacctggcacccccagacaccagccctccacacctgacccattcctcaaaccccgctgcccctcgctggataacttggctgtgcctgagagccctggggtagggggaggcaaagcttccgagcccctgctctcgcccccaccttttggggagtcccggaaggccctagaggtgaagaaggaagagcttggggcatcctctcctagctatgggcccccaaacctgggctttgttgactcaccctcctcaggcacccacctgggtggcctggagttaaagacacctgatgtcttcaaagcccccctgacccctcgggcatctcaggtagagccccagagcccgggcttgggcctaaggccccaggagccaccccctgcccaggctttggcaccttctcctccaagtcacccagacatctttcgccctggctcctacactgacccatatgctcagcccccattgactcctcggccccaacctccgccccctgagagctgctgtgctctgccccctcgctcactgccctccgaccctttctcccgagtgcctgccagtcctcagtcccagtccagctcccagtctccactgacaccccggcctctgtctgctgaagctttttgcccatcacccgttacccctcgcttccagtcccctgacccttattctcgcccaccctcacgccctcagtcccgtgacccatttgccccattgcataagccaccccgaccccagccccctgaagttgcctttaaggctgggtctctagcccacacttcgctgggggctggggggttcccagcagccctgcccgcggggccagcaggtgagctccatgccaaggtcccaagtgggcagccccccaattttgtccggtcccctgggacgggtgcatttgtgggcaccccctctcccatgcgtttcactttccctcaggcagtaggggagccttccctaaagccccctgtccctcagcctggtctcccgccaccccatgggatcaacagccattttgggcccggccccaccttgggcaagcctcaaagcacaaactacacagtagccacagggaacttccacccatcgggcagccccctggggcccagcagcgggtccacaggggagagctatgggctgtccccactacgccctccgtcggttctgccaccacctgcacccgacggatccctcccctacctgtcccatggagcctcacagcgatcaggcatcacctctcctgtcgaaaagcgagaagacccagggactggaatgggtagctctttggcgacagctgaactcccaggtacccaggacccaggcatgtccggccttagccaaacagagctggagaagcaacggcagcgccagcgactacgagagctgctgattcggcagcagatccagcgcaacaccctgcggcaggagaaggaaacagctgcagcagctgcaggagcagtggggcctccaggcagctggggtgctgagcccagcagccctgcctttgagcagctgagtcgaggccagaccccctttgctgggacacaggacaagagcagccttgtggggttgcccccaagcaagctgagtggccccatcctggggccagggtccttccctagcgatgaccgactctcccggccacctccaccagccacgccttcctctatggatgtgaacagccggcaactggtaggaggctcccaagctttctatcagcgagcaccctatcctgggtccctgcccttacagcagcaacagcaacaactgtggcagcaacaacaggcaacagcagcaacctccatgcgatttgccatgtcagctcgctttccatcaactcctggacctgaacttggccgccaagccctaggttccccgttggcgggaatttccacccgtctgccaggccctggtgagccagtgcctggtccagctggtcctgcccagttcattgagctgcggcacaatgtacagaaaggactgggacctgggggcactccgtttcctggtcagggcccacctcagagaccccgtttttaccctgtaagtgaggacccccaccgactggctcctgaagggcttcggggcctggcggtatcaggtcttcccccacagaaaccctcagccccaccggcccctgaattgaacaacagtcttcatccaacaccccacaccaagggtcctaccctgccaactggtttggagctggtcaaccggcccccgtcgagcactgagcttggccgccccaatcctctggccctggaagctgggaagttgccctgtgaggatcccgagctggatgacgattttgatgcccacaaggccctagaggatgatgaagagcttgctcacctgggtctgggtgtggatgtggccaagggtgatgatgaacttggcaccttagaaaacctggagaccaatgacccccacttggatgacctgctcaatggagacgagtttgacctgctggcatatactgatcctgagctggacactggggacaagaaggatatcttcaatgagcacctgaggctggtagaatcggctaatgagaaggctgaacgggaggccctgctgcggggggtggagccaggacccttgggccctgaggagcgccctccccctgctgctgatgcctctgaaccccgcctggcatctgtgctccctgaggtgaagcccaaggtggaggagggtggacgccacccttctccttgccaattcaccattgctacccccaaggtagagcccgcacctgctgccaattcccttggcctggggctaaagccaggacagagcatgatgggcagccgggatacccggatgggcacagggccattttctagcagtgggcacacagctgagaaggcctcctttggggccacgggaggaccaccagctcacctgctgacccccagcccactgagtggcccaggaggatcctccctgctggaaaagtttgagctcgagagtggggctttgaccttgcctggtggacctgcagcatctggggatgagctagacaagatggagagctcactggtagccagcgagttacccctgctcattgaggacctgttggagcatgagaagaaggagctgcagaagaagcagcagctttcagcacagttgcagcctgcccagcagcagcagcaacagcagcagcagcattccctactgtctgcaccaggccctgcccaggccatgtctttgccacatgagggctcttctcccagtttggctgggtcccaacagcagctttccctgggtcttgcaggtgcccgacagccaggtttgccccagccactgatgcccacccagccaccagctcatgccctccagcaacgcctggctccatccatggctatggtgtccaatcaagggcatatgctaagtgggcagcatggagggcaggcaggcttggtaccccagcagagctcacagccagtgctatcacagaagcccatgggcaccatgccaccttccatgtgcatgaagccgcagcaattggcaatgcagcagcagctggcaaacagcttcttcccagatacagacctggacaaatttgctgcagaagatatcattgatcccattgcaaaggccaagatggtggctttgaaaggcatcaagaaagtgatggctcagggcagcattggggtggcacctggtatgaacagacagcaagtgtctctgctagcccagaggctctcggggggacctagcagtgatctgcagaaccatgtggcagctgggagtggccaggagcggagtgctggtgatccctcccagcctcgtcccaacccgcccacttttgctcagggagtgatcaatgaagctgaccagcggcagtatgaggagtggctgttccatacccagcagctcctacagatgcagctgaaggtgctagaggagcagattggtgtacaccgcaagtcccggaaggctctgtgtgccaagcagcgcactgccaaaaaagctggccgtgagttcccagaagctgatgctgagaagctcaagctggttacagagcagcagagcaagatccagaaacaactggatcaggtccggaaacagcagaaggagcacactaatctcatggcagaatatcggaacaagcagcagcaacaacagcagcagcagcagcaacaacagcaacagcactcagctgtgctggctctcagcccttcccagagtccccggctgctcaccaagctccctggtcagctgctccctggccatgggctgcagccaccacaggggcctccgggtgggcaagccggaggtcttcgcctgacccctgggggtatggcactacctggacagcctggtggccccttccttaatacagctctggcccaacagcagcaacagcaacattctggtggggctggatccctggctggcccttcagggggcttcttccctggcaaccttgctcttcgaagcctcggacctgattcaaggcttttacaggaaaggcagctgcagctgcagcagcaacgtatgcagctggcccagaaactgcagcagcagcagcagcagcaacagcagcagcagcaccttctaggacaggtggcaatccagcagcaacagcagcagggtcctggagtacagacaaaccaagctctgggtcccaagccccagggccttatgcctcccagcagccaccaaggcctcctggtccagcagctgtcccctcaaccaccccaggggccccagggcatgctgggccctgcccaggtggctgtgttgcagcagcagcaccctggagctttgggcccccagggccctcacagacaggtgcttatgacccagtcccgggtgctcagttccccccagctggcacagcagggtcagggccttatgggacacaggctggtcacagcccagcagcagcagcagcaacaacagcaccaacagcaagggtccatggcagggctgtcccatcttcagcagagtctgatgtcacacagtgggcagcccaaactgagcgctcagcccatgggctctttacagcagcttcagcagcagcagcagctgcaacagcaacagcaacttcagcagcagcagcagcagcagctacaacagcaacagcaacttcagcagcaacagcttcaacagcagcaacagcagcagcagcttcaacaacagcagcagcaacagcttcaacagcagcaacagcagctacaacagcaacagcaacaacaacagcagcagtttcaacagcagcagcaacagcagcagatgggccttttaaaccagagtcgaactttactgtctcctcagcaacaacagcagcagcaagtggcacttggccctggcatgccagcaaagcctcttcaacacttttctagccctggagccctgggtccaaccctcctcctgacgggcaaggaacaaaacaccgtagacccagccgtttcttcagaggccactgaggggccctctacacatcagggagggccgttagcaataggaactacccctgagtcaatggccactgaaccaggagaggtaaagccctcactctctggggactcacaactcctgcttgtccaaccccagccccagcctcagcccagctctctgcagctgcagccacctctgaggcttccaggacaacagcagcagcaagttagcctgctccacacagcaggtggaggaagccatgggcagctaggcagtggatcatcttctgaggcctcatctgtgccccacctgctggctcagccctctgtttccttaggggatcagcctgggtccatgacccagaaccttctgggcccccaacagcccatgctagagcggcccatgcaaaataatacagggccacaacctcccaaaccaggacctgtcctccagtctgggcagggtctgcctggggttggaatcatgcctacggtgggtcagcttcgagcacagctccaaggagtcctggccaaaaacccacagctgcggcacttaagtcctcagcagcagcagcagctacaggcactcctcatgcagcggcagctgcagcagagtcaggcagtacgccagaccccaccctaccaggagcctgggacccagacctctcccctccagggcctcctgggctgccaacctcaacttgggggcttccctggaccacagacaggccccctccaggagctaggggcagggcctcgacctcagggcccaccccggctccctgccccaccaggagccttatctacaggaccagtccttggccctgtccatcccacacctccaccatccagccctcaagagccaaagagaccttcacaattaccttcccccagctcccagcttcccactgaggcccagctccctcccacccatccagggacccccaaacctcaggggccaaccttggagccgcctcctgggagggtctcacctgctgctgcccagcttgcagataccttgtttagcaagggtctgggaccttgggatcccccagacaacctagcagaaacccagaagccagagcagagcagcctggtacctgggcatctggaccaggtgaatggacaggtggtgcctgaggcatcccaactcagcatcaagcaggaacctcgggaagagccatgtgccctgggagcccagtcagtgaagagggaggccaatggggagccaataggggcaccaggaaccagcaaccacctcctgctggcaggccctcgctcagaagctgggcatctgctcttgcagaagctactccgggcaaagaatgtgcaactcagcactgggcgggggtccgaggggctgcgagctgagatcaacgggcacattgacagcaagctggctgggctggagcagaaactacagggtacccccagcaacaaggaggatgcagcagcaaggaagcctttgacaccgaagcccaagcgggtacagaaggcaagcgacaggttggtgagctcccgaaagaagctgcggaaggaggacggggtcagggccagcgaggccttgctgaaacagctgaaacaggagctgtccctgctgcccctaacggagcctgctatcaccgccaattttagcctctttgccccctttggcagtggctgcccagtcaatgggcagagccagctgaggggggcctttggaagtggggcgctgcccactggccctgactactattcccagctgcttaccaagaataacctgagtaacccgccgacaccaccctcgtcgctgccccccaccccacccccatcggtgcagcagaagatggtgaatggcgtcaccccatctgaagagctgggggagcaccccaaggatgctgcctctgcccgggatagtgaaagggcactgagggatacttcagaggtgaagagtctagacctgctggctgccttgcctacaccccctcacaatcagactgaggatgtcaggatggagagtgatgaggatagcgattctcctgacagcattgtgccagcttcatcccctgagagcatcttgggggaggaggcccctcgtttccctcatctgggctcaggccggtgggagcaagaggaccgggccctctcccctgtcatccccctcattcctcgggccagcatcccagtcttcccagataccaaaccttatggggcccttggcctggaggtccctggaaagctgcctgtcacaacttgggaaaagggcaaaggaagtgaggtgtcagtcatgctcacagtctctgctgctgcagccaagaacctgaatggcgtgatggtggcagtggcggagctgctgagcatgaagatccccaactcctatgaggtgctgttcccagagagccccgcccgggcaggcactgagccaaagaagggggaagctgagggtcctggtgggaaggaaaagggtctggaaggcaagagcccagacactggccctgattggctgaagcagtttgatgcagtgttgcctggctataccctgaagagccaactagacatcttgagcctcctgaaacaggagagccccgccccagagccacccactcagcacagctatacctacaatgtctccaatctggatgtgcgacagctctcggccccacctcctgaagaaccctccccgcccccttcccccttggcaccttctcctgccagtccccctactgagcccttggttgaacttcccaccgaacccttggctgagccacccgtcccctcacctctgccactggcctcatcccctgaatcagcccgacccaagccccgtgcccggccccctgaagaaggtgaagattcccgtcctcctcgcctcaagaaatggaaaggagtgcgctggaagcggcttcggctgctgctgaccatccagaagggcagtgggcggcaggaggatgagcgggaagtggcagagtttatggagcagcttggcacagccttgcgacctgacaaggtaccgcgagacatgcgtcgctgctgtttctgtcatgaggagggtgacggggccactgatgggcctgcccgtctgctgaacctggacctggacctgtgggtgcacctcaactgtgccctttggtccacggaggtgtatgagacccagggcggggcactgatgaatgtggaggttgccctgcaccgaggactgctaaccaagtgctccctgtgccagcgaactggtgccaccagcagctgcaatcgcatgcgttgccccaatgtctaccattttgcttgtgccatccgtgccaagtgcatgttcttcaaggacaagaccatgctgtgtccaatgcataagatcaaggggccctgtgagcaagagctgagctcttttgctgtcttccggcgggtctacattgagcgggacgaggtgaagcaaatcgctagcatcattcagcggggagaacggctgcacatgttccgtgtggggggccttgtgttccacgccatcggacagctgctgcctcaccagatggctgactttcatagtgccactgccctctatcccgtgggctacgaggccacgcgcatctattggagcctccgcaccaacaatcgtcgctgctgctatcgctgttctattggtgagaacaacgggcggccggagtttgtaatcaaagtcatcgagcagggcctggaggacctggtcttcactgacgcctctccccaggccgtgtggaatcgcatcattgagcctgtggctgccatgagaaaagaggctgacatgctgcgactcttccctgagtatctgaagggcgaggagctctttgggctgacggtgcatgccgtgcttcgcatagctgaatcactgcccggggtggagagctgtcaaaactatttattccgctatgggcgccacccccttatggagctgccactcatgatcaaccccactggctgtgcccgatcagagcctaaaatcctcacacactacaaacggccccataccctgaacagcaccagcatgtctaaggcatatcagagcaccttcacaggcgagaccaacaccccctacagcaagcagtttgtgcactccaagtcatctcagtaccggcggctgcgcaccgaatggaagaacaacgtgtacctggctcgctcccgtatccagggcctggggctctatgcagccaaggacctagaaaagcacacaatggttatcgagtacattggcaccatcattcggaacgaggtggccaaccggcgggagaaaatctacgaagagcagaatcgaggcatctacatgttccgaataaacaatgaacatgtgattgatgctacgttgaccggcggccctgccaggtacattaaccattcctgtgcccctaactgtgtggccgaagtcgtgacatttgacaaagaggacaaaatcatcatcatctccagccggcgaatccccaaaggagaggagctaacctatgactatcagtttgattttgaggacgatcagcacaagatcccctgccactgtggagcctggaattgtcggaaatggatgaactaagaagctttgaggctaccaggcaggggagtccccctacccacaacctcttccctgaaagggatgagggggaagagaggtagcagccagagccaggacccagggttggggctgccggctgacccggagcccctggagcaggaggctggggcagagggccctaggccaagcccaccctgggcaccagggacaatcctcttccccaccaccggccctcaggctggcatctctgcccccagctccaggaggggccagacagaagcagccattgggcatctcaggtttgagggggatatgggccgggaactacccagaagcatctgggaggcagcagggtgggggaagaggatgtgtggccgggcctcacagccctgctgctcccactgacctctccggcccaactcacggctgcaaagagacttgactaagcttgacaatcccaaaggccgggtcccacacctggccctgcctgccgggtcctgcccccaccctcacccccatccccctccctcttgatctgtctctgtttccctcttttcctctgtgtttctgtctctctatgggttgtgtttccttgttttccactctgacaaatgcaacatgaacgggaaagaggcgcccagctgcctaggagggcaagctgggcaagccgggcaaggagaccccgcacccacacctacctcatttaagtgttggattttttgctgttttgaaatgtgagaccctctccaagccccctactgccccaaccctctcccccacctcactgccctcttctgagtgggtggaaggggggtaggaggaggaagaaaaacaacaacaaaaaatccatctttgtttttaattatgggcatgggatggtggttgaggcaaatgatgatgaagattggggatgactggcccctagttgctctaggacttccttctccatctggacatgggggcaggagggagctaaacctaggaccaggatatctccctcctgttttcccaacctcatcatgagcctgtttgccctccagcccctggacgggttgggtggggggtagggtgagggctatccctgagtggcatgcccatacctagtgaggcagggtgtggcccggagctcccactttccctcagtcaccaaactgctgctggtctggtgggaaggggtggtgatgtgggggtgggggagcttagtgtcagcgcggggagggtggggggtatttatctatttatacatgggattgtacatagtcttgtggggcatgggggagccggctggaggtgagaaccctcccctctccccccaccccccggggagagcaaatgtaaaactactaatttttgtgctttatatattctatataaatatatctattttctttttacaaaaccagtttataaatggtaggggggtgtggggcggacacatggagctccccttgtgggggggccccctccattacccgacctaccgcccttttcctcaccccccaccccactccccaccccctggctgtgactgctgtaagatgggggtatagaggctgggcaattcccaccccctgttgtatagttggactatgttataacgcacaaaagagagctgaccccagggggagccagagggtgatgggttccttgcctccctttccttcccctttctgcccaagcttgtgctgcagttgaacctcttcctgggggtgggagtaggtaaggggtgggtgaggccccaaacccctctctggtagggaaccgtggggatgaagatgaagcttatatgcagttctcttctaggggctgtgggcaaagggcattttgtaattaatattttcaagaatcagatgtctggagtgtaggggtgggcttggtggtggtggacgggcgggcctgctggagggggagcttggtcgctgttgtgattttaggtttgtttttgttttgttttgaatttggggggttgtggattgttgggggtagggagattttttttttttaaagctgcttcctcaactgtttcaagctgcaaatgtttaagagaataacagcccccactcccacaggaaccgctgtaattaaatcagacagtaggaagactgggctgctgccctcaaagccacagcccttggatgttccttttccgagagcagaaggtctaggctacagggagggggagattggctcccgtgagtcaggctgtgtttggggcttgggccctgggattgggaaaaggggatggggcagactttgtaagcatatgctaggtatccgatagtcctgtagaatttagtgaagaaaccttatacagtttttaatttttatataaactataactcagacccaagctacaaggttggaattttggttggttttttttttaagtaccctgcctgtataattgcatcagaatcccccaccccaccccccgcccccgtgtttgtattttgggttggtttacactcgcacatactcagttttcagttttcccctttacagtcttctcccctcacctccaggaccctccccctttttaaaaaataaatcgctgacaagtgtgaatcccgtgaagactttattttgtgttgtgtgtatcctgtacagcaaggttggtccttcgtaacaacggatgaaatggttcccttttttaaagcgccctctctccctccaccctcagcgcccctgtccttggcatgttttgtatcagcgatcattctgaactgtacatatttatgttgcgagaggcaaagggcaagttttggattttgcttcttccaagtttgtttttaaacgacaaataaaaaaagaacattttaaatacaaaaaaaaaaaaaaa

SEQ ID NO: 546 - DNA, 4150 bp, Homo sapiens
cttgaatcttggggcaggaactcagaaaacttccagcccgggcagcgcgcgcttggtgcaagactcaggagctagcagcccgtccccctccgactctccggtgccgccgctgcctgctcccgccaccctaggaggcgcggtgccacccactactctgtcctctgcctgtgctccgtgcccgaccctatcccggcggagtctccccatcctcctttgctttccgactgcccaaggcactttcaatctcaatctcttctctctctctctctctctctctctctctctctctctctctctctctctctctctcgcagggtggggggaagaggaggaggaattctttccccgcctaacatttcaagggacacaattcactccaagtctcttccctttccaagccgcttccgaagtgctcccggtgcccgcaactcctgatcccaacccgcgagaggagcctctgcgacctcaaagcctctcttccttctccctcgcttccctcctcctcttgctacctccacctccaccgccacctccacctccggcacccacccaccgccgccgccgccaccggcagcgcctcctcctctcctcctcctcctcccctcttctctttttggcagccgctggacgtccggtgttgatggtggcagcggcggcagcctaagcaacagcagccctcgcagcccgccagctcgcgctcgccccgccggcgtccccagccctatcacctcatctcccgaaaggtgctgggcagctccggggcggtcgaggcgaagcggctgcagcggcggtagcggcggcgggaggcaggatgagcgcacgcggtgagggcgcggggcagccgtccacttcagcccagggacaacctgccgccccagcgcctcagaagagaggacgcggccgccccaggaagcagcagcaagaaccaaccggtgagccctctcctaagagacccaggggaagacccaaaggcagcaaaaacaagagtccctctaaagcagctcaaaagaaagcagaagccactggagaaaaacggccaagaggcagacctaggaaatggccacaacaagttgttcagaagaagcctgctcaggaggaaactgaagagacatcctcacaagagtctgccgaagaggactagggggcgccaacgttcgatttctacctcagcagcagttggatcttttgaagggagaagacactgcagtgaccacttattctgtattgccatggtctttccactttcatctggggtggggtggggtggggtgggggaggggggggtggggtggggagaaatcacataaccttaaaaaggactatattaatcaccttctttgtaatcccttcacagtcccaggtttagtgaaaaactgctgtaaacacaggggacacagcttaacaatgcaacttttaattactgttttcttttttcttaacctactaatagtttgttgatctgataagcaagagtgggcgggtgagaaaaaccgaattgggtttagtcaatcactgcactgcatgcaaacaagaaacgtgtcacacttgtgacgtcgggcattcatataggaagaacgcggtgtgtaacactgtgtacacctcaaataccaccccaacccactccctgtagtgaatcctctgtttagaacaccaaagataaggactagatactactttctctttttcgtataatcttgtagacacttacttgatgatttttaactttttatttctaaatgagacgaaatgctgatgtatcctttcattcagctaacaaactagaaaaggttatgttcatttttcaaaaagggaagtaagcaaacaaatattgccaactcttctatttatggatatcacacatatcagcaggagtaataaatttactcacagcacttgttttcaggacaacacttcattttcaggaaatctacttcctacagagccaaaatgccatttagcaataaataacacttgtcagcctcagagcatttaaggaaactagacaagtaaaattatcctctttgtaatttaatgaaaaggtacaacagaataatgcatgatgaactcacctaattatgaggtgggaggagcgaaatctaaatttcttttgctatagttatacatcaatttaaaaagcaaaaaaaaaaaaggggggggcaatctctctctgtgtctttctctctctctcttcctctccctctctcttttcattgtgtatcagtttccatgaaagacctgaataccacttacctcaaattaagcatatgtgttacttcaagtaatacgttttgacataagatggttgaccaaggtgcttttcttcggcttgagttcaccatctcttcattcaaactgcacttttagccagagatgcaatatatccccactactcaatactacctctgaatgttacaacgaatttacagtctagtacttattacatgctgctatacacaagcaatgcaagaaaaaaacttactgggtaggtgattctaatcatctgcagttctttttgtacacttaattacagttaaagaagcaatctccttactgtgtttcagcatgactatgtatttttctatgtttttttaattaaaaatttttaaaatacttgtttcagcttctctgctagatttctacattaacttgaaaattttttaaccaagtcgctcctaggttcttaaggataattttcctcaatcacactacacatcacacaagatttgactgtaatatttaaatattaccctccaagtctgtacctcaaatgaattctttaaggagatggactaattgacttgcaaagacctacctccagacttcaaaaggaatgaacttgttacttgcagcattcatttgttttttcaatgtttgaaatagttcaaactgcagctaaccctagtcaaaactatttttgtaaaagacatttgatagaaaggaacacgtttttacatacttttgcaaaataagtaaataataaataaaataaaagccaaccttcaaagaaacttgaagctttgtaggtgagatgcaacaagccctgcttttgcataatgcaatcaaaaatatgtgtttttaagattagttgaatataagaaaatgcttgacaaatattttcatgtattttacacaaatgtgatttttgtaatatgtctcaaccagatttattttaaacgcttcttatgtagagtttttatgcctttctctcctagtgagtgtgctgactttttaacatggtattatcaactgggccaggaggtagtttctcatgacggcttttgtcagtatggcttttagtactgaagccaaatgaaactcaaaaccatctctcttccagctgcttcagggaggtagtttcaaaggccacatacctctctgagactggcagatcgctcactgttgtgaatcaccaaaggagctatggagagaattaaaactcaacattactgttaactgtgcgttaaataagcaaataaacagtggctcataaaaataaaagtcgcattccatatctttggatgggccttttagaaacctcattggccagctcataaaatggaagcaattgctcatgttggccaaacatggtgcaccgagtgatttccatctctggtaaagttacacttttatttcctgtatgttgtacaatcaaaacacactactacctcttaagtcccagtatacctcatttttcatactgaaaaaaaaagcttgtggccaatggaacagtaagaacatcataaaatttttatatatatagtttatttttgtgggagataaattttataggactgttctttgctgttgttggtcgcagctacataagactggacatttaacttttctaccatttctgcaagttaggtatgtttgcaggagaaaagtatcaagacgtttaactgcagttgactttctccctgttcctttgagtgtcttctaactttattctttgttctttatgtagaattgctgtctatgattgtactttgaatcgcttgcttgttgaaaatatttctctagtgtattatcactgtctgttctgcacaataaacataacagcctctgtgatccccatgtgttttgattcctgctctttgttacagttccattaaatgagtaataaagtttggtcaaaacagaaaaaaaaaaa

SEQ ID NO: 547 - DNA, 3307 bp, Homo sapiens
cagcgcggggctcctgcgtcccgagtgcgcggcggccggaccgggcgggcggagccgggcccgcggggctgctgcggggcgatcgggccgggccgctgccgcgccatggactcccgtgtccagcctgagttccagcctcactgagtggccacccccaaagtgctgccagccgaggaagcccccagcactgaccatgtctattatggaccacagccccaccacgggcgtggtcacagtcatcgtcatcctcattgccatcgcggccctgggggccttgatcctgggctgctggtgctacctgcggctgcagcgcatcagccagtcagaggacgaggagagcatcgtgggggatggggagaccaaggaacccttcctgctggtgcagtattcggccaagggaccgtgcgtggagagaaaggccaagctgatgactcccaacggcccggaagtccacggctgagccaggatgcaaggctcctggtcctgtttgcagccggccaagaggcgctgggaggggcaaaaccatacggatgcgctgctgtctgagaggaagggctgacacttgctggcatggcctctgcgggcttcgtcatcgcatgcactgatgcccggggacctggctgtcctgggcttcccctcggcctccaggtgaggctgcccattgcaggcactgggcaggcctgaccttgctggggctcatggccctgtagcgcttttgttacttgaatgtctagctgagcctgtttttgatggagctactactgtaatgcgtgaactaacaaacctgtgaactgtaaataggcccctggaagcacgtgcttaagcccttttgctgatttttaaaaatatcatctagcgcacacgggactggtattctggctgtactaatgacaagctgagtcaagaccctggagggtcataggcttgtaaaggcccacgccacactcggcaggggtctctcatgtgtgtccatctgcgtgtatgtcaaggaagtgagatgccaatttggggtcttgaggctgaccagttggggtgcttgggtgatctctgcttcattagtcatgggtggaagaaaaaccacaccccccgcacccctccgttctttctgcatagactcacttgttaaatagcagttctgttgagagtggagttactgcagggaagctaccggacctgcctgggagccagtgaagggcgagtcagggcacgcgtcctggaggctgccagcgtccttgtagcagagcagtttcttgccgcttgggtcttcagcacgccaagccccccaccaaccctccaccccgagtgaaggcttcgctgaaattgctttggtcctcatagagcctgtggtggctacttttggtctgaaacccacttggcccaggaaagagaaaaggttgtatgttttgtgttggtgtttcctattttctgcactggaggggaggggactgttgaggttctgtcttttttcttcttttcctcttccctcttcacatcacttggcttcctttcctctctgatgaccgtccgcctatggggttctgacttcactttcctcagcgggtctccagtcccctgacccagctctaaaggcacttaggacccagggaacatttctcacgtgcacattcccctaagagccaccagactgcttcctgccagcctgtgcttgcggcagggagccggggcagggcagaggtgaacttgaagttcaggacttgactctcccacaggtggtgagctggtggctctctggtgagctagtgtctccacagcctgtctccaaggcctcccctatgtacatttcagtgagctcactttgatttttaatcccaccacaagcacatactaattttatttatgattcaaatgtgactcgtgcctgcccatccctgtaatagatggaaggtcagccccggcttaaccacagagcactggcccttcatggctgagctcagagctctggcctcctgctcagactaaaggcacctcctctggcctcacccaagcctcttctaaaaaccatgttgaatgaatccacgttctggaaccccgaggcgggagaagtagggagctgttcgtttaagcagcatacacctaaattgggggtttaaacattaagtaggagcttggggtggaagagggacagccggctgggccacctgagcagaaggtggtaatgaaacacctcagctgggctcttgggagaccttaggaagcaggagaggcaacacctctggctactgatggtgtggcaagttcagaagaggtggtggtggggtaggcgtgatgtcagcagaagccctgcaggctgggtgggcaggacacgtggtgggggccactgaaaccaggcctaggagggagaacaagttccaaaggtgccgactggaagaagggggtaaaagtttgctttggtgagtgagaaaaggctggggcgtgtgatccatcccctcacgtttcagaacttccaggctttctacctcgactctcaccacagccagcacatacacctaggctgtttttccttcctccacacctgagggacgcagcaacagctaggatctgcattttcaggttccgagcctgacccctggaactgaccagcgctcgattgtcagccttggcctggggttttgaccttgccagtgaagtttcggttttgaagtgattaaatgtcacttcctcatcagtttcacttctggaggttttcttatcctactccctggtgccagggacgtacctgggagtttgaatcaggcccatttgagcgtggcagccgtgttgggtgaaggtccggggctcggtgaggcactgggggggttttcgggaggaaaatgaaaatgcttctagaatgagtgaaccacatcatagctctcactgttttttcaatagctactttttttagcagacaccagagccacactcaaatggctaagtaggttatgacctctctggattatttttgaatgcccaactgttgcattcaagttttctgactaataagaaattaagcattcatccttcgtatcactgcagaagcaacagtgggggcacagggagggaactcttgacactgagccactaaaatatggactaattttttggacaaatcttcaaacggactgtgctactgtatttgtctcaaagctaccaagtttgtgcaataagtggaagggatgtcatccttcttcaataaatgctgaatgacattcaagctgattttctagaccactgagaaaatctttatttacaataaatttcaataaaatttgcataaatatattcccaatgtacaaaaaaaaaaaaaaaa

SEQ ID NO: 548 - DNA, 8019 bp, Homo sapiens
atctgtcagttacgggggctgcccggcgggcgggctggaggcgctcgcaggctgcctagtcgttcgctcgctctctctcgcgtgctccctctcgccgcctgtggggaagtcggggccgcccgagcggccgtcgccaccgcctcgccccgacctccttcccggtcccctcccggcccagtccctcccgcccgcgcaccccgagtagtgagtggccccgcgcagggtctggagagtcaccgcggcggcgccgggtggtggttaaaccatgttaaggaggattttacagaggactcctgggagagttggctctcaaggttctgatttagattcatcagcaactcctataaacacagtggacgtcaataatgaaagctcttcagagggtttcatatgtccccagtgtatgaaatctcttggatctgctgatgaacttttcaaacattatgaagctgttcatgatgctggtaatgactcaggtcatggaggagagtctaatcttgctttgaagcgagatgatgtaacactgctcagacaagaggtccaagacctacaggcttcacttaaggaagaaaaatggtactcggaagaattaaagaaggaattagaaaaatatcaagggctgcagcagcaagaggccaaacctgatgggttggtgactgattcatcagcagaactacagtctttggaacagcaattagaagaagcccaaacagaaaattttaatattaagcaaatgaaagacttatttgaacagaaagcagcccaacttgctactgaaattgcagatataaagtcaaagtatgatgaagaaaggagtcttcgagaagctgctgaacaaaaagtgacacgtctgacagaagaattaaacaaagaggcaactgtaattcaagatctgaagacggaactgcttcagagacctggtatagaagatgttgccgtgctaaagaaagaactggtccaagttcaaacactaatggataacatgaccttggaacgtgagcgagaatctgaaaaactcaaagatgaatgcaaaaaattgcagtcacaatatgctagctcagaggccacaataagccagctaaggagtgaacttgccaaaggcccccaggaagttgctgtatatgtacaggaactacaaaaactgaaaagttcagttaatgaattaacacaaaaaaatcagaccttgacagaaaacttgctgaaaaaagaacaagactatactaagttagaggagaaacataatgaagaatctgtgagtaaaaagaatattcaggcaacccttcatcaaaaagacctagattgtcaacagcttcagtcaagattgtctgcatctgaaacctcactgcatagaatacatgtagaactaagtgaaaaaggagaagctactcaaaagctcaaagaagaattatctgaggtagagaccaagtaccagcatctaaaggcggagtttaagcagctacaacaacagagagaagaaaaggagcagcatgggttacaactccaaagtgaaattaatcaattacatagcaaacttctggagacagagcgccaactaggggaagctcatggtaggctgaaggaacagagacagctttcaagtgaaaagttgatggataaagaacaacaagtggctgatttacaactcaaactttctcggttagaagagcagttgaaggaaaaagttacaaattctacagaattgcagcatcaattagataaaacaaagcaacagcatcaagaacaacaggctcttcagcaaagcaccacggcaaaacttcgagaagctcagaatgatttggaacaagttctacgtcaaattggcgataaggaccaaaagatccagaaccttgaagctttattacagaagagtaaagaaaatatttcattactagaaaaagaaagagaagatctttatgcaaaaattcaggctggtgaaggagagactgctgttcttaaccagttacaagaaaaaaaccatacactacaggagcaagtaactcaactaacagagaagctgaagaatcagtcagaaagtcataaacaagcccaggagaatttgcatgaccaggtacaagagcagaaggcacatcttagagctgcacaagaccgtgtcctttccctagaaactagtgtcaatgaattaaatagtcaattaaatgaaagcaaggagaaggtctcccagcttgacatacagattaaagccaaaaccgaactattactatcagcagaagcagcaaaaactgctcaaagagctgatcttcagaatcatttggacacagctcaaaatgcattacaagataaacagcaggagttaaataagattactactcagttggatcaggtcactgcaaagttacaagacaagcaagaacattgcagtcagctggaaagtcatcttaaagaatataaagagaaatacctctctttagaacagaaaaccgaagagctagaaggtcaaattaagaaactagaagctgatagtcttgaagttaaagcaagcaaggagcaggctttgcaagatctacaacagcaaagacagctgaacacagatttagagctcagagccacagaattgagtaaacaacttgaaatggagaaggaaatagtatccagtacaagattggatctacagaaaaaatctgaagcccttgaaagtatcaagcaaaagcttaccaagcaagaggaagaaaaacaaatcctgaaacaagattttgaaactttaagtcaagaaacaaagattcagcatgaggaattgaataacagaattcaaacaacagtaacagaactacaaaaagtgaaaatggagaaagaagctttaatgacagagctttctacagtaaaggacaaactatcaaaagtttctgattctttgaaaaactctaaaagtgaatttgaaaaggagaatcagaaaggaaaagccgctatattagacttggaaaaaacttgcaaagaattaaagcatcaacttcaagtgcagatggaaaacacacttaaggaacagaaggaactgaaaaagtcacttgaaaaagagaaggaggcttctcatcagttgaaattggaactcaattcaatgcaggaacaacttatacaggcccagaatactttaaaacaaaatgaaaaagaagagcaacaacttcaggggaacataaatgagctaaagcaatcaagtgaacagaagaaaaaacaaattgaagcactccaaggagagcttaaaattgctgttttacagaagacagagcttgagaataaactacagcagcagttaacacaggcagcccaggaacttgcagcagagaaagagaaaatatcagtattacaaaacaactatgaaaaaagtcaggaaactttcaaacagcttcaatctgatttctatgggagggaatctgaacttctagccaccaggcaagatcttaagtctgtagaagagaagctttctctagcacaggaggacttgatttcaaacagaaatcaaattggaaatcaaaataaattgattcaagaactgaagactgccaaggctacattggagcaggattcagcaaagaaagaacagcaattgcaggagcgatgtaaagcactacaagacattcagaaagaaaagtcactgaaagaaaaagaactggtaaatgagaagtctaaattggcagagatagaagaaattaaatgtagacaagaaaaagaaatcactaaactaaacgaagaactcaagtcccacaaactagaaagcataaaggagataacaaatcttaaagatgctaaacagcttctaattcagcagaaattagaacttcaaggaaaagcggactccctgaaggcagctgttgaacaggagaagagaaatcagcagatactaaaagaccaggtgaaaaaggaagaagaggagctgaagaaagaatttattgagaaagaagctaagttgcattccgaaataaaagaaaaggaagtaggaatgaagaagcatgaagaaaatgaggctaaacttaccatgcagattacagcattaaatgaaaacttaggcactgtgaagaaggagtggcaatctagtcaacggagagttagtgagcttgagaaacaaacggatgacttacggggtgaaattgcagtattagaagcaacggttcagaataatcaagatgaaaggagagcactactggaaagatgtcttaaaggagaaggtgaaatagaaaagcttcaaaccaaagtattagaattgcaaagaaagctggataatacaactgcagcagtgcaggagctgggcagagaaaaccaatcacttcagatcaaacatacacaagcgttgaatagaaagtgggccgaagacaatgaagtacaaaactgtatggcctgtgggaaaggcttttcagtaacagtgagacggcatcactgccgacagtgtggaaatatcttctgtgctgaatgttcagccaaaaatgccttaactccttcctccaagaagcctgttcgtgtctgtgatgcatgtttcaatgacttgcaaggataatgggttatcacaacttcagagtaatattacactaacattagatttttaataaatgtacttaatagaggtcttggactactatttggtttggacactggttgcaatactagaccaaataggaattagtatattttggaatgttatggatatcaagtaaaactcttctatttttgtgagacttgggcttatcatctttcattacttttttcccatttagcccctggaatagctttcatgccaagtttagaattagccaatgaaatgtaaataaactttggacagaaaatagcaatgtatttttttaatataatttcattattcacaaatgaagaatgcaattccatagcttacttctttctcctaaatttaatgtacaaaaatgtacatggatgatattatcacttgttgctgtttttgttgcacaatagcacattaattatattaaatattctctttgtgaagttatgcacagaactgtaacactttcctctgcctttttctcttatatgtgggttcatggttcagttgcattgttatgttatgaatttactacttgggtgttctaaatacagtttatcttaaaatatgtagtaatatgaattcaaaaatggtttttgttttaacaatattaattaaattttcttgggtggattttataaaaacctctgtaaaatcaatttgtttacttatagttatctggggttgtattgcaaagaatagggttaatttttctttttgtctttttctgtctctttcttaaactcccacgcattgtccatttagaatcttagaaagcttcttaccctcgctgtcagttggaggatgaataataaacattgtataatgttcttattctcggtttcttgtaagtgggaagtcttttgagatcagccttcatatcatacccttattttgtctctctagcatcttcaggaacctgagtttgctttttacatagatctgattttttcctttatttggtttaacattttcaagcatagatcagcttcatgtatttgttttataattttgcatcttaaagctagtaactaatattgctgtggtcttattggtgaaaacaaaatataaaatgataagaagacattaaatattttactttctatttcttaccctattgggaagaatttttaaaagttgtaaaattgacttaaagttaaaatggttctgaatttggtgttccatgtcaactgttcccagttttaattttaactttgcaaaaataatgttgtgaaattccctttaagtaactaacacctagaaatagagtatcaccaaaaacaaatgtatttaggaatcccagttacaataaaaactgaaacagcatggctaagcatcttaaggataattaagaaattagcttatttgtatgctgaacaatggaatcgaactttaatttagcatagtcttattaatttggaaaattgtaaaacatctcaagagagaagttattaatattggtttattaatctttctagagaagaagtgtagttatacattcattcagtgcaatcattttataacagtagttaatatttcatttataatagttcttaatatacatttgctttcaaatattctgaaatgaaattatattcatgctatacctacagtgtatgtaaactaaagagatcactacatatttgtttaattatttaaaaaaaaatttaagtaaaccctgttgtcattagctattaagaacattgattaagtccctggacttggataaacatatatccttgaacatatataatgaagaaatacagtggctctttattaaaaataatagttggataatataaactgaactatttatgcatttttatatacttataaatccttccaaatagttttaattctatccttttacatataaataacttaataagtgtgctggaaaaacacagatattcacagcaccactgttttttttttttttttgagataataaattccatgagaaatctgggtttgaatatttgtttactttgtctcctaattgaacaccactccaggccttctgtctgtctcccctttacccccaaaatactcacaaaaaaattttaagacaacaagtaaccatatataggtgtttgaatgattttctcatttttatctaatttcatttcataagtcccgagtaatttacctaccataggctactatactgataatataaatgaaaccgaacattttttgctactaactctccccaatttaatgtgttttcgaaataaaaatttaaatttttttccttttaattaaaaagtcatctttgaagtccttattggctgtacattttacatgtttgctggtactattattttgtcagtcagttaaagctggcatgtacagctcttggctttaatgaaaagcacattgacataatgttagtaaattccaaaccccggcacagaatgtgagttaaaattaagtcttgctgggttagtgtacaataaactatacctacagacttttttttaatagaaagaagacaaagctgctggtataggatttgttcctttgaagaaaaaatgagggaaacaaacacaaaaacctcaatgcagtgtataaataacattttgttcaactacctcttaatgtggaattatctactttaatagtttcctgacagtaatgttaaatagtaactgccaaatttgttattttcccatctctcttaaaaaagtctttatgattattttatatagttttgagaactttaaagccacttttttttaaccttacatttgcataaaaatgtttagcttttaagtagagagcaaattatgatcatatattttgatattcatgacctgtttgactataggagtttttttaaaaaaatgcactttggctataaaaccatggatgatttgatccataagatttaaatgtgccaccattatagtattcctagacatgagcttgatgaatggtattctgtaattataacgtgccacacattattgtgtcttaattgcccttagcctgaattttaatgatcaatttgttattgttgcagatgtgaatattgtgcataaacttactaaatttatgtaaaattgtataaaatagaattagaagtcactaagttctttctgtgtagaagtaataaatttattgtaacacaatgcagttgtgtatatgacattctgtaattccttgaactggatcatatattcataagttctgtagatacttatgcatgaacattttctcatttagtttttgggttcattatttgtattgtgtttactacttgtgatcatgtagttgtgccttactttgtgagaaaggttagctcagtaaatactgcaatttctaaactcagtgattggaaggttattaattataaatgtaactgataaagtacgtgacagcatttaaatctgtataaagaacaatggaaggatccttattgaattgttgcttttttttaatatgtttaaatattatattaaaaacatttctttctaaactaaaaaaaaaaaaaaaaa

SEQ ID NO: 549 - DNA, 3736 bp, Homo sapiens
cctacgggctgtagatggagctgtccggccccggagagggggaaggcgcctggaaaacgttcttcttctccctggccgacccgagcggggaacagcactcccaggatgcagtttgtgtcaacacggccgcagcctcagcagctgggcatccagggcctggggctggacagcgggagctggagctgggcccaggctctgcccccggaggaggtctgccaccaggagccggcgctgcgcggggaaatggccgagggaatgccgcccatgcaggctcaagaatgggacatggacgcccggcggccaatgccttttcagttcccaccctttccagatagggcacctgtcttccccgaccgcatgatgcgagagccccagttgcccacagcagagatctcactctggactgtggtggctgccattcaggctgtggagaggaaggtggatgcccaggccagccagctgctgaacctggaggggcgcacggggacagccgagaagaagctggccgactgtgaaaagacggccgtggaatttgggaaccacatggagagcaagtgggccgtgctggggaccctgctgcaggagtacgggctgctgcagaggcggctggagaacttggagaacttgctgcgcaacaggaacttctgggtcctgcggctgcccccgggcagcaagggggaggcccccaaggttccagtgacttttgtcgacattgctgtgtacttctccgaagacgagtggaagaacttggacgaatggcagaaggagctttataacaaccttgttaaggagaactacaaaaccctcatgtccctggacgcggagggctcagtccccaagccagatgctccagtccaggctgagcccagggaagaaccttgtgtgtgggagcagcgccaccccgaagagagagaaatcccaatggatcccgaagcaggagcagagcccctggtgcctgcgcaggatgcgtcctcccaggtgaagcgtgaggacaccctgtgtgtccggggtcagcggggcctggaggaaagagccatccctacggaatccattaccgactccccaatttctgcccaggacctcttgtcccggattaaacaggaggagcatcagtgcgtgtgggatcagcaggatttggcagacagagatattcccacggatcccaattcagagtctctcatctcagcacatgacattttgtcatggatcaagcaggaggagcagccatacccatggggaccacgcgactcaatggacggagagcttggattagactctggccctagtgacagcctgctgatggtgaagaacccacccccggccccgccacagccccagccccagccccagccaccgcagccgcagctgcagtcgcagccccagccccagagcctgccccccatcgcggtggccgagaacccgggcggccccccgagccgagggctgctggacgacggtttccaggtgctgcccggggagcgtggctccggcgaggcgccgccgggtggggaccgcagcaccgggggcggcgggggcgatgggggcggtgggggcggcggcgcggaggcggggacgggggcaggcggcggctgtggcagctgctgccctggcgggctgcggcggagcctcctcctgcacggcgcccgcagcaagccctactcgtgccccgagtgcggcaagagcttcggcgtgcgcaagagcctcatcatccaccaccgcagccacaccaaggagcggccctacgagtgcgctgagtgcgagaagagcttcaactgccactcgggcctcatccgccaccagatgacgcaccgcggcgagcggccctacaagtgctcggagtgcgagaagacctacagccgtaaggagcacctgcagaaccaccagcggctgcacacgggcgagcggcctttccaatgtgcactgtgcggcaagagcttcatccgcaagcagaacctgctcaagcaccagcgcatccacacgggcgagcgcccctacacgtgcggcgagtgcggcaagagcttccgctacaaggagtcgctcaaggaccacctgcgcgtgcacagcggcggcccgggccccggcgccccacggcagctcccgccgcctcctgagcgagactagggctgggctgggggagggcagggccggacggagtggatcgggggcggcctgagcaccaaccaccttgccgggtgtcctcagccaccgtctggaaatcggcaacaggcattgcactccggttgggggtccccagggtggggcagggatcccccagatctgtctggtctgaatggacgcccagctcatctagggtggacccagctgctggggaagagccagggggaccgcgaggagccgagcgtcctcgggcaccgccctcacacctcctcgagtgccctgggaccactgggccacagatggtcatcaggggaagccaccagggagtcccgaagcccttctgagatcaggaaatcaggtcccaaggttaggagacgccctgaaaaaaagcgaaggccgagggatgtgctaagggtaacaccttcatgatgacaacactgcctcgcgtttcaatagcgctttatacttttttaagtgttttctatccgttatccatttcacccttggcctatccctctcagataggtggggtaggattttcctggtgaccgagtaaagtgagaggcaggtgagacggttcacccaatcacacgggaaggggcgcgcgctgcccaaccgcgctctccgcctacctccgctgctcgggaagctgctggcctggccctcctggtctctcttcctttcctggtctctcttcctttccttgctctcacccacggataaaaccagaagcgacaggaggccagctcctggggttcctgggagccgggaacagattggctacggaacgccccaggttgtacattcagagggctctttctccatgggagctcctggtgccgcctcggccccagcctgtccccagcccctcaatctggtgcagcagcatcttgtcactgcacaacagtggcctggtcccccacaggcagttagggccccaggtcagacctcaccatgatgatttgttccagttctcccagggcagaggggcgagggagaggcttttgctgtgagagtagccgtcacgtgtctcttcccagcagcgccgggcaagtgggtgctagagtctgagcctcaggctctcctgccctgggcctcccaattggtgctatctgttactgcccgtgctcacggacatggatacagaccctgctgtgctccacaccctgcaggcgcctcgggaagcgcccaaaggattccccttcacgttggtgcacctgctccatagctccgggcgctgcgtcccgaggggccacagtctccatttcagcgtcttgcatggcctggcaccgggtggggtggtatgccccaggacccttgtttgtgtcaaaaatgactttccctgcccttgccgtgggtccggcgttcctcccagccgggatcacagtgggcagccggcacccggcaccactttggcgagcgtcctgcttccgccctcgccctcatctacgctgctccgctttcctcagacccctttttgccgtgcaaagggaattcttgacattaaataaaaggtatccagattgcagactgcatgttcacagagctgggggttctccagcttgcctacagtaaagcctcaatgaactggaatccaattcaaaaaaaaaaaaaaaaa

SEQ ID NO: 550 - DNA, 6010 bp, Homo sapiens
cgcgggggcgcgcgcgcgcgggcccgggagaggctcccgagccaggcggtcttcggtcctcgcagcgcttccagctccccgcgcccctatgtgagggagacggggaggcccgcggcgcgcaggggagggcgaggcatgtgcacgggccggagggtgctgcagccgcccgaggaagaggaggacggcggcgaggaggagagcggggggctcgcggcggcgggccccggccgaggggatgcagtggactgtgtgtgtctggctgtagcagacgcgaggcggcgacgaggcgccggggacccgcgcgaggggcggccgggaggcggcggcggcggccgccagaagtagcagcaggaccggcggcggcgacggcagccctgaaatgcattttcctctccagcggccatgttaaccaggaaaccttcggccgccgctcccgccgcctacccgaccgattggcggcagtaagcacacaatgaatgatcacctgcatgtcggcagccacgctcacggacagatccaggttcaacagttgtttgaggataacagtaacaagcggacagtgctcacgacacaaccaaatgggcttacaacagtgggcaaaacgggcttgccagtggtgccagagcggcagctggacagcattcatagacggcaggggagctccacctctctaaagtccatggaaggcatggggaaggtgaaagccacccccatgacacctgaacaagcaatgaagcaatacatgcaaaaactcacagccttcgaacaccatgagattttcagctaccctgaaatatatttcttgggtctaaatgctaagaagcgccagggcatgacaggtgggcccaacaatggtggctatgatgatgaccagggatcatatgtgcaggtgccccacgatcacgtggcttacaggtatgaggtcctcaaggtcattgggaaggggagctttgggcaggtggtcaaggcctacgatcacaaagtccaccagcacgtggccctaaagatggtgcggaatgagaagcgcttccaccggcaagcagcggaggagatccgaatcctggaacacctgcggaagcaggacaaggataacacaatgaatgtcatccatatgctggagaatttcaccttccgcaaccacatctgcatgacgtttgagctgctgagcatgaacctctatgagctcatcaagaagaataaattccagggcttcagtctgcctttggttcgcaagtttgcccactcgattctgcagtgcttggatgctttgcacaaaaacagaataattcactgtgaccttaagcccgagaacattttgttaaagcagcagggtagaagcggtattaaagtaattgattttggctccagttgttacgagcatcagcgtgtctacacgtacatccagtcgcgtttttaccgggctccagaagtgatccttggggccaggtatggcatgcccattgatatgtggagcctgggctgcattttagcagagctcctgacgggttaccccctcttgcctggggaagatgaaggggaccagctggcctgtatgattgaactgttgggcatgccctcacagaaactgctggatgcatccaaacgagccaaaaattttgtgagctccaagggttatccccgttactgcactgtcacgactctctcagatggctctgtggtcctaaacggaggccgttcccggagggggaaactgaggggcccaccggagagcagagagtgggggaacgcgctgaaggggtgtgatgatccccttttccttgacttcttaaaacagtgtttagagtgggatcctgcagtgcgcatgaccccaggccaggctttgcggcacccctggctgaggaggcggttgccaaagcctcccaccggggagaaaacgtcagtgaaaaggataactgagagcaccggtgctatcacatctatatccaagttacctccaccttctagctcagcttccaaactgaggactaatttggcgcagatgacagatgccaatgggaatattcagcagaggacagtgttgccaaaacttgttagctgagctcacgtcccctgatgctggtaacctgaaagatacgacattgctgagccttactgggttgaaaaggagtagctcagacctgtttttatttgctcaataactctactcatttgtatcttttcagcacttaattttaatgtaagaaagttgttcattttgtttttataaaatacatgaggacaatgctttaagtttttatactttcagaaactttttgtgttctaaaagtacaatgagccttactgtatttagtgtggcagaataataacatcagtggcaggccactgattacttcatgactgccacgcatttacagattggtgtcaaagacattcactatgtttttatggttcatgttatatcctccccagggtgacagccccttaaggccctccttttccctccatgctccaggtccatgcacaggtgtagcatgtcctgcttccgtttttcataaattaatctgggtgttgggggtagtgggaggagaacggtcagaatcaaagtgacattctaagaaaaactgtaccttagagattttcctctagtgctcaaacaaatacaaaataagatccccaaggtttaaactgcccagttagcattctgacattctaaaagccggcaaagcagcttttagtggataaatgggaatggaaacgtgtgtgttcctccaaattttctagtatgatcggtgagctgttttgtaaagaagcctcatattacagagttgcttttgcacctaaatttagaattgtattccatgaactgttcctcccttttctctgcttttctcctctctgttcctcttttaataccacacgtctgttgcttgcatttagtttgtcttcttccttcagctgtgtatcccagactgttaatacagaaaagagacatttcagctgtgattatgaccattgtttcatattccaattaaaaaaagaacagcagcctagctacttaaggtggggatttccatagttccaaagaagatttagcagattagagtgagttcacacttttcaggtgccactgtaaggttctctcagcctgggaaactatcaactctttctttaaaaagaaagagggttgaaaatcctctggacgaacagaagtcactttggctgttcagtaaggccaatgttaacaacacgtttagaggaggaaaagttcaacctcaagttaaatggtttgacttattcttcgtatcattagaagaaccccagagatagcattcctctattttattttactttcttttggattgcactgattgtttttgtgggaatgacactttatctggcaaagtaactgagagtttggtaaaagaatattttcttctctgaataataattattttcacagtgaaaatttcagtattttatcactaatgtatgagcaatgatctatatcaatttcaaggcacgtgaaaaaaattttttagtatgtgcaatttaatatagaaagatttctgcctgtttggacaataggttttgggtagtacagattaggataagtaagcttatatatgcacagagattattgtattacctgtaaattgatttacaagtacttaaaagcgtggtccccagtgaggccaagaaagtttccggttaagttctttaataataatcctacagtttatcttaagaaaaaaaaaaaggtttgaaaaaaacactttaatttaggcttcgttggttgatggtggaaaaaaatgctcaggaaatatttcagatatttgccaaaaaaccagtaataaggttaccttattaaaatagtgatatttgctttactatttaaggtgtcactgataaattaatttgtacttctgtgtttagaaattatagcttcttttcccttagtcaaattttttagcatattatacacatttctgtgtaatctgtggaagtgcaataatatgttagtaagttacattttaaataatgctcatgtgacaatactcccaatcaatggcttatagaatttaaagatctgtatattagattttggcttaaaggcatgagaagtataagacttggtttggtggctttgtaagaccaccagcctcttaatgatggttagcttctttaggtcattaaatcaataaaaacatataatgctgttttgctcttctaatgctcctcttccatttccagttatcttcacatttacatttaaatatacaaacctgagcctgccattattaatttccctataaaatgacgatacatgtgaacatttataaatggactaatactgcttgtctttcccccaccgcacaaaactggttcttaagatgccagcaatgaatttgagactatctttatttataaatggaaaccggaaacttttataccaaactataataatgtgcagcactgtagggcttttttttttttccctccaaatacagtgaaatttttttattcacaagagctgccacatctcagcatttagtaatagagctgctttaataaaattctagtttgattgtcatgtcaaaaaaagaaaaatgttgcatctttgtgattttaaaacataaattaatgaaggctctgataggctattaggagttggcttggaaacagtttttggtctcacaggttaccattgtttggggatgtctgagctgttttcagatctaggaatagcacagtgttgtcttgtctttggcagtctcatttggctctgtttcttgcaccaccagcgtgttcattaccacttaaatatattgctacagcagtggaacaacagagtggtgcaagacactgtagattaacggtagaggagaaattgtgcccttagtgttaacaatgtgccttttgttctgaatgccatgttgtagggcatgcattttttggcctctttaactcttcgaattctagtcagtaagaatggaacccatctctgcaaagatacatctgtcttaaatatctagttacaggccttaatagaaaccataaggcatgactcatcttcaggcactgaaaaaagataaccatcaggtagtgttacacaaggacttcctatatttaaggggttaaagatggtctttgttgtatcttaacatcagactgatttttacattttttttttgttatgctaacactagacaaaaatcaactgtatttgtaaaaatttacctcaaaccatttaattttatagtgtgattaatcccagggcatttggtatgaaccaaagtgcattccttttatatgtgcctggctctagtaaggatggccagggatttttacaatttgggtgcaaggcacttaagccacttttaaacttaatgggtggtttggggtcgtgttaaatgactccatcagaatgttagaaaacactttaggcatcagtagcattgggccatattggaatcctaaagtgtgaattattttaaggagagcattcatttttgtaatttttttcatcaaaaatatttctggtaagcagaagactttttaaaaaaactgatctggtctcggtaaaggttttaatattgcccaacataatgctgtaatagcattaaaaaaagtatttgtgaactctgtttcttaggggcttgtacatctctctgctatggacatacataaaattaattgtaattatactcagctcaactgctacagttctgtctaggcagtggcttgggtttttatcgagcaacaacttagacacgtgactgtaatatgctgcaactgtgtgtactgaaaatatgtgaaaatggttgaatgtggactgtgtatatatgtatgtaaaaatttctgtgagatgctgctgtcgccacttaacattaaatatgttctagtggattttaatcctagtggccagttctatgatactgtatgtattatacagctgatgacaggagtaagactgtttagtgaatatctgttaaattttattgttgtggccagagataatttcagaataaaattttaatgtcctacctta

SEQ ID NO: 551 - DNA, 7767 bp, Homo sapiens
ctcactgtccctggaatcttcaagggagttactgcattacatcatcagaaacaaggcatttctatattactatggaaagatttcgtctggagaagaagttacctggtcctgatgaagaagctgttgtggatcttggcaaaactagctcaactgtgaacaccaagtttgaaaaagaagaactagaaagtcatagagctgtatatattggtgttcacgtcccgtttagtaaagagagtcgtcggcgtcataggcatcgcggacacaaacatcaccaccggagaagaaaagataaagaatcagataaagaagatggacgggaatctccttcttatgatacaccatcccagagagttcagtttatccttggtactgaagatgatgatgaagaacatattccccatgatctcttcacggaaatggatgaactgtgttacagagatggagaagaatatgaatggaaagaaactgctagatggctgaaatttgaagaggatgttgaagatggcggtgaccgatggagtaaaccttatgtggcaactctctctttgcacagtctttttgaactaaggagttgcatcctcaatggaacagtcatgctggatatgagagcaagcactctagatgaaatagcagatatggtattagacaacatgatagcttctggccaattagacgagtccatacgagagaatgtcagagaagctcttctgaagagacatcatcatcagaatgagaaaagattcaccagtcggattcctcttgttcgatcttttgcagatataggcaagaaacattctgaccctcacttgcttgaaaggaatggggaaggcctttcagcctcccgccactctttgcgaacaggtctgtctgcctcaaacctttccttgagaggagaatcacctttatctcttcttcttggtcatcttcttccttcttcaagagctggaacccctgcaggctcaaggtgtacaaccccagtacccacccctcaaaacagtcctccttctagccctagcatcagccgcctgacctccagaagttcccaagagagtcagcgtcaggccccagaactactggtttcacctgccagtgatgatattcccacagtagtaattcatccgcctgaggaagacttagaagcagcgctgaaaggcgaggagcagaagaatgaggaaaatgttgacttaactccaggtattttggcctctccccagtctgctcctggaaacttggacaatagtaaaagtggagaaattaaaggtaatggaagtggtggaagcagagaaaatagtactgttgacttcagcaaggttgatatgaatttcatgagaaaaattcctacgggtgctgaggcatccaacgtcctggtgggcgaagtagactttttggaaaggccaataattgcatttgtgagactggctcctgctgtcctccttacagggttgactgaggtccctgttccaaccaggtttttgtttttgttattgggtccagcgggcaaggcaccacagtaccatgaaattggacgatcaatagccactctcatgacagatgagattttccatgatgtagcttataaagcaaaagacagaaatgacctcttatctggaattgatgaatttttagatcaagtaactgtcctacctccaggagagtgggatccttctatacgcatagaaccaccaaaaagtgtcccttctcaggaaaagagaaagattcctgtgtttcacaatggatctacccccacactgggtgagactcctaaagaggccgctcatcatgctgggcctgagctacagaggactggacggctttttggtggtttgatacttgacatcaaaaggaaagcaccttttttcttgagtgacttcaaggatgcattaagcctgcagtgcctggcctcgattcttttcctatactgtgcctgtatgtctcctgtaatcacttttggagggctgcttggagaagctacagaaggcagaataagtgcaatagagtctctttttggagcatcattaactgggattgcctattcattgtttgctgggcaacctctaacaatattggggagcacaggtccagttctagtgtttgaaaaaattttatataaattctgcagagattatcaactttcttatctgtctttaagaaccagtattggtctgtggacttcttttttgtgcattgttttggttgcaacagatgcaagcagccttgtgtgttatattactcgatttacagaagaggcttttgcagcccttatttgcatcatattcatctacgaggctttggagaagctctttgatttaggagaaacatatgcatttaatatgcacaacaacttagataaactgaccagctactcatgtgtatgtactgaacctccaaaccccagcaatgaaactctagcacaatggaagaaagataatataacagcacacaatatttcctggagaaatcttactgtttctgaatgtaaaaaacttcgtggtgtattcttggggtcagcttgtggtcatcatggaccttatattccagatgtgctcttttggtgtgtcatcttgtttttcacaacattttttctgtcttcattcctcaagcaatttaagaccaagcgttactttcctaccaaggtgcgatcgacaatcagtgattttgctgtatttctcacaatagtaataatggttacaattgactaccttgtaggagttccatctcctaaacttcatgttcctgaaaaatttgagcctactcatccagagagagggtggatcataagcccactgggagataatccttggtggaccttattaatagctgctattcctgctttgctttgtaccattctcatctttatggatcaacaaatcacagctgtaattataaacagaaaggaacacaaattgaagaaaggagctggctatcaccttgatttgctcatggttggcgttatgttgggagtttgctctgtcatgggacttccatggtttgtggctgcaacagtgttgtcaataagtcatgtcaacagcttaaaagttgaatctgaatgttctgctccaggggaacaacccaagtttttgggaattcgtgaacagcgggttacagggctaatgatttttattctaatgggcctctctgtgttcatgacttcagtcctaaagtttattccaatgcctgttctgtatggtgttttcctttatatgggagtttcctcattaaaaggaatccagttatttgaccgtataaaattatttggaatgcctgctaagcatcagcctgatttgatatacctccgttatgtgccgctctggaaggtccatattttcacagtcattcagcttacttgtttggtccttttatgggtgataaaagtttcagctgctgcagtggtttttcccatgatggttcttgcattagtgtttgtgcgcaaactcatggacctgtgtttcacgaagagagaacttagttggcttgatgatcttatgccagaaagtaagaaaaagaaagaagatgacaaaaagaaaaaagagaaagaggaagctgaacggatgcttcaagatgatgatgatactgtgcaccttccatttgaagggggaagtctcttgcaaattccagtcaaggccctaaaatatagtcctgataaacctgtgagtgtgaaaataagttttgaagatgaaccaagaaagaaatacgtggatgctgaaacttcattatagaattgaaccaagaggcattatacatatagatatatacatatgtaatgtgtgcgtatcatgtcactatatataagaatattgtatgtcatgctgtttatgtgtgactaccgggtttttaaaagtagtgtctggagtttgtaatgagcaccgtggagactatgtatttaatgaaatgctctctttgaagtgaggtacatggttcttaactattcaaatatttattctgttagaaaaaaaaattttctgttttgcaatagaaggatgtggagaaatgctttcagtctacttttcttaaatctctgttcatcagtggcaattcgtaaaaaccttaagtgatactttgtttatatgtttataatttttaggtgtttcctgaaattttcacatattatttcacttttgttagtgctttatgggaagaatagggagtctataccagtgctgtgggaaaaatggtaacatttcagggcttctctatttgtgtttcatttctgtagatgtccatcgtgtttcactaactggcgttttcttagccatagagatgactgtagaacaatagaaactttaataatgatagtttttaacttttatgtttaaattttttttaaatcttaaaaccttcatatctaggtatccattgtgacagacaagtaaaattgcaggtgatttgataattaagcacccataccatttataacttctgaatttaaaaagttatacaatgccagtttgcaatagttgattttgatgcctttgtagaatattttttctgaatccttatgctcttttaaagccaatgattcccactctgttctctgccttgtctctctttgtcttaaaatgctttagtttccatcaggttcaagttcttgactattattctcttataagtagtaggcgtaaataatcaggagttagaattctctcagaagggtctatgatcagtattactttattaagaattacctttcattttctctttatgttattctttcacttttgtagattacatttaatagcttgttacctgtgattttattttaaaatatttattttgatatgatgcttaaatattatataaacatttggaaaagtaacaaatagagtaaattgttaatgtaaatagttggtgcttactttcatttatgtttattatcttaaagcaattgatagattttacatctttgatataaagcactgccatatttatattttaaaaggaaattagacattttatatgtagctcagattaatgacatttttattttgtgtattagtttttgcttttctgagctttttaaagtctaacaaatctttttagtcatcttttatatacttttagttccacatgaaataaatgttgttaagcctgtaggactggatgaatggggttgtgaaactgatttgacaagagaataatttacaaaaatcaaatgagtattgagaagccacagaaatatcaaaaatggtgacatcactattaggatgaaaattttatgaaattccaatgctccctttaaccatataattaaattacaaaggtatacataattaatctaataaaggatcatgaggaatgccaaaagctgaaattttagcaagtctggtgttttaaattcattataaactatttattaactaatgtaatgtcctcctctaagaccatattgtaagagtcttgttaaaatgatggattcaacttctgcctcggatgagaggttggaaatgtagctgcttttctttagaaaatatgtagctgtcatcatttggtactgcctaaaaagagttagactctattggcaattgatagagtattacccacggtgcttattattgtttatgagcttccattgtaatgattcctttttatttgtagcagcataattatttccaaagaccccagtatttgctgctatttttaaaactcccctgatgtacctgaacaagaggatttcctcacatcatttccttgtgtctggacatcaggggtaacaactgtacttactttacaggaagaaattttaaaactgaaaactacctgggatcatagtgtttctgtgattttatttaattgtgtatagtaattatccagtgccagaaaaaccgtcacttgcaaaatactttgcactcaaaatgtttttacaatgcttctaaatgttactggtttctgctttcttttgactacttgactgacaaaatgatctgactactccatttaagagcaaaggtaactcatgtttaggtaattaactgcttgttttaagtgattatatttcttccactgtttttgaaaaataatcaaagatagcattcattgagagacagtgacagatataatttactacatatattgatttttaaataaagttgccttaaataagtgtatgtaagcagtagtagttgctatgtactgatttacctcaaggtgcaaaataattaaacctgtacatattccatttacaaaataaattcagccctgcactttctttagatgccttgatttccagaatggagcttagtgctactgaataccctggccacagagccacctcaggatattcttttctccaccctagtttatttatttatagatatctgtttacaaagtctgtagtaaatcctgatgctgaccatctgaaatgtactttttttctgaatgctgtttcaatctaaaatagcagcttttgagaaaacaatgatgtaaattccttatgataaaaggatgattctatatattctttaatgatattaaatatgccgaagccaagcacacagtctttctaaagtgtgtgtatgtttgtgtgaatgtgaatgatactgatcttatatctgttaaaagttgttttaaaaagctgtggcatcccattgttcatatttgccaagtcttctgtaaagatgtctaggacgaaatattttatgtgctaatgcatgtatttgtaaaccagatttgtttaccactcaaaattaacttgttttcttcatccaaaaaagtttatttcttccacgtacttaaattttctgtgtgggtataatatagctttctaatttttttctttcacaaaggcaggttcaaaattctgttgaaagaaaaatgctttctgaaactgaggtataacaccagagcttgctgtttaaaggattatatgatgtacatcagttctataaatgtgctcagcagtttaacatgtgaatcctgttttaaagtgctcagatttcaactgtgtaagccattgatataacgctgtaattaaaaatgtttatatgaaataacttaatgttttaaatttatttatgtagatcacatcatttttatcgtatgcagtgcaaatatgtgaaatgtcttttggtttattccaacaattatttattttagaaagtaagtttaaagactttaaggacattcaaagtttaaaatagtgttcaaattgcaaaatttggcaatcttcatataaattggtttcttttctaacttttcaaaaactaacattaaatgtcaattataggaaaacatagttggaaatgtaatcatccaaagatcatttttaaaatgaaatttaattagcacatattgaacatttgacttaattgttaaaccccagttttgttttgtttttttaatcagatttttgcacactgattagtttttgtgttgtggcttttgttgctttattattcaaggttttttttttttttcttccccatgggggagattgtcttccaatgtttaactacgtttaaataaataaaaattgaattttattgttcatttatataaaatctgataccttgatgtaatttcacaatacagttccaatttttatggcttttataattacaatgatattttcttctataataaaatccaaagtaaacatttaaattgtagaactgatatttttcatttatatgaagtataagcctctactgggtctatattgtgaatcatcctgcctttcaaatttgtttcataattgttagatgaaaactatttttttggagatgttactgaagttgattgagcaataaaagtctacttaattagtaaaaaaaa

SEQ ID NO: 552 - DNA, 4362 bp, Homo sapiens
aaggggagggggaggagcggcgaaagcggaagccatgttggagtttcaccccgagcgaggggctgcgagggttctcctctccttgtgggtgtgaccaggttcggcgcggcggcgggccgcggggggcggggacgattggccgcttgtcgtcgtccgcagcggcgtgaggggagcggcggcggcggcggcggccgcagcgtggagccgggtgattgtgaccgccgggggagccgggagccggccgcggcgccctctctccgtgtggccccctgagcggcccccctcccctgcccgggagggaggcggggggcacctggggcccgccatgaaccccggcttcgatttgtcccgccggaacccgcaggaggacttcgagctgattcagcgcatcggcagcggcacctacggcgacgtctacaaggcacggaatgttaacactggtgaattagcagcaattaaagtaataaaattggaaccaggagaagactttgcagttgtgcagcaagaaattattatgatgaaagactgtaaacacccaaatattgttgcttattttggaagctatctcaggcgagataagctttggatttgcatggagttttgtggaggtggttctttacaggatatttatcacgtaactggacctctgtcagaactgcaaattgcatatgttagcagagaaacactgcagggattatattatcttcacagtaaaggaaaaatgcacagagatataaagggagctaacattctattaacggataatggtcatgtgaaattggctgattttggagtatctgcacagataacagctacaattgccaaacggaagtctttcattggcacaccatattggatggctccagaagttgcagctgttgagaggaaggggggttacaatcaactctgtgatctctgggcagtgggaatcactgccatagaacttgcagagcttcagcctcctatgtttgacttacacccaatgagagcattatttctaatgacaaaaagcaattttcagcctcctaaactaaaggataaaatgaaatggtcaaatagttttcatcactttgtgaaaatggcacttaccaaaaatccgaaaaaaagacctactgctgaaaaattattacagcatccttttgtaacacaacatttgacacggtctttggcaatcgagctgttggataaagtaaataatccagatcattccacttaccatgatttcgatgatgatgatcctgagcctcttgttgctgtaccacatagaattcactcaacaagtagaaacgtgagagaagaaaaaacacgctcagagataacctttggccaagtgaaatttgatccacccttaagaaaggagacagaaccacatcatgaacttcccgacagtgatggttttttggacagttcagaagaaatatactacactgcaagatctaatctggatctgcaactggaatatggacaaggacaccaaggtggttactttttaggtgcaaacaagagtcttctcaagtctgttgaagaagaattgcatcagcgaggacacgtcgcacatttagaagatgatgaaggagatgatgatgaatctaaacactcaactctgaaagcaaaaattccacctcctttgccaccaaagcctaagtctatcttcataccacaggaaatgcattctactgaggatgaaaatcaaggaacaatcaagagatgtcccatgtcagggagcccagcaaagccatcccaagttccacctagaccaccacctcccagattacccccacacaaacctgttgccttaggaaatggaatgagctccttccagttaaatggtgaacgagatggctcattatgtcaacaacagaatgaacatagaggcacaaacctttcaagaaaagaaaagaaagatgtaccaaagcctattagtaatggtcttcctccaacacctaaagtgcatatgggtgcatgtttttcaaaagtttttaatgggtgtcccttgaaaattcactgtgcatcatcatggataaacccagatacaagagatcagtacttgatatttggtgccgaagaagggatttataccctcaatcttaatgaacttcatgaaacatcaatggaacagctattccctcgaaggtgtacatggttgtatgtaatgaacaattgcttgctatcaatatctggtaaagcttctcagctttattcccataatttaccagggctttttgattatgcaagacaaatgcaaaagttacctgttgctattccagcacacaaactccctgacagaatactgccaaggaaattttctgtatcagcaaaaatccctgaaaccaaatggtgccagaagtgttgtgttgtaagaaatccttacacgggccataaatacctatgtggagcacttcagactagcattgttctattagaatgggttgaaccaatgcagaaatttatgttaattaagcacatagattttcctataccatgtccacttagaatgtttgaaatgctggtagttcctgaacaggagtaccctttagtttgtgttggtgtcagtagaggtagagacttcaaccaagtggttcgatttgagacggtcaatccaaattctacctcttcatggtttacagaatcagataccccacagacaaatgttactcatgtaacccaactggagagagataccatccttgtatgcttggactgttgtataaaaatagtaaatctccaaggaagattaaaatctagcaggaaattgtcatcagaactcacctttgatttccagattgaatcaatagtgtgcctacaagacagtgtgctagctttctggaaacatggaatgcaaggtagaagttttagatctaatgaggtaacacaagaaatttcagatagcacaagaattttcaggctgcttggatctgacagggtcgtggttttggaaagtaggccaactgataaccccacagcaaatagcaatttgtacatcctggcgggtcatgaaaacagttactgagaattgttgtgctttgacagttaactctagaaagaaagaacactaccactgcaacattaatggatgcttgaagctgtacaaaagctgcagtaacctgtcttcagttactttgtaatttattgtggcatgagataagatggggaaaattttgttttaagtggtatggatatatttagcatattgaaccacacaagtgcttaattcattgttatgtaatctttgtacatataggcagtattttttctgtgaaacttcatattgctgaagacatacactaagaatttatgtagataatgtacttttatgagatgtacaagtaagtgtcttatctgtacagatgtaaatgttgatgaaaatgcaattggggttaatattttaagaattctttagtatattcttgggtgtggctatattacaaaatgggatgctggcaatgaaacaatacatttaacactattgtatttttattatatgtaatttagtaatatgaatataaatcttgtaacttttaaaattgtaatggaggctgtaatcattttataatctttttaattttaatgcaagtacactggtgtttatatttgcacaaagtattgatatgtgatgtattaagtcacaaaagtaagctgtgacattgtctataagcatttggctccacaaatgtatttggattgttttctatgtgaagcaaaccaattataattaaccacatgttgtagtaactggtctttttatatttaagcagaatcctgtaagattgcttgtctttgcttaaaaacaatacctttgaacatttttgaatcacagaatagcggtaccatgatagaatactgcaattgtggtcagaattacagtatgcacaaagaattaattagcattattaaagagtcctcactaaacatttcatatgatcacactgaagaactgtaacattccatagagtgaagtggttcaaatttctcttggaatttttacttttgttggccttattttatgatccttttcatatttcttttgacttagagtattaatacatggccaaaataatttagttactacctcatacaaacaatataatggttactacacatcacaggaacttagttttggtttaagtcatttttgattgcttttttccaatggaatatgtatataccaggttttagcaaaatgcacacttttggctctttttggtatatgttctttatattttaatgtgagtatatacactaagaacaaactaaattgtgatttatgatcttcatttattttaatgataatggttttaaaatatgttcctgattgtacatattgtaaaataaacatgttttttaacatgctgttgtatagta

SEQ ID NO: 553 - DNA, 4006 bp, Homo sapiens
gctcggccggcagtgccatcgcgcggagaggagggggtgcgcttccgcgggcggggcgcggagcccgccgtctcggaggccgcggctcggcccggcactgcggagggccgcttgatttcccggaacccaggtcgcgcggctgctagggccggagccggtggatccgagcgggtgccaccagcggcggcgcgccgcctcccccggtgggagcggtggttgggccaggctgcggcagagcgttcgctcggagatggcggagcagccgcgacgcggcccgtggccccgaaagcagggaagccgggcagccccgggacgcggcggagcccggggacagcggggacgccgcccagtcctccgggtatgaagctaaaatgcagcggctaagaacgcggctctggagcttgacaggcctgacgtcgaatcccagccctcccaccaactgagctgtgtgatcctgggcaaggtagaggggaagagattgaactttgctgacctttgatgtgaggcgctcagccagggccaaggggagagcctggcaagatttgcagcctgaagccatgggccagggggccatggtgacctgagacaagtggactctgtatagttgccccctgcttccccttctacctcccctaccctatgctaaggggactcgtctccacctcgtaaaggaaactccccaagggaatccctgtcccctattttcctatccttctacccttccaagacagtcctagcctatagaactcctacctcccatcccctgaggtggtccccattcctccctcccttcctccccccgccatgctccagttgtggaaggtggtacgcccagctcggcagctggaactgcaccgcctcatactgctgctgatcgctttcagcctgggctccatgggcttcctggcttattatgtgtccaccagccctaaggccaaggaacccttgcccctgcccttgggagactgcagcagcggtggggcagctggtcctggccctgcacggcctccagttccacctcggccccccaggcctccagagacagctcgaactgaacccgtggtccttgtgtttgtggagagtgcatactcacagctggggcaggaaattgtggccatcctggagtctagtcgttttcgttatagcactgagttggcacctggccgaggggacatgcccacattgactgataatacccatggccgctatgtcttggtcatttatgagaacctgctcaagtatgtcaacctggatgcctggagtcgggaactgctagaccggtactgcgtggagtatggtgtgggcatcattggctttttccgagcccacgagcacagcctactgagcgcccagctcaagggctttcccctttttttacactcaaacttggggctccgggactaccaagtgaatccttctgccccgctactgcatctcacacgccccagccgcctagaaccagggccactgcctggtgatgactggaccatcttccaatccaatcatagtacatatgaaccagtgcttcttgccagccttcggccagctgagcccgcagtgccaggaccagttcttcgtcgggcccggcttcccactgtggtacaggacctggggcttcatgatggcatccagcgggtgctctttggacatggcctttccttctggctccacaaacttatcttcgttgatgctgttgcatacctcactggcaagcgcctctgcctggaccttgaccgctacatcttggtagacatcgatgacatctttgtgggcaaggaagggacccgcatgaaggtggctgatgttgaggctctgttgaccacccagaacaaactcaggaccttagttcccaacttcaccttcaacttgggcttctcgggcaagttctatcatactgggacagaggaggaggatgcaggggacgacatgctgctgaagcaccgcaaagagttctggtggttcccccacatgtggagccacatgcagccacacctgttccacaatcgctccgtgctggctgaccagatgaggctcaacaaacagtttgctctggagcatgggattcccacggacctggggtatgctgtggccccccaccactcgggtgtgtaccccatccacacgcagctctatgaggcctggaaatccgtgtggggcatccaggtgaccagcactgaggagtatccccatctccgccctgcccgctaccgccgtggcttcattcacaatggcattatggtgctgccccggcagacatgtggcctcttcactcacacaatcttctataatgagtatcctggaggctctcgtgaactagaccggagcatccgaggtggagagctctttctgacagtgctgcttaatccgatcagcatctttatgacccatctgtccaattatggaaatgaccggctgggcctatacacctttgagagcttggtgcgcttcctccagtgttggacacggctgcgcctacagacccttcctcctgtcccacttgcacagaagtactttgaacttttccctcaggagcgaagccccctttggcagaatccctgtgatgacaagaggcacaaagatatctggtccaaggagaaaacctgtgatcgtctcccgaagttcctcattgtgggaccccagaaaacagggactacagctattcacttcttcctgagcctgcacccagctgtaactagcagcttccctagccccagcacatttgaggagattcagttcttcaacagccctaattaccacaagggtattgactggtacatggatttcttccctgttccttccaatgccagcactgatttcctatttgaaaaaagtgccacctactttgactctgaagttgtaccacggcggggggctgccctcctgccacgagccaagatcatcacagtgctcaccaaccctgctgacagggcctactcctggtaccagcatcagcgagcccatggagacccagttgctctgaactataccttctatcaggtgatttcagcctcctcccagacccctctggcactacgctccctgcagaaccgctgtcttgtccctggctactattctacccatctacaacgctggctgacttactacccctctggacagttgctgattgtggatgggcaagagctgcgtaccaacccagcagcctcaatggagagcatccagaagttcctgggtatcacaccctttctgaactacacacggaccctcaggtttgatgatgataagggattttggtgccagggacttgaaggtggtaagactcgctgtctaggccggagcaaaggccggaggtatccagatatggacactgagtcccgtcttttccttacggattttttccggaaccataatttggagttgtcgaagctgctgagccggcttggacagccagtgccctcgtggcttcgggaagaactgcagcattccagtctgggctgatgtcccagcctcccataccagcaaaatgccccctgcttccctaaggggcaggtccagagcagggcccacaagggggattagagtggcctggcccctccccctctacctcagtagcccccaggcctgagatggctgagaagggaagggtatccttttcccacagttctgggacaaataaaggggcttcctttggtaccccacataatagtgctaggtacctttgacccatcatcttgggaggtggggaggaatgagagggtccaggcagggtgtaggggaatgtattagtccaatgagatttccctcttcatccgcagcagtgtatctattctatacctggctatgggagagaccccttgcatgggagggaccccttgctatggcccctttagccaggcagtgggatctacctgtggcccggcctccctaatgtcattcacattgaatggggatgaggtcggacagtggctcatagagccgagtatgagccctagctgtgggctagaaatgtccttaataaacatccttatttttctgtttaaaaaaaaaa

SEQ ID NO: 554 - DNA, 6129 bp, Homo sapiens
acagtgctttggggttcgacatcaaaacagagatcaaatacaaaagtttgggcagatgggcaagagggcagagggacaggggacgcggccaatgtagctcctctacctctacggtgccaggcctacaaagaaggccggccgccgtaagtgaccagaagcgggcccggcctcgccccctccgcctggtgacgtcactcccgcgccgcactcccagtgctgcggctgcctagttgacgcacccattgagtcgctggcttctttgcagcgcttcagcgttttcccctggagggcgcctccatccttggaggcctagtgccgtcggagagagagcgggagccgcggacagagacgcgtgcgcaattcggagccgactctgggtgcggactgtgggagctgactctgggtagccggctgcgcgtggctggggaggcgaggccggacgcacctctgtttgggggtcctcagagattaatgattcatcaagggatagttgtacttgtctcgtgggaatcacttcatcatgcgaaatctgaaattatttcggaccctggagttcagggatattcaaggtccagggaatcctcagtgcttctctctccgaactgaacaggggacggtgctcattggttcagaacatggcctgatagaagtagaccctgtctcaagagaagtgaaaaatgaagtttctttggtggcagaaggctttctcccagaggatggaagtggccgcattgttggtgttcaggacttgctggatcaggagtctgtgtgtgtggccacagcctctggagacgtcatactctgcagtctcagcacacaacagctggagtgtgttgggagtgtagccagtggtatctctgttatgagttggagtcctgaccaagagctggtgcttcttgccacaggtcaacagaccctgattatgatgacaaaagattttgagccaatcctggagcagcagatccatcaggatgattttggtgaaagcaagtttatcactgttggatggggtaggaaggagacacagttccatggatcagaaggcagacaagcagcttttcagatgcaaatgcatgagtctgctttgccctgggatgaccatagaccacaagttacctggcggggggatggacagttttttgctgtgagtgttgtttgcccagaaacaggggctcggaaggtcagagtgtggaaccgagagtttgctttgcagtcaaccagtgagcctgtggcaggactgggaccagccctggcttggaaaccctcaggcagtttgattgcatctacacaagataaacccaaccagcaggatattgtgttttttgagaaaaatggactccttcatggacactttacacttcccttccttaaagatgaggttaaggtaaatgacttgctctggaatgcagattcctctgtgcttgcagtctggctggaagaccttcagagagaagaaagctccattccgaaaacctgtgttcagctctggactgttggaaactatcactggtatctcaagcaaagtttatccttcagcacctgtgggaagagcaagattgtgtctctgatgtgggaccctgtgaccccataccggctgcatgttctctgtcagggctggcattacctcgcctatgattggcactggacgactgaccggagcgtgggagataattcaagtgacttgtccaatgtggctgtcattgatggaaacagggtgttggtgacagtcttccggcagactgtggttccgcctcccatgtgcacctaccaactgctgttcccacaccctgtgaatcaagtcacattcttagcacaccctcaaaagagtaatgaccttgctgttctagatgccagtaaccagatttctgtttataaatgtggtgattgtccaagtgctgaccctacagtgaaactgggagctgtgggtggaagtggatttaaagtttgccttagaactcctcatttggaaaagagatacaaaatccagtttgagaataatgaagatcaagatgtaaacccgctgaaactaggccttctcacttggattgaagaagacgtcttcctggctgtaagccacagtgagttcagcccccggtctgtcattcaccatttgactgcagcttcttctgagatggatgaagagcatggacagctcaatgtcagttcatctgcagcggtggatggggtcataatcagtctatgttgcaattccaagaccaagtcagtagtattacagctggctgatggccagatatttaagtacctttgggagtcaccttctctggctattaaaccatggaagaactctggtggatttcctgttcggtttccttatccatgcacccagaccgaattggccatgattggagaagaggaatgtgtccttggtctgactgacaggtgtcgctttttcatcaatgacattgaggttgcgtcaaatatcacgtcatttgcagtatatgatgagtttttattgttgacaacccattcccatacctgccagtgtttttgcctgagggatgcttcatttaaaacattacaggccggcctgagcagcaatcatgtgtcccatggggaagttctgcggaaagtggagaggggttcacggattgtcactgttgtgccccaggacacaaagcttgtattacagatgccaaggggaaacttagaagttgttcatcatcgagccctggttttagctcagattcggaagtggttggacaaacttatgtttaaagaggcatttgaatgcatgagaaagctgagaatcaatctcaatctgatttatgatcataaccctaaggtgtttcttggaaatgtggaaaccttcattaaacagatagattctgtgaatcatattaacttgttttttacagaattgaaagaagaagatgtcacgaagaccatgtaccctgcaccagttaccagcagtgtctacctgtccagggatcctgacgggaataaaatagaccttgtctgcgatgctatgagagcagtcatggagagcataaatcctcataaatactgcctatccatacttacatctcatgtaaagaagacaaccccagaactggaaattgtactgcaaaaagtacacgagcttcaaggaaatgctccctctgatcctgatgctgtgagtgctgaagaggccttgaaatatttgctgcatctggtagatgttaatgaattatatgatcattctcttggcacctatgactttgatttggtcctcatggtagctgagaagtcacagaaggatcccaaagaatatcttccatttcttaatacacttaagaaaatggaaactaattatcagcggtttactatagacaaatacttgaaacgatatgaaaaagccattggccacctcagcaaatgtggacctgagtacttcccagaatgcttaaacttgataaaagataaaaacttgtataacgaagctctgaagttatattcaccaagctcacaacagtaccaggatatcagcattgcttatggggagcacctgatgcaggagcacatgtatgagccagcggggctcatgtttgcccgttgcggtgcccacgagaaagctctctcagcctttctgacatgtggcaactggaagcaagccctctgtgtggcagcccagcttaactttaccaaagaccagctggtgggcctcggcagaactctggcaggaaagctggttgagcagaggaagcacattgatgcggccatggttttggaagagtgtgcccaggattatgaagaagctgtgctcttgctgttagaaggagctgcctgggaagaagctttgaggctggtatacaaatataacagactggatattatagaaaccaacgtaaagccttccattttagaagcccagaaaaattatatggcatttctggactctcagacagccacattcagtcgccacaagaaacgtttattggtagttcgagagctcaaggagcaagcccagcaggcaggtctggatgatgaggtaccccacgggcaagagtcagacctcttctctgaaactagcagtgtcgtgagtggcagtgagatgagtggcaaatactcccatagtaactccaggatatcagcgagatcatccaagaatcgccgaaaagcggagcggaagaagcacagcctcaaagaaggcagtccgctggaggacctggccctcctggaggcactgagtgaagtggtgcagaacactgaaaacctgaaagatgaagtataccatattttaaaggtactctttctctttgagtttgatgaacaaggaagggaattacagaaggcctttgaagatacgctgcagttgatggaaaggtcacttccagaaatttggactcttacttaccagcagaattcagctaccccggttctaggtcccaattctactgcaaatagtatcatggcatcttatcagcaacagaagacttcggttcctgttcttgatgctgagctttttataccaccaaagatcaacagaagaacccagtggaagctgagcctgctagactgagtgactgcagttaggagggatccgacagagaagaccatttccactcattcctgttgtcctaccaccccttgctctttgagggctggctattgagaactggaaagagtaaaatgataacttaccttagcattgccaagaacttcagcagacaacaagcaattctatttattttatgttgtgtatacatcttgatcattagcaagacattaagctttaaccattatggcaccattttgtgagaatgattgttctttcacttgggctgtttgagagcataattatggtaatcatgagattaatgtttcatgatttctacctccaaagtgtgaagacaagtaaaacaatgtttctaaattgtcttattttgttggcggagaagattacaatggctattagtgctacatttggtcaaatgtaatcacttaaatagcttcttgtcaccttaaactaaagcagaataaaaagtatcctttgaaattataagccctcctttgctgacagctattattttgtaacatcttaccaggtcatgtgctttcagttataactgggctgagcctcctataattacaatgtctatagggactgttttactgcctgtgtattttctgctagagagttagcaatgttagagctagaacagattagaatttctaaacagtatcatgcacagttggtgtgagtgatcagtgtgcattgtatggcatgcatggttgtgaattattctctgttctccaaatactgtttctttaactcagatatttttgttagtgtctaggccacttcatttatttttcgtcatggtactttactgacttctctttattcaattctccacgccctcaccaaaaaaaactgtctcaaaatgagaatattttattttcatggtgagtctagaaaacgcccacttcattctgattaaaaattcttccatgttttaaatatcagaaccagacctttcttactgtgtatcttagcccatttgtgtctctataacaacaaccagctttcaaaggaactaatagagtgaaaactcactcattaccacgaggatggcacaagcgattcacgtaggatctgcccctgtgaccaaaacacctcccattgggccccacttccaacactggtgatcacatttcaacatgaggtttagggaaacaaatgcctaaactacagcactgtacataaactaacaggaaatgctgcttttgatcctcaaagaagtgatatagccaaaattgtaatttaagaagcctttcccagtatagcaagatgttaactatagaatcaatctaggagtattcactgtaaaattcaacttttctgtatgtttgaacattttcacaatctcataggagtttttaaaaagaagagaaagaagatatactttgctttggagaaatctactttttgacttacatgggtttgctgtaattaagtgcccaatattgaaaggctgcaagtactttgtaatcactctttggcatgggtaaataagcatggtaacttatattgaaatatagtgctcttgctttggataactgtaaagggacccatgctgatagactggaaatagaagtaaatgtgtttattgaaaaaaaaaaaaaaaa

SEQ ID NO: 555 - DNA, 3547 bp, Homo sapiens
cccgggtcagcgcccgcccgcccgcgctcctcccggccgctcctcccgccccgcccggcccggcgccgactctgcggccgcccgacgagcccctcgcggcactgccccggccccggccccggccccggccccctcccgccgcaccgcccccggcccggccctccgccctccgcactcccgcctccctccctccgcccgctcccgcgccctcctccctccctcctccccagctgtcccgttcgcgtcatgccgagcctcccggccccgccggccccgctgctgctcctcgggctgctgctgctcggctcccggccggcccgcggcgccggcccagagccccccgtgctgcccatccgttctgagaaggagccgctgcccgttcggggagcggcaggctgcaccttcggcgggaaggtctatgccttggacgagacgtggcacccggacctaggggagccattcggggtgatgcgctgcgtgctgtgcgcctgcgaggcgcctcagtggggtcgccgtaccaggggccctggcagggtcagctgcaagaacatcaaaccagagtgcccaaccccggcctgtgggcagccgcgccagctgccgggacactgctgccagacctgcccccaggagcgcagcagttcggagcggcagccgagcggcctgtccttcgagtatccgcgggacccggagcatcgcagttatagcgaccgcggggagccaggcgctgaggagcgggcccgtggtgacggccacacggacttcgtggcgctgctgacagggccgaggtcgcaggcggtggcacgagcccgagtctcgctgctgcgctctagcctccgcttctctatctcctacaggcggctggaccgccctaccaggatccgcttctcagactccaatggcagtgtcctgtttgagcaccctgcagcccccacccaagatggcctggtctgtggggtgtggcgggcagtgcctcggttgtctctgcggctccttagggcagaacagctgcatgtggcacttgtgacactcactcacccttcaggggaggtctgggggcctctcatccggcaccgggccctggctgcagagaccttcagtgccatcctgactctagaaggccccccacagcagggcgtagggggcatcaccctgctcactctcagtgacacagaggactccttgcattttttgctgctcttccgagggctgctggaacccaggagtgggggactaacccaggttcccttgaggctccagattctacaccaggggcagctactgcgagaacttcaggccaatgtctcagcccaggaaccaggctttgctgaggtgctgcccaacctgacagtccaggagatggactggctggtgctgggggagctgcagatggccctggagtgggcaggcaggccagggctgcgcatcagtggacacattgctgccaggaagagctgcgacgtcctgcaaagtgtcctttgtggggctgatgccctgatcccagtccagacgggtgctgccggctcagccagcctcacgctgctaggaaatggctccctgatctatcaggtgcaagtggtagggacaagcagtgaggtggtggccatgacactggagaccaagcctcagcggagggatcagcgcactgtcctgtgccacatggctggactccagccaggaggacacacggccgtgggtatctgccctgggctgggtgcccgaggggctcatatgctgctgcagaatgagctcttcctgaacgtgggcaccaaggacttcccagacggagagcttcgggggcacgtggctgccctgccctactgtgggcatagcgcccgccatgacacgctgcccgtgcccctagcaggagccctggtgctaccccctgtgaagagccaagcagcagggcacgcctggctttccttggatacccactgtcacctgcactatgaagtgctgctggctgggcttggtggctcagaacaaggcactgtcactgcccacctccttgggcctcctggaacgccagggcctcggcggctgctgaagggattctatggctcagaggcccagggtgtggtgaaggacctggagccggaactgctgcggcacctggcaaaaggcatggcctccctgatgatcaccaccaagggtagccccagaggggagctccgagggcaggtgcacatagccaaccaatgtgaggttggcggactgcgcctggaggcggccggggccgagggggtgcgggcgctgggggctccggatacagcctctgctgcgccgcctgtggtgcctggtctcccggccctagcgcccgccaaacctggtggtcctgggcggccccgagaccccaacacatgcttcttcgaggggcagcagcgcccccacggggctcgctgggcgcccaactacgacccgctctgctcactctgcacctgccagagacgaacggtgatctgtgacccggtggtgtgcccaccgcccagctgcccacacccggtgcaggctcccgaccagtgctgccctgtttgccctgagaaacaagatgtcagagacttgccagggctgccaaggagccgggacccaggagagggctgctattttgatggtgaccggagctggcgggcagcgggtacgcggtggcaccccgttgtgcccccctttggcttaattaagtgtgctgtctgcacctgcaaggggggcactggagaggtgcactgtgagaaggtgcagtgtccccggctggcctgtgcccagcctgtgcgtgtcaaccccaccgactgctgcaaacagtgtccagtggggtcgggggcccacccccagctgggggaccccatgcaggctgatgggccccggggctgccgttttgctgggcagtggttcccagagagtcagagctggcacccctcagtgcccccttttggagagatgagctgtatcacctgcagatgtggggcaggggtgcctcactgtgagcgggatgactgttcactgccactgtcctgtggctcggggaaggagagtcgatgctgttcccgctgcacggcccaccggcggccagccccagagaccagaactgatccagagctggagaaagaagccgaaggctcttagggagcagccagagggccaagtgaccaagaggatggggcctgagctggggaaggggtggcatcgaggaccttcttgcattctcctgtgggaagcccagtgcctttgctcctctgtcctgcctctactcccacccccactacctctgggaaccacagctccacaagggggagaggcagctgggccagaccgaggtcacagccactccaagtcctgccctgccaccctcggcctctgtcctggaagccccacccctttcctcctgtacataatgtcactggcttgttgggatttttaatttatcttcactcagcaccaagggcccccgacactccactcctgctgcccctgagctgagcagagtcattattggagagttttgtatttattaaaacatttctttttcagtcaaaaaaaaaaaaaaaaaaaaaaaaaa

SEQ ID NO: 556 - DNA, 6895 bp, Homo sapiens
ttccagttacagctatatcagagaatgagttaatctcctcagaaatcactaaatactactctgaggggcttagaaattaacaggttgtttatataattggccttaaatgaggtgagagtgaagagactagagccatctctggaaaacatcattatcccattccccgggaagctaccctctggaactcaagatttgaccatatctgttttgaggattcattatgaacaaagaagtctcccaggtgtgaagtttttcaacatgagtggcctcggggacagttcatccgaccctgctaacccagactcacataagaggaaaggatcgccatgtgacacactggcatcaagcacggaaaagaggcgcagggagcaagaaaataaatatttagaagaactagctgagttactgtctgccaacattagtgacattgacagcttgagtgtaaaaccagacaaatgcaagattttgaagaaaacagtcgatcagatacagctaatgaagagaatggaacaagagaaatcaacaactgatgacgatgtacagaaatcagacatctcatcaagtagtcaaggagtgatagaaaaggaatccttgggacctcttcttttggaggctttggatggatttttctttgttgtgaactgtgaagggagaattgtatttgtgtcagagaatgtaaccagctacttaggttacaatcaggaggaattaatgaatacgagcgtctacagcatactgcacgtgggggatcatgcagaatttgtgaagaatctgctaccaaaatcactagtaaatggagttccttggcctcaagaggcaacacgacgaaatagccatacctttaactgcaggatgctaattcaccctccagatgagccagggaccgagaaccaagaagcttgccagcgttatgaagtaatgcagtgtttcactgtgtcacagccaaaatcaattcaagaggatggagaagatttccagtcatgtctgatttgtattgcacggcgattacctcggcctccagctattacgggtgtagaatcctttatgaccaagcaagatactacaggtaaaatcatctctattgatactagttccctgagagctgctggcagaactggttgggaagatttagtgaggaagtgcatttatgcttttttccaacctcagggcagagaaccatcttatgccagacagctgttccaagaagtgatgactcgtggcactgcctccagcccctcctatagattcatattgaatgatgggacaatgcttagcgcccacaccaagtgtaaactttgctaccctcaaagtccagacatgcaacctttcatcatgggaattcatatcatcgacagggagcacagtgggctttctcctcaagatgacactaattctggaatgtcaattccccgagtaaatccctcggtcaatcctagtatctctccagctcatggtgtggctcgttcatccacattgccaccatccaacagcaacatggtatccaccagaataaaccgccagcagagctcagaccttcatagcagcagtcatagtaattctagcaacagccaaggaagtttcggatgctcacccggaagtcagattgtagccaatgttgccttaaaccaaggacaggccagttcacagagcagtaatccctctttaaacctcaataattctcctatggaaggtacaggaatatccctagcacagttcatgtctccaaggagacaggttacttctggattggcaacaaggcccaggatgccaaacaattcctttcctcctaatatttcgacattaagctctcccgttggcatgacaagtagtgcctgtaataataataaccgatcttattcaaacatcccagtaacatctttacagggtatgaatgaaggacccaataactccgttggcttctctgccagttctccagtcctcaggcagatgagctcacagaattcacctagcagattaaatatacaaccagcaaaagctgagtccaaagataacaaagagattgcctcaattttaaatgaaatgattcaatctgacaacagctctagtgatggcaaacctctggattcagggcttctgcataacaatgacagactttcagatggagacagtaaatactctcaaaccagtcacaaactagtgcagcttttgacaacaactgccgaacagcagttacggcatgctgatatagacacaagctgcaaagatgtcctgtcttgcacaggcacttccaactctgcctctgctaactcttcaggaggttcttgtccctcttctcatagctcattgacagaacggcataaaattctacaccggctcttacaggagggtagcccctcagatatcaccactttgtctgtcgagcctgataaaaaggacagtgcatctacttctgtgtcagtgactggacaggtacaaggaaactccagtataaaactagaactggatgcttcaaagaaaaaagaatcaaaagaccatcagctcctacgctatcttttagataaagatgagaaagatttaagatcaactccaaacctgagcctggatgatgtaaaggtgaaagtggaaaagaaagaacagatggatccatgtaatacaaacccaaccccaatgaccaaacccactcctgaggaaataaaactggaggcccagagccagtttacagctgaccttgaccagtttgatcagttactgcccacgctggagaaggcagcacagttgccaggcttatgtgagacagacaggatggatggtgcggtcaccagtgtaaccatcaaatcggagatcctgccagcttcacttcagtccgccactgccagacccacttccaggctaaatagattacctgagctggaattggaagcaattgataaccaatttggacaaccaggaacaggcgatcagattccatggacaaataatacagtgacagctataaatcagagtaaatcagaagaccagtgtattagctcacaattagatgagcttctctgtccacccacaacagtagaagggagaaatgatgagaaggctcttcttgaacagctggtatccttccttagtggcaaagatgaaactgagctagctgaactagacagagctctgggaattgacaaacttgttcaggggggtggattagatgtattatcagagagatttccaccacaacaagcaacgccacctttgatcatggaagaaagacccaacctttattcccagccttactcttctccttctcctactgccaatctccctagccctttccaaggcatggtcaggcaaaaaccttcactggggacgatgcctgttcaagtaacacctccccgaggtgctttttcacctggcatgggcatgcagcccaggcaaactctaaacagacctccggctgcacctaaccagcttcgacttcaactacagcagcgattacagggacaacagcagttgatacaccaaaatcggcaagctatcttaaaccagtttgcagcaactgctcctgttggcatcaatatgagatcaggcatgcaacagcaaattacacctcagccacccctgaatgctcaaatgttggcacaacgtcagcgggaactgtacagtcaacagcaccgacagaggcagctaatacagcagcaaagagccatgcttatgaggcagcaaagctttgggaacaacctccctccctcatctggactaccagttcaaatggggaacccccgtcttcctcagggtgctccacagcaattcccctatccaccaaactatggtacaaatccaggaaccccacctgcttctaccagcccgttttcacaactagcagcaaatcctgaagcatccttggccaaccgcaacagcatggtgagcagaggcatgacaggaaacataggaggacagtttggcactggaatcaatcctcagatgcagcagaatgtcttccagtatccaggagcaggaatggttccccaaggtgaggccaactttgctccatctctaagccctgggagctccatggtgccgatgccaatccctcctcctcagagttctcttctccagcaaactccacctgcctccgggtatcagtcaccagacatgaaggcctggcagcaaggagcgataggaaacaacaatgtgttcagtcaagctgtccagaaccagcccacgcctgcacagccaggagtatacaacaacatgagcatcaccgtttccatggcaggtggaaatacgaatgttcagaacatgaacccaatgatggcccagatgcagatgagctctttgcagatgccaggaatgaacactgtgtgccctgagcagataaatgatcccgcactgagacacacaggcctctactgcaaccagctctcatccactgaccttctcaaaacagaagcagatggaacccagcaggtgcaacaggttcaggtgtttgctgacgtccagtgtacagtgaatctggtaggcggggacccttacctgaaccagcctggtccactgggaactcaaaagcccacgtcaggaccacagaccccccaggcccagcagaagagcctccttcagcagctactgactgaataaccacttttaaaggaatgtgaaatttaaataatagacatacagagatatacaaatatattatatatttttctgagatttttgatatctcaatctgcagccattcttcaggtcgtagcatttggagcaaaaaaaaaaaaaaaaaaaaaaaaaggagtttgcttttgtcgggagattgaaagatgtttttgtttctttctttgtaaaggccttggatattgaaaaaataccaaggcagaacagttggacaatctatttcttgagccaaatttaattattcttatttttgtaatcagtcattggcttcttatctggatgaaggcttttggaggagaaccaaaacgacaagttccaagaagaagatgaagctccgcctccgccgcttagtcccaaccctgcccaggaagaagggcccgtggggctttgcctgtgcccgtccaccaaaggctgtcatgtgtctcgaaatcagcagccctccccatcccaatcccaggcagcttgtgtgtacaatcagcttctctagcaactctgtatctgttggcttcaagagaatattttgcctccacatatgtaccccttctcctttttttaaagatggatttaaaccaagatgcctccaggaaagaggacgaaatgagtatattcacagaggaatccaaaaaatacagtttgggggaaaatgcaataatttttgatgagatgggtgaaggacaagaagtgagttgtgtcaattattgtagatacaattttctgattaaatctggaaaaataaaaggcagcctgttttttctgcttttattgtattaacagctgaggtagctaaagttatttaaaataaaattaaatttatgatccaagtagcttatttttccctttaaatctcattgtaaatatatttgatttcttgtagaaattgatttccttctgtttaattttatgcttttattatactcttgatttttctaaatttgtgtgtgaaatataacattgattgaattgcagttacatttggttagtaatatttcattattttaataactgtgatgtcatgtatggatttactttggggttcaaatcaaaatgtcactgccagaaagagctgttccagctgatctagagcatactgccctagagtgtccctgggatcatctgaacagaagtgcacaggctacttgtacagagaaaaaattaatactcaaaggaaatcttcattttttagattgactttgggaatttgaattttcatcagtgcaaatataaatttctctatcctgctctgaggctaattggtaccatattttccctttgtgtcttgtgactctgccacatcccatctcatcctggcctctgagtcaagaacccagtgaactgactttctagttctagaagttccgctgcaaggccaggaaagcttgagaaaggtattgtggaagaagcaaaggtagacccccatcactcacctttgtctgcatccctgggcctgtgaatgatgacagcacctgacattctgcaccagctacctctgcctccatggcagagaaaaggccataagaacagtggaagaggagcatggactcagacttcaaggaagaagccatttccccaggtccttccttctgcatctcaccacccctagttacaaataactccattgaacagcatctattcagaaactatgccgaataaaaagattggtggaagggctcatgtggttagcaactatgaaacagaaataggacactcagttacaaacattatctcctttagtttttcagaaaatgcatccctgatttcattcatttccagcttgaaagccagccatattactctagtccctaccaaactgctctagaaggtcatttccattttgtttgtgatatttagacgcgcagacttcaggaagttcacctttaacttcagcattccagatgaagtttcctgactcagtgcttttgcataaggaactagaaaaaaaaagtaaggaaaattggagatgctaacatcctcccccatcccaactgcaccttaaaatatgcatgtcaccttcaaggttttataattgcactgtttgttttatgtatgtacagattaaaattattgctacatttgaggaaaataaaattgcttgcttctatgtaattcctgtcattccacaggaaattcacttttccagctactgaatagaatttgtttaacaacctcatgggttgcctcttcatttacagggaagaaatgaaatgtacatctgcagaaattgccaaagcccaaattaacgagtattataaaaggataataaagcatccctgaagccaaa

SEQ ID NO: 557 - DNA, 7014 bp, Homo sapiens
cggggaccgcgacgagcccgggtcgccgttggcagcagcagcagcaacaccagcagcagcagcagccccggcggcggcgcggaccccgagcgcccgggcgcaccccggcttcccggagcgcgacgcggcggcagcagccccggtgcggccgcgcgcgccttaggctcggccccgcggctcggggaccccgactcccggcccagcgagcgcgtcccccggcgccgcccgagagcccgaggaggcagcggccgcaggcagccggggaggggggcggccaccgcccgcgccgggcatcctcaggagccccagagcgcggagggcgcggcgccgccgagcggtgctggcccccgcgggcctccccggaccttccccaccgcctgggcccgagggacgcgtgatcgggcgggcggccgggcgcaagggtgggagggagccgcccccgcccgcgccccctccgcccctcgccccaacccctgggcgccgggcccgggccgcgcggcctgaagcgcccgcgatggcgagcccgccgcggcacgggccgcccgggccggcgagcggagacggccccaacctcaacaacaacaacaacaacaacaaccacagcgtgcgcaagtgcggctacctgcgcaagcagaagcatggccacaagcgcttcttcgtgctgcgcggacccggcgcgggcggcgacgaggcgacggcgggcggggggtcggcgccgcaaccgccgcggctcgagtactacgagagcgagaaaaagtggcggagcaaggcaggcgcgccgaaacgggtgatcgctctcgactgctgcctgaacatcaacaagcgcgccgacgccaagcacaagtacctgatcgccctctacaccaaggacgagtacttcgccgtggccgccgagaacgagcaggagcaggagggctggtaccgcgcgctcaccgacctggtcagcgagggccgcgcggccgccggagacgcgccccccgccgccgcgcccgccgcgtcctgcagcgcctccctgcccggcgccctgggcggctctgccggcgccgccggggccgaggacagctacgggctggtggctcccgccacggccgcctaccgtgaggtgtggcaggtgaacctgaagcccaagggtctgggccagagcaagaacctgacgggggtgtaccgtctgtgcctgtctgcgcgcaccatcggcttcgtgaagctcaactgcgagcagccgtcggtgacgctgcagctcatgaacatccgccgctgcggccactcggacagcttcttcttcatcgaggtgggccgctcggccgtcacaggccccggcgagctgtggatgcaggcggacgactcggtggtggcgcagaacatccacgagaccatcctggaggccatgaaggcgctcaaggagctcttcgagttccggccgcgcagtaagagccaatcgtcggggtcgtcggccacgcaccccatcagcgtccccggcgcgcgccgccaccaccacctggtcaacctgccccccagccagacgggcctggtgcgccgctcgcgcaccgacagcctggccgccaccccgccggcggccaagtgcagctcgtgccgggtgcgcaccgccagcgagggcgacggcggcgcggcggcgggagcggcggccgcgggcgccaggccggtgtcggtggctgggagccccctgagccccgggccggtgcgcgcgcccctgagccgctcgcacaccctgagcggcggctgcggcggccgcgggagcaaggtggcgctgctgccggcagggggcgcgctgcaacacagccgctccatgtccatgcccgtggcgcactcgccgcccgccgccaccagccccggctccctgtcgtccagcagcggccacggctcgggctcctacccgccgccgcccggcccgcacccgcctctgccgcatccgctgcaccacggccccggccagcggccctccagcggcagcgcctccgcctcgggctcccccagcgaccccggcttcatgtccctggacgagtacggctccagcccaggcgacctgcgcgccttctgcagccaccgaagcaacacgcccgagtccatcgcggagacgcccccggcccgagacggcggcggcggcggtgagttctacgggtacatgaccatggacaggcccctgagccactgtggccgctcctaccgccgggtctcgggggacgcggcccaggacctggaccgagggctgcgcaagaggacctactccctgaccacgccagcccggcagcggccggtgccccagccctcctctgcctcgctggatgaatacaccctgatgcgggccaccttctcgggcagcgcgggccgcctctgcccgtcctgccccgcgtcctctcccaaggtggcctaccacccctacccagaggactacggagacatcgagatcggctcccacaggagctccagcagcaacctgggggcagacgacggctacatgcccatgacgcccggcgcggccctcgcgggcagtgggagcggcagctgcaggagcgacgactacatgcccatgagccccgccagcgtgtccgcccccaagcagatcttgcagcccagggccgccgccgccgccgccgccgccgtgccttctgcggggcctgcggggccagcacccacctctgcggcgggcaggacattcccggcgagcgggggcggctacaaggccagctcgcccgccgagagctcccccgaggacagtgggtacatgcgcatgtggtgcggttccaagctgtccatggagcatgcagatggcaagctgctgcccaacggggactacctcaacgtgtcccccagcgacgcggtcaccacgggcaccccgcccgacttcttctccgcagccctgcaccccggcggggagccgctcaggggcgttcccggctgctgctacagctccttgccccgctcctacaaggccccctacacctgtggcggggacagcgaccagtacgtgctcatgagctcccccgtggggcgcatcctggaggaggagcgtctggagcctcaggccacgccagggcccagccaggcggccagcgccttcggggccggccccacgcagccccctcaccctgtagtgccttcgcccgtgcggcctagcggcggccgcccggagggcttcttgggccagcgcggccgggcggtgaggcccacgcgcctgtccctggaggggctgcccagcctgcccagcatgcacgagtacccactgccaccggagcccaagagccccggcgagtacatcaacatcgactttggcgagcccggggcccgcctgtcgccgcccgcgcctcccctgctggcgtcggcggcctcgtcctcctcgctcttgtccgccagcagcccggcctcgtcgctgggctcaggcaccccgggcaccagcagcgacagccggcagcggtctccgctctccgactacatgaacctcgacttcagctcccccaagtctcctaagccgggcgccccgagcggccaccccgtgggctccttggacggcctcctgtcccccgaggcctcctccccgtatccgccgttgcccccgcgtccgtccgcgtccccgtcgtcgtctctgcagccgccgccaccgccgccggccccgggggagctgtaccgcctgccccccgcctcggccgttgccaccgcccagggcccgggcgccgcctcatcgttgtcctcggacaccggggacaatggtgactacaccgagatggcttttggtgtggccgccaccccgccgcaacctatcgcggcccccccgaagccagaagctgcccgcgtggccagcccgacgtcgggcgtgaagaggctgagcctcatggagcaggtgtcgggagtcgaggccttcctgcaggccagccagcccccggacccccaccgcggcgccaaggtcatccgcgcagacccgcaggggggccgccgccgccacagttccgagaccttctcctccaccacgacggtcacccccgtgtccccgtccttcgcccacaaccccaagcgccacaactcggcctccgtggaaaatgtctctctcaggaaaagcagcgagggcggcgtgggtgtcggccctggagggggcgacgagccgcccacctccccacgacagttgcagccggcgccccctttggcaccgcagggccggccgtggaccccgggtcagcccgggggcttggtcggttgtcctgggagcggtggatcgcccatgcgcagagagacctctgccggcttccagaatggtctcaactacatcgccatcgacgtgagggaggagcccgggctgccaccccagccgcagccgccgccgccgccgcttcctcagccgggagacaagagctcctggggccggacccgaagcctcgggggtctcatcagcgctgtgggcgtcggcagcaccggcggcgggtgcggggggccgggtcccggtgccctgccccctgccaacacctacgccagcattgacttcttgtcccaccacttgaaggaggccaccatcgtgaaagagtgaagatctgtctggctttatcaccaggatgtcacatgtcagagagtatcattaaaagaagacgctcagcactgtttcagcccgaagctgcttgcagttttcttttggatctgagcaatgactgtgtttggaaacatctgtggactctgttagatgaggcaccaacaaggcaaggtcacctgcctctttcccttgttcccggatggggcattcatcattgtgctgtttgcgttttgttttgttttgttttaacaaaattagctgaagaagttattctcaagaaaattggatgttttcattggccttcttaaattgtggccagtgtcttttaatttcttcttcttttccttttggcaaagcagatataaccctcagcatgctaggagagtgcacccgtacctatggaagtggtaaaatctggtatttactggcttacactcaaaacgaccacagtcctacctcagttcaaggtaaagccggatttccgtggcgggggtcccacaggacctcctgtagtagcccctgcgctgtgtgtctggagcgcggtcctcggccttattgaaatggtccaagtagacagctgcttgttggattccagtgcaggtacctgcgatgtttacgtccacaccgagcccagtgtgggactgacatttctcaatggaagtgaaatttgggattggactttgaagacggattactaaataataattattatatgtaactgaagcaacctacttttgaaaatcaactgtattgggtagtgggaggtgggagggaagggctttgggaaggggatgaatatctctttttacctttaacagacttgtttaatcttctcgatgtagatgtttatgtaggtacttcacattgcaaacgccttttattctatttacaagctcagatgtctctgctctcctgaatcttgggcatgcctttctgtaaccaaaaatccctgtaggcgtgctagcaattccagggtggtccgggtttggcagatttgatttttaaaaaacgtattatctttaataaaatgttattatgtcaaccagtgaggctgccctgaacaaaaaaaacaaaaagaaaaaaaaaaaaggaaagaaagaaactgataaaaagaggcattccagcccctatgttattgatggaaaaagaaaaagaagaaaagcaatctcgcagtacatgttacttgtcgaaaaaattccggacaagactacccttgttttatgttttcagtattctgaaaataccagtgtgtggcagttctcgcagatgttacctaaaactgctgaacttgaccggcagaatgttctgccgttttctgctccctcgacacttgattggagggctgtcgacctctcctcccgtgggggcttccccagtgcctatcttctctgatagtcatggagaggttacactaattcattggagatgtaagttgttggttttgttttgttttgtttttagaaaaatatatataaatatataatagatatctatcgctatagaataatgcattaataaaatgaggcttttttagaggaagaccaaaaaattcaatgtcttaaaaatatatttaatggcaatgcaaaagtcttcctgcttccgtgctgaactttagaacagaggattgtattgcaagacaaagttgaatgtaaagtgatctccctgaacatttttaaggttttacttttctgaaattatacatcacagcagtgcataggccatataatgttagctggaaggtcaatttcagtgtatgatatactttattaagatgtataaaaatcctgaagtttttatttagttttgggaataggcatcaatgggtggtatttgctttgtaactccccccaggtacgatagggactgaatatggaccctgctgaaagcagtgtattgacgcatatttaactcgccctctatccgtagagtagtcatgacactatacagatggttcgtgttcatactgcagcttaaaacaagcaaaatacacagatgataatatgctaaattttcctctatcctgtacatttcacaaaaaggcatatgcaatatttacatttttaatttagtttacagaatggaaccaaaatgtataaatgttatgtttgctaaaacttcacaatgtatattgggtctttgtacattttgcctgacttaccttaaatttaaaatattttttgctatataaactttaacagttattaaacagtgttttctttttgggtacgtattgtttctggatatcaagatgttaaatatatttcttgctattgtgatatgacaagagacttaacttatcttgctctgtcttccactgtacacgctgtatataggggtcaatgtgatgctgctggagacgagaataaactggactagaatagtgcattgtatttagtctgtattgatcatggatgccctccttaatagccatatgcaataaaataaagtacattatttatgaaatgaaaaaaaaaaaaaaaaaa

SEQ ID NO: 558 - DNA, 5408 bp, Homo sapiens
gttggctggagagtttgtgaaaagttgtgagccgagcaggaggaagtagggagagaggagttgggctgtgccggaggccgaggaccgagagggctcaggtgacccctggaaagcctgggtggctggaaaggagcctagcgcctgcatgaaaggaagaacctgctgggaagtacctgagctcgagctgtgggttccgccgcccttcccctgcgtggtggcttggtggccgcgtctgcgcctcagccctgagaatccggatggcggtgaggtggacttgggcaggcaagagctgcctgctgctggcgtttttaacagtggcctatatcttcgtggagctcttggtctctacttttcatgcctccgcaggagccggccgtgccagggagctggggtcaagaaggctctcagacctccagaaaaatacggaggatttgtctcgaccgctttataagaagccccctgcagattcccgtgcacttggggagtgggggaaagccagcaaactccagctcaacgaggatgaactgaagcagcaagaagaactcattgagagatacgccatcaatatttacctcagtgacaggatttccctgcatcgacacatagaggataaaagaatgtatgagtgtaagtcccagaagttcaactataggacacttcctaccacctctgttatcattgctttctataacgaagcctggtcgactttgctccgtaccattcacagtgttttagaaacttctcctgcagttcttttgaaagagatcatcttggtggatgacttgagtgacagagtttatttgaagacacaacttgaaacttacatcagcaatcttgatagagtacgcttgattaggaccaataagcgagaggggctggttagggcccgtctgattggggccactttcgccactggggacgtcctcactttcctggattgtcactgtgagtgtaattccggttggctggaaccgcttttggaaaggattgggagagatgaaacagcagttgtgtgtcctgttatagacacaattgattggaatacttttgaattctatatgcagataggggagcccatgattggtgggtttgactggcgtttaacatttcagtggcattctgtccccaaacaggaaagggacaggcggatatcaagaattgaccccatcagatcacctaccatggctggaggactgtttgctgtcagcaagaaatattttcagtaccttggaacgtatgacacaggaatggaagtgtggggaggtgaaaaccttgagctgtcttttagggtgtggcagtgtggtggcaaattggagatccacccgtgttcccacgtgggccatgtgttccccaagcgggcaccatatgctcgccccaatttcctacagaatactgctcgggcagcagaagtttggatggatgaatacaaagagcacttctacaatagaaaccctccagcaagaaaagaagcttatggtgatatttctgaaagaaaattactacgagagcggttgagatgcaagagctttgactggtatttgaaaaacgtttttcctaatttacatgttccagaggatagaccaggctggcatggggctattcgcagtagagggatctcgtctgaatgtttagattataattctcctgacaacaaccccacaggtgctaacctttcactgtttggatgccatggtcaaggaggcaatcaattctttgaatatacttcaaacaaagaaataaggtttaattctgtgacagagttatgtgcagaggtacctgagcaaaaaaattatgtgggaatgcaaaattgtcccaaagatgggttccctgtaccagcaaacattatttggcattttaaagaagatggaactatttttcacccacactcaggactgtgtcttagtgcttatcggacaccggagggccgacctgatgtacaaatgagaacttgtgatgctctagataaaaatcaaatttggagttttgagaaatagagcacaacagcactttcgtcatgagctgacagtagtgtcaagaaagtcaaagagccttaagagcctcagtgaagattgtattttattttatcaaaagccacctagcagtcatctgtggagcactggaaagctggggttcattttggtatatcacactgaaactgggtacccagagtgctgctgtttaatatttcacaatgccttacttattggttgttttatataagagttttgtcaatatggtctcttcttaaaagaagttgactatgaattgaaacacacaaaacatttaagtgccagacttaatattaaagaatgtaaaggtccaagtaaaatgaggtatgatttatgttgatgtgtaagttcaccgcacatcccactttttaacaaaactcatgaatgtgcagtttgagccattgctattttgattacatagaatttgtatttcttttttagccagcacattaaattttagattttattttttaatctaatttttttctaatcaaaaagaaaattgagcttaaggcaaaaggcctggttttagagatatgtgtaattggaagagggcatttgtttgagtgtgagtttggaggcctttttaacatgcagacatacccatatttaaatgaaatggggagatatttacattccgtactttgtaaacttgagctattggacttcactgatgtatatattaatacctcagattcctctgattttgtaagctgtcttctctgtgaacgtgtttgtgtgtgtagggcattttctgattgcacttccttaagttatgaatgtactagaaagggactcatccagaatactatgcctccctttgttaatgcttaatcatttaaagtaaacacaattgaagcctctctgaagttaaacccaactatgtttattaaaatgtgtgaaactgaaagtgggctaggttctaccaaggctgtggaactctcctacgagttctgctgatcaggaaatttaagaatttatcttaaaaatgcaaggaaaaaagactgccttggcaattgtgaatggtgctttcaatctcctagcaccgagcctggcacttaggcagctttcagtaagtgggtgaatgaatgactgaatgaatgaatgaatggctcagctgaggaatgtaactttggtcaagttattatgatgtgtttgggcttagttttctcattggtaaaatgtgggtgctggattggatcttaaagatcccttccagctctgaaatgctgattgtacagtatattcttcccagattgactcactgtgcaatctttacaatactttttatcttttcacttttgacataggtaatgttgttgagcagttgagcaatgttcagtccagttgtgaagctggagaagagaaatgggttttaaaaattaagtgaggggaggccgggtgcggtggctcacgcatgtaatcccagcactttgggaggccaaggcaggtggatcacgaggtcaggagatccagaccatcctggctaacatggtgaaacctcgtctctactaaaaatacaaaaaattagccagctgtggtggcgggcgcctgtagtcccagctactcaggaggctgaggcaggagaatggcgtgaacctgtgaggcagagcttacagtgagccgagatcgtgccactgcactccagcctgggcgacagagcaagactctgtctcaaaaaaaaaaaataataataaaataagtgagctgaactcacctgaagtggtttacttctgtgggttaagaagttctagtcagtgttcatagtcgtttcgttttgataattgttgaaccaattttgtttttaaaacctttagactctgaaagtaatattttgactaagaatgtaaatatttccaaactaaattactcgggaagtaaacgctttttttaaaagtatttttactggttttataccaatattatatgcagaaatcacaggatgaatttagaattaaatctcaattagttcactttggcctagatttatgaaaaatgcatgcctcgtaaagagtccactgtattcacgagtaaagttgcttttagtgttcacttgatgacttggagagtaggaattttgcaaaatctgaatttaaggaaattctttaggataaccatttcaaaaaataaaattgctatgcaatcttgaatattttctcttttgcctcgtaaaatgaaaatgcattcacagtttctgtaaattatttagcagccttaaagtttatcaaaaaattgtccagattccacgtgcagcatgcttggccctgcatttaatttaagaaggattaataataatgctctgaatttttcgaaagggattctcctaaacccacccacttctcttgcccaggctgctttttaaaaatatttttttattttttacttatttttaaattttctctttttatttatttttggttttcttgttagccacctgttatatgggagaacgaaaattgttatattttgaaagtacttattacattatttttattttagtatcttgatgctcctgtcaaaagggaaatgaggcttttaaaaataaagtaccttaattctttattgactttttgccctaaattgctaggtgtgacccagcaatcttttaggaagagattttacagtggtgctttatttatatcaataatccagtatagttaggctgttcattcctcataatagagtacataacagaaaagtgggactttcacattttcatatttaggcacgttccaatttaattccaaaaatactctgtaattctacatctaaaaaaaccgattccctaattcgaatttattggtaccaaagctctctttggctatagacaattaagagttgaccttttaagttaatgtatatgcttaaaaacagttttaggaaaatatttggtagacaaagagtttcaactttaaatgttcactatgtcatttagtgtccaactttacggataggttgactatctaaataggcatttttagtcattaaaaaaaatctagtcaccaggaggatccctataactcaaaataacttgtttgtaaaagaaaatttgtttacttacccattagtaagttcctgcatattcattataagatggcaaatcaaacttttctaggatgaagacagcttatttttaagttgtatagtcttagttggtttagggtctcaattttaattaataaaatacttggtttttatttgcttgtccttttgaattcctgttttaataattttaaaatgagcacaaagaacgttgaagttcagattaatctcttctgaatgatgtttttttcctctgtgatgagttgtttctgacttttttccttttgtatttgtaatgttgattaagatgtaaaataaaaagtgtgcctgattatttttgcaaaaaaaaaaaaaaaa

SEQ ID NO: 559 - DNA, 6203 bp, Homo sapiens
aacagaatcgcgtttggctgtgctggatgtgtgaacctattgggtactgtacaacttcaagcctcgaaatcagataggcaccaccaacctcatttcctgtttcaccttgattttctgtgataccaaaatctcagcttcacaaagtcattgaaagtgttggttcatgaagttttaccatcaattcaagtaatcataaatggcaaattctgcaaaagcagaagaatatgaaaagatgtctcttgaacaggcaaaagcgtcagtgaattctgaaacagagtcttcattcaatattaatgaaaacacaacagcttctgggactgggctttctgaaaagacttctgtctgtaggcaagtagacatagcaagaaagagaaaagagtttgaagatgatcttgtaaaggaaagttctagttgtgggaaagacactccatccaagaagagaaaacttgatcctgaaattgtcccagaggaaaaagattgtggtgatgctgaaggcaattcaaagaaaagaaaaagagaaactgaggatgttccaaaagataaatcttctactggagatggcactcaaaataagagaaaaatagcacttgaggatgttcctgaaaagcagaaaaatctggaagaaggacacagctcaacagtggctgcccattacaatgaacttcaggaagttggtttggagaagcgtagtcaaagtcgtattttttacctaagaaactttaataattggatgaaaagtgttctcattggagaatttttggaaaaggtacgacagaagaaaaaacgtgatatcactgttttggacctgggatgtggtaaaggtggagatttgctgaaatggaaaaaaggaagaattaacaagctagtttgtactgatattgccgatgtttctgtcaaacagtgtcagcagcggtatgaggacatgaaaaatcgtcgtgatagtgaatatattttcagtgcagaatttataactgctgacagctcaaaggaacttctgattgacaaatttcgtgacccacaaatgtgttttgacatctgcagttgtcagtttgtctgtcattactcatttgagtcttatgagcaggctgacatgatgctgagaaatgcgtgtgagagacttagccctgggggctattttattggtactactcccaatagctttgaattgataagacgccttgaagcttcagaaacagaatcatttggaaatgaaatatatactgtgaaatttcagaagaaaggagattatcctttatttggctgcaaatatgacttcaacttggaaggtgttgtggatgttcctgaattcttggtctattttccattgctaaatgaaatggcaaagaagtacaatatgaaactagtctacaaaaaaacatttctggaattctacgaagaaaagattaagaacaatgaaaataaaatgctcttaaaacgaatgcaggccttggagccatatcctgcaaatgagagttctaaacttgtctctgagaaggtggatgactatgaacatgcagcaaagtacatgaagaacagtcaagtaaggttacctttgggaaccttaagtaaatcagaatgggaagctacaagtatttacttggtgtttgcctttgagaaacagcagtgagcacataggcagtagtcccagaggggccgtgttctgtcctgcacaaatttgaacaactcatctcgatatatttgatatttctctgtctgttgattttaattctaaatgtgcaggatgctgccagaaactccaatgtagaaattcaacatttgctgtctgtgacagatgaacttttgcatgtgtatataagaatgagttgggacctctgtctttaaaaatctatttttaggtaatgttctaagaattccatttgcctctatgatcttagctcataaaaatataatatgacttgataaagcaactaaactcttcccacagtgttcagatttgtcctgtgtgtgtttacagtattcaatttattgcagttatagaattggtcagagagcattttcatagtgtgctcatttctatggttttgttatatagcatttttcaacatttaatggtctgtacagttgaatgtaagtgttcaatatgtattgctgaagttataagtttaaaactcaatttcagatgctcataaaagttacttagctaaaattttagcaatttattgcattttgaaataatcattaacatgctgcaattcaggagctggttagaacattttaagtggcagcatagaattttggaattttggggctttcttttcagaaattgctaccatagtaattaatgtttccagttatcaagattgtgattagacacatttacctttcttcattgaacaaatggtgccatagttatttttctcaaaatttagtgaaaatccctcccatgtagacatgttgcacattttttccaaatttatacatggaactgcagtaggaatattctcaccatctgatgccatgtacccacttcagaaataagcaatacttgttcctctgttacaacctcagcactttgcaccgtaggagccattgttaaagttgtcacttgtgtaactgactgcttttccaaaactggtacttacgtgaactgttgtccttgctttacaccaccatttggaaaacttaccagtttttagatgtagatgtagtgaaaaacttcaagaatgaagcagagcaattgagtattcttttttaaattattaagccatgatttacaaaaacattactttctgtaattcacaatacttgttttaaaaacatagtgtcttcattagtgtgcatctattaactgttcatggtgttagagttgcaaactttttagcaagaaaatatggatttcctcatttcagttccttctgcagcctgtgaatctccacaaagtgttaccagtttacaaaaataagtctttttgccttaagtcattttggaaataagtaatactgcatctgactctggtggctgtattagctaggaaaggtttgtaaatggtgtcagtgaggtggggaaaggaagtcttcctgtcacatatgcaggttcgttttcattctagggcagtgccaggaagtatattgatagctttgtaggtacaggaaaaacatcatcattatttcctctgttcacatttactggtcttaattaacaggtaataataatacatgtacttttagcctgaaacctcttccacgccatgggtaacttgggggagagaagaatcctccaaacgatggagtagccagtggtaatacaaagcagggagaacagaaaggtagagttactaaggccttcagtgaacagaaaggagcagagagcaagattagatctgagaagatgctctggggactgagcccactgttgttggtgtcagggaggcttactggagccacacctgcaggcgctgtgttcaggcaccaccttcctccttgagctttgcctgtctcttgccttatcagttcttcctccaccaccctacacccccctccccccggccccaagcccctgtgtctccttgttacaattaagtttctggatattgacttaagaactgttaggaagaggactagaaaaggcttcccctgcctatcctctccgatcaccaaggtggaagggagctagtaggactcttccttgacacaccttgtagtctaaatgttcggtattctattcaggacttacggtaactattatgagggaggcatggctttccaccgtcgggccaggaagagcacctgttgctgcaagctcagtgaagtggggcactcccagacctgccatgcagtttatcctctgagaatggaattggaaatgaagacctaaccagctattggtgggaatgacggaactggggattgcgatgattgatctgggaacatggctggattgtgatttaaccaagaatgctgatgttgaattctttgggcctagaatatacttgagaaagcactagtggcttgtgttcagggagaggagctggcagtttttaaccacttctgtgggagccgtgttctaacctgtggaaagtattgcaattctgtgagagtgactctgcagagtcactgcaccatcaggcttggccctgctgtgccttcagtacccagccaggttctctgggtccagggtgactctccaaagaaattggccttcagctggagaaaacattgggtggagactctcacttatgttaatgcaatcttgaaatgactgaaaggtagattgccagcacagtgagtttcccagcctgctcccccatccacacttggaaattgagggagcatgaccgctctctgacttcacatgttaatagaggatcagagcagagttgggagtatattggtcaggatcatagaaaagaagacaaagcttgctcagccatgagatggccaggtatccagttttgttaactctctttgggaatttctttttcagcctgttttttagcttagtgccattatgtcattttgatttgtattcaagtactcttcaagtatctttgtaatgaaggtttggctacttgtataggtctgcctgcagggtgaaaatgccagtgtgaatattctagctaccaaacattgttttttgttgaaaaactgactttctgttgtctacctcaggccttgtgcatttgggttatctcaagccagtcaccacagagggtctctagggtctgcaaaatagaggccaaatccagggaccaggccctaataatagaagttgtaccaaaatgcctgtggtacttgatggcctgttggtcaaataggaagtacaagtgtgtgatgttagaacctccctagttgctgctatatcaaacactgcacacttgacaagtgttttcattccccgccctctgacagaacaacattcctaattctttgaaggcaaccagtgcaaaggctactacacttgtgtaatgatatttagcagatgcatacaggactggatcccagggcactgtcagttcttccctccctctcgtgctgctcagtttgtcctctgctcccatgtaggcctaaagtcaccccactccttagtgcctgcacctcaccacgatattgaggaagcacaggacatccaagggtactctccagtttggctgtggagacttgagcaagccctaaagtcccctgctccctggacttctcctgggttgtgcttttttgggggcaacataccttggacaaagctgagctgacagctaatgtttattagcctcctacctaagtcagtcactttgctaaattcttcacctgtggtaactcattttgattgttataacatctcagcaccattattcccattttaatgatgaggaaactgagtcatagaggatacagacttgcccaaaggagagccaggattttcacaccccctcctcaagctgggcctgccctccaagtgcttgttatatacctccacgggtgtcagcccagatgactcctcacccatccaccacctgcagcttgagatgttaactattagagctccattcttttggttcaaaacgttgatacttacttagatgttccctgagaggagtgtttatttctgagtaaggggctttgttgaaagagggggttagagagagcaagacagcacttgagtgcactggcaggaagcagagataagacttgaatttcagtttggtagaccaccttctttagcagcccaacctgtagcaaatctagtttagcctgcatggcagggagagggattctcttcccaccctcaccatttgcaagtggcaggagctgagaatgccagtacgagagtgtagccaaagtgagaggctgagagcaaaggagacatttttttcagttttgagtcgagtatccagacagaggcaaatcattttgtttaactttttattaaagtgtaactatagaaacacatcaatgatttttcacaagtggagcacgtgcatacaatcggcaccccagaagccccccgtcagattcccttccagttaactacctctccaagggaaaccactatcctgagttctaagcgcatagattagttctgtctggtttggggagatatataaatggaattatgcattcttcgtatctggtttcttttcaccaatattatgtttgtgagatttttgttgcatgtatttgtacatggattttcattctcatggttgtataatatttcattgtgtgaataaaccacatactgtttatctg

SEQ ID NO: 560 - DNA, 1680 bp, Homo sapiens
aaaaagcggcgcgctgtgtcttcccgcagtctctcgtcatggaatacgcctctgacgcttcactggaccccgaagccccgtggcctcccgcgccccgcgctcgcgcctgccgcgtactgccttgggccctggtcgcggggctgctgctgctgctgctgctcgctgccgcctgcgccgtcttcctcgcctgcccctgggccgtgtccggggctcgcgcctcgcccggctccgcggccagcccgagactccgcgagggtcccgagctttcgcccgacgatcccgccggcctcttggacctgcggcagggcatgtttgcgcagctggtggcccaaaatgttctgctgatcgatgggcccctgagctggtacagtgacccaggcctggcaggcgtgtccctgacggggggcctgagctacaaagaggacacgaaggagctggtggtggccaaggctggagtctactatgtcttctttcaactagagctgcggcgcgtggtggccggcgagggctcaggctccgtttcacttgcgctgcacctgcagccactgcgctctgctgctggggccgccgccctggctttgaccgtggacctgccacccgcctcctccgaggctcggaactcggccttcggtttccagggccgcttgctgcacctgagtgccggccagcgcctgggcgtccatcttcacactgaggccagggcacgccatgcctggcagcttacccagggcgccacagtcttgggactcttccgggtgacccccgaaatcccagccggactcccttcaccgaggtcggaataacgtccagcctgggtgcagcccacctggacagagtccgaatcctactccatccttcatggagacccctggtgctgggtccctgctgctttctctacctcaaggggcttggcaggggtccctgctgctgacctccccttgaggaccctcctcacccactccttccccaagttggaccttgatatttattctgagcctgagctcagataatatattatatatattatatatatatatatatttctatttaaagaggatcctgagtttgtgaatggacttttttagaggagttgttttgggggggggggggtcttcgacattgccgaggctggtcttgaactcctggacttagacgatcctcctgcctcagcctcccaagcaactgggattcatcctttctattaattcattgtacttatttgcttatttgtgtgtattgagcatctgtaatgtgccagcattgtgcccaggctagggggctatagaaacatctagaaatagactgaaagaaaatctgagttatggtaatacgtgaggaatttaaagactcatccccagcctccacctcctgtgtgatacttgggggctagcttttttctttctttcttttttttgagatggtcttgttctgtcaaccaggctagaatgcagcggtgcaatcatgagtcaatgcagcctccagcctcgacctcccgaggctcaggtgatcctcccatctcagcctctcgagtagctgggaccacagttgtgtgccaccacacttggctaactttttaatttttttgcggagacggtattgctatgttgccaaggttgtttacatgccagtacaatttataataaacactcatttttcctccctctgaaaaaaaaaaaaaaa

SEQ ID NO: 561 - DNA, 2650 bp, Homo sapiens
ataatttgtttacatatctatatcttagtctagacatattgaaaggcgatgaagagcagggaaagcactgtattcgctttcttttcttcagcgttcatccagcacagtgcctggcatacggtttgccctcagtaaatgtttattgcatgaacacctcccagcttcgggcaggactgaaatctatccggttaactagtgaattcccagactctccgtctgcgtggcagggacatttaaacccccagcaccgtgattggctccagctgcaggggtgtgtctgtgtccgcggcgaacgggaagtgagcaggcgcgcgggctcggcgcgcgcaggcgcgactagggtgcagcgccaggtccggtgttggggtgtccgagttgccgccggagaggagtggcctcgcccgcttgagttttgattcatcatggataatctgtcatcagaagaaattcaacagagagctcaccagattactgatgagtctctggaaagtacgaggagaatcctgggtttagccattgagtctcaggatgcaggaatcaagaccatcactatgctggatgaacaaaaggaacaactaaaccgcatagaagaaggcttggaccaaataaataaggacatgagagagacagagaagactttaacagaactcaacaaatgctgtggcctttgtgtctgcccatgtaatagaacaaagaactttgagtctggcaaggcttataagacaacatggggagatggtggagaaaactcaccttgcaatgtagtatctaaacagccaggcccggtgacaaatggtcagcttcagcaaccaacaacgggagcagccagtggtggatacattaaacgcataactaatgatgccagagaagatgaaatggaagagaacctgactcaagtgggcagtatcctgggaaatctaaaagacatggccctgaacataggcaatgagattgatgctcaaaatccacaaataaaacgaatcacagacaaggctgacaccaacagagatcgtattgatattgccaatgccagagcaaagaaactcattgacagctaaagctactgctgttcttctttatcatttattcacttccgtagctcctccttgaaagttattaccttttcagagtttaagttttcggttccacgctcttctaattgggagataatatggaagaagggccagagcagttacagccctccttcttttttgttttctgttgagggccgactgctgctctgccttccttctagtattttctttctcaattcatacgcttagattggttttcatatgtcatgtttagtgttttcatcctcctcatatacttcagcaggttcttttgctttcaagatttggaagcattgccaaagacagccatgaagaaggaagctgtagaggtgttttttgttgttgtttatttttgcttttgtggttgagggaaggacaagagataagaggttgttacctcagtaaaaaccttcaggccacaaagcaaaaagttgcatagccacaacgaagatctagttggatatagtttttgatttaagttgcagttatagccaatttaggctaatgcttggttttggagcttttatacacaacgtttttgttaggcatcacagttttgcaacctctgctccaaagagaaaaatagaatgagttttctttcttttttttttttttggagtcagagtctcgctctcttgtccaggctggagtgcaatagcgcgatctgggctcactgcaacctccgcctccctggttcaagcaattctcctgccttgcctcctgagtagctgggattacaggcgtgtgtcaccacgctcggctaatttttgtatttttagtagagacagggtttcaccatgtcaagctggtcttggactcctgacgtcgtgatccacccgccttggcctcccaaagtactgggattacaggcgtgagccactgtgcctggctgagttttcttaaagtgagcttaatttctgaactcttagtgattcatatatgtacataaatctgtgatcccatttcttattgcaccattcaggaacactttatataaatgagtggctttttatttcatattattagtagtatcatggttccattacaggcctattaacatcatacattgtcattagtctttgaagaaaaaatatgtaaatatatatgtgtaacatgagaatttctctctaaagcagggcttaaaattttttggaaaagtttgacaaagcataccacatgaattcagatttacctcaatgctaagaattatgtttagttaggaaaaaggaaagtcattttgacctcaggtagaaaaatagattgctttgagttttatgtagctttagactttaaaaagttagaatttattctgtaactaaaaattatttgaaaaaattatgcctctggtttaattattggtgattacacactctttctcttacccttgtgtattgaactatgtccataatcaagttgatgtggatcctgaaaagtgttatgaacatctgattggtatttgtcacatttattttaaaattagcatctgaacacttcaaagctgtcagtgtgtattggtttcaccaataaccactgcttgatccttacaattaaattttttaactaactaaaaaaaaaaa

SEQ ID NO: 562 - DNA, 4035 bp, Homo sapiens
aacaacaaccaccacaaactccgaccgtcctttccaggccctttccctctataaacctgccgttttctgtctcccaagtcatcccagtttagaactgctccaggaaataatgaatgaacagagagagcctagtttgtttatttatttacaatccactagtctaatctagtttagatccagcggcaatttttggggtgccaaggaggaaagaaggagatggcagtgcggggacagggcagagcctgggccaaaggaagccacacccagttcttgccctgccctgcccgacacaggcaacgtgaccccaagcgacagccagctgatgcttgcttctccgagcccggcggtcagcagccggaagtagcccgcccgggggcggggaaaggtgccttaaggaggagctaggggcgtgcggccaattgcaagcgactgtcctagcgaagagggcggaagaggagagatccagttccggacgcggccgccgccgtcgccgccatctgtcacctccactccggcatcagcagccagtcgcccgtgtcccgcctgtctcctcggcggagcctgctgcccgtcctgccacctctctgctctgttcttgtctctgccttcattcccgaatggatctggtaggagtggcatcgcctgagcccgggacggcagcggcctggggacccagcaagtgtccatgggctattcctcaaaatacaatatcttgttctttggctgatgtaatgagtgaacagctggccaaagaattgcagttagaagaagaagctgccgtttttcctgaagttgctgttgctgaaggaccatttattactggagaaaacattgatacttccagtgaccttatgctggctcagatgctacagatggaatatgacagagaatatgatgcacagcttaggcgtgaagaaaaaaaattcaatggagatagcaaagtttccatttcctttgaaaattatcgaaaagtgcatccttatgaagacagcgatagctctgaagatgaggttgactggcaggatactcgtgatgatccctacagaccagcaaaaccggttcccactcctaaaaagggctttattggaaaaggaaaagatatcaccaccaaacatgatgaagtagtatgtgggagaaagaacacagcaagaatggaaaattttgcacctgagtttcaggtaggagatggaattggaatggatttaaaactatcaaaccatgttttcaatgctttaaaacaacatgcctactcagaagaacgtcgaagtgcccgcctacatgagaaaaaggagcattctacagcagaaaaagcagttgatcctaagacacgtttacttatgtataaaatggtcaactctggaatgttggagacaatcactggctgtattagtacaggaaaggagtctgttgtctttcatgcatatggagggagcatggaggatgaaaaggaagatagtaaagttatacctacagaatgtgccatcaaggtatttaaaacaacccttaatgaatttaagaatcgtgacaaatatattaaagatgatttcaggtttaaagatcgcttcagtaaactaaatccacgtaagatcatccgcatgtgggcagaaaaagaaatgcacaatctcgcaagaatgcagagagctggaattccttgtccaacagttgtactactgaagaaacacattttagttatgtcttttattggccatgatcaagttccagcccctaaattaaaagaagtaaagctcaatagtgaagaaatgaaagaagcctactatcaaactcttcatttgatgcggcagttatatcatgaatgtacgcttgtccatgctgacctcagtgagtataacatgctgtggcatgctggaaaggtctggttgatcgatgtcagtcagtcagtagaacctacccaccctcacggcctggagttcttgttccgggactgcaggaatgtctcgcagtttttccagaaaggaggagtcaaggaagcccttagtgaacgagaactcttcaatgctgtttcaggcttaaacatcacagcagataatgaagctgattttttagctgagatagaagctttggagaaaatgaatgaagatcacgttcagaagaatggaaggaaagctgcttcatttttgaaagatgatggagacccaccactactatatgatgaatagcactaatacccactgcttcagtgttaacacagcagtgattgtcagctgccaatagcaaatgaagttatgggtgacttgaaataccaaaacctgaggagtgggcaatggtgcttctgtgcttttcccccttgtaacccatgtgccagatgtgtggaatttttagctcagcattgagagaataaaatgtcactacctctcatcttatgaacaggataatataattctttaacagctataggttatctggctgaagtagacctaattttatgtgacttgtggtgtaaaatgtcttgatgataatttttaaaacttgggtaacacttccaaatatgggaggaaaggacagatgtgtttacaagggaggattttacaacatacttgctttattcacctccctgttttgtgttgcgtctttccttgaatattttattggcccagagttagcctttctcaattatgtttccagactgtggccgtgattctaaaggaaaatgtgtgctctttagtgggtagaacaaatggaaatttggtttcagaatggctgacagaaatcgacataagtcatgtaatttttgttgatatatcatgaaaatgaacagaattctttttccatacttatatctaagaaaaggcatcataggtttctgaaagagataactatataacagctttttaactatccagtcaactttcagcttttctacatttaggtaaaatggttaggatataactcatggtgtggctaatctacatttatcaataaaatgtaaattatctgaaaggacagaatataagatttaaccatgtttgacgtattttaatttagttaatgaagcaaaattcagtttatatttcactagaactgtgtacttgattgattttcagagaaatatcacaaattagaaatattaaatctaaggatgaaaggtatatataaaacaatttgggggccaggcacgatggctcaaacctgtaatcccagcactttgggagaccaaggcgggtggatcacttgaggtcaggagttcaagaccagcctgggcaacatggcgaaaccctgtctctactaaaaatacaaaaattagccgggtgtggtggcacttctctgtaatctcagcttctcaggaggctgagacaggagaatcgcttgaacccgggaggcagaggttgcagtgagctgagatcatgccactgcactccggcctaggtgacagagggaaactccatctccaggaaaaaaaaaaaaaaacccaatttggataccaaattaatcaactaatttgagctatctggccttactcttagtagtttttagtacgtgctggacaccacttttaaaaagcaatcactgtgctagaaaagtatattggctttgttaggattaaagttcattaacttcaatgtaatcatgcctcctattactgaagtcagattggaaccactaaagatccaaactttctgtctggtaatagaaagtaaaaatctagacatcatttacatttgagaaagctgtttttaacattattttaaaatgccaaatatgttctttctagaaaaatatttatttttgtttttgttggatagcttttaattacatttcagagaggtgtaattttgggtagatgctcattacatttttgaaaggtttatgattccaaaataaagatttatatgactggtgatactggctttacagaaatttcagagaactaatttttaaaatctttagcatttaaaactttttttgttttgttttctgacatattctgacaaagagcagcaaaccactgctgtgtggcattcttggagtgtgctgtgaatgtgctttttaagaaattaaaaagagatcattttaaaa

SEQ ID NO: 563 - DNA, 2363 bp, Homo sapiens
ctgccccgtgccgagtttcctgtttaagatggcgtcccccgtagcagcgcaggccgggaagcttctgcgagccctagcgctgcggccccgcttcctggcggccgggtcccaggcagttcaattaacctccagaagatggctgaacctgcaggaataccagagcaagaaactgatgtctgacaacggagtgagagttcaaagattctttgtagcagacactgcaaatgaagctctcgaggctgctaagagactaaatgcaaaagaaattgttttaaaagcccagatcttagctggaggaagaggaaaaggtgtcttcaatagtggtttgaaaggaggtgttcatttaacaaaagaccctaatgttgtgggacagctggctaaacagatgattgggtacaatctagcgacaaaacaaactccaaaagaaggtgtgaaagttaacaaggtgatggttgctgaagccttggatatttccagagaaacctacctggcaattctgatggaccggtcctgcaatggccccgtgctggtgggcagcccccaggggggcgtcgacattgaagaggtggctgcttcaaacccggagctcatttttaaggagcaaattgacatttttgaaggaataaaggacagccaagctcagcggatggccgaaaatctaggcttcgttgggcctttgaaaagccaggctgcagatcaaattacgaagctgtataatctcttcctgaaaattgatgctactcaggtggaagtgaatccctttggtgaaactccagaaggacaagttgtctgttttgatgccaagataaactttgatgacaacgcagaattccgacaaaaagacatatttgctatggacgacaaatcagagaatgagcccattgaaaatgaagctgccaaatatgatctaaaatacataggactagatgggaacattgcctgctttgtgaatggtgctgggctcgccatggctacttgtgatatcattttccttaatggtgggaagccagccaacttcttggatcttggaggtggtgtaaaggaagctcaagtatatcaagcattcaaattgctcacagctgatcctaaggttgaagccatccttgtcaatatatttggtggtatcgtcaactgtgccatcattgccaatgggatcaccaaagcctgccgggagctagaactcaaggtgcccctggtggtccggcttgaaggaaccaacgtccaagaggcccagaagatactcaacaacagcggactccccattacttcagccattgacctggaggatgcagccaagaaggctgtggccagtgtggccaagaagtgatgtctttgtcctgatccaatggagaaagaaagccatttttccgtaaaaagggatggttcatcattgtgaaagaaatggttatctcattggggaagaaaaggggagggggaaggcaagaatcactgaaaaatcttaaatctgtgttttctggaataagatatctagacagcctaaatctgattttggtctttataaaaataatatcttgtgttctcatacttttctgtcactgtaagcctgcccagtaggcagtgttttgcagactttggggagtggtctatgtggccaaatattgtgtgtatagacagaatttgaaatcaagtcctgcttcatttacaagaattttggtgggcatctaatcctacataatgaaaaagaaaaacagaccatttaaaaactcagacaagattatatttaatatattaattactaaaaaggcataagattacactgaacatattagctactaaaaaggcactgctaagacattcaagcaaatagctattacacactactgcagattttacaggtttctaattctaacatatgtttgaaaaatccgtgagtattccaaaatatatttaataatggaatatctgcattaatataccatccatgtgtttttaccatttgccttaatattgaatatactgtttacctcacactaaaaagaaaaccagaagccttatttgtgattttgggagtggaagcttccatttttgtgtcaaaaatgaatcctgattcttatggaaatctctgttattaagatatttcaagatgagacaacactgaagatcaaattgtgtttagtatcactatcttctctcctcgtttctctcttactcctcatcctcccagaatctaccagtttatggtagaaagatgggaaccttatttgaatgtgttttttttttccatgatgtccaattttgttgtgggaaaggatttggataaaatttttgtttaaattttggtagatttttatctatacaaatttaaataaaattatgttttgtaagctgtaagaaaaaaaaaa

SEQ ID NO: 564 - DNA, 2592 bp, Homo sapiens
aggcgcatttccaacgcttggaggagagggcggggtgtcgtttcctttcgctgatgcaagagcctagtgcggtggtgggagaggtatcggcaggggcagcgctgccgccggggcctggggctgacccgtctgacttcccgtccgtgccgagcccactcgagccgcagccatgtctggggacgagatgatttttgatcctactatgagcaagaagaaaaagaagaagaagaagccttttatgttagatgaggaaggggatacccaaacagaggaaacccagccttcagaaacaaaagaagtggagccagagccaactgaggacaaggatttggaagctgatgaagaggacactaggaaaaaagatgcttctgatgatctagatgacttgaacttctttaatcaaaagaaaaagaagaaaaaaactaaaaagatatttgatattgatgaagctgaagaaggtgtaaaggatcttaagattgaaagtgatgttcaagaaccaactgaaccagaggatgaccttgacattatgcttggcaataaaaagaagaaaaagaagaatgttaagttcccagatgaggatgaaatactagagaaagatgaagctctagaagatgaagacaacaaaaaagatgatggtatctcattcagtaatcagacaggccctgcttgggcaggctcagaaagagactacacatacgaggagctgctgaatcgagtgttcaacatcatgagggaaaagaatccagatatggttgctggggagaaaaggaaatttgtcatgaaacctccacaagtcgtccgagtaggaaccaagaaaacttcttttgtcaactttacagatatctgtaaactattacatcgtcagcccaaacatctccttgcatttttgttggctgaattgggtacaagtggttctatagatggtaataaccaacttgtaatcaaaggaagattccaacagaaacagatagaaaatgtcttgagaagatatatcaaggaatatgtcacttgtcacacatgccgatcaccggacacaatcctgcagaaggacacacgactctatttcctacagtgcgaaacttgtcattctagatgttctgttgccagtatcaaaaccggcttccaggctgtcacgggcaagcgagcacagctccgtgccaaagctaactaatttgctaatcactgattttgcaaagcttgttgtggagatgtggctggacaggtttgccatcagagtggatataccgttgtattaaaaacaagataaaaaagctgccaagatttttggcgagtggttggtctgaagtccttgcaagacgctgatgctcaagctgttgacatactcattgcctactttaacacctgtcagagaaacgtgatatggggtaaggaggtgcttttttaaaatcgttcatagacttctgtaaaatgcaagataaattaaagttattataacagtgattctttcaatttggtttgtccttcagttttcttttctataaatgtgcttggtgaaatcagcaagaaaccaaccatataaaacagtgtgtgccgggctctgactgagaaactgaacaatggcaggcgcttcatctgggcagccatttttcttctctgcttctcttgagatacatagttaaagtagacacggcctcccacgcgagtgtggtgggaccttgagacttaggaggattgcctgttttcagtgtccagggaatgactccatagatttgaattcttttccgtatgtggggatggttgctactacctcaccgccaagtcctcccccagctgttaccacatgagggaatacaaggtgctaggtaccctccttcctcgttggccactaagaggtcttagaaacatagcctgtaaatgtgtcttgtaactggcacactaaaaaagatcctagttgagcatctctcttggtgaggaagcgatgtgtgtgcggttcaggaaactcctccaagaggaggaggagtccaaacagggatgccagaggaagctttccgttttcctagccaacttgtgttctgggtttgaaaaagacccaccacaaatgctttttctattttctgatttaaaagtcgcttttgaatatgaccatgagaaaccaagaaatgctgcttgtgtggtgctctgcttcctgaggatttggctggaaggggattctccgctggcacatgggagaaggccatcttctgtgtcggtgctgtgatctgccttgttctcacttgctgaggataagggcatacacgctgctcctcgctttcttgttgcccgacttcgtactaagcagctcaggagcagtcactcagacccaaatgtcttgactgtgttgtttttaatcactgtgacccttaaagtacaggccaagtgttgtcaaacaccttggctaaaacagtggagggtgatgggtaaagcagtagagggccctcaacccacacactggctgaaactgccaccaactgccacgatgaacccaactgctgtttatgcccccattttcctttttttgtatctacacccacacgattcccaatgttggatatttctacatgaataaagcaaggatcagtgcctcttatgtaa

SEQ ID NO: 565 - DNA, 5190 bp, Homo sapiens
gggggcgtggccccgagaaggcggagacaagatggccgcccatagcgcttggaggacctaagaggcggtggccggggccacgccccgggcaggagggccgctctgtgcgcgcccgctctatgatgcttgcgcgcgtcccccgcgcgccgcgctgcgggcggggcgggtctccgggattccaagggctcggttacggaagaagcgcagcgccggctggggagggggctggatgcgcgcgcacccggggggaggccgctgctgcccggagcaggaggagggggagagtgcggcgggcggcagcggcgctggcggcgactccgccatagagcaggggggccagggcagcgcgctcgccccgtccccggtgagcggcgtgcgcagggaaggcgctcggggcggcggccgtggccgggggcggtggaagcaggcgggccggggcggcggcgtctgtggccgtggccggggccggggccgtggccggggacggggacggggccggggccggggccgcggccgtcccccgagtggcggcagcggccttggcggcgacggcggcggctgcggcggcggcggcagcggtggcggcggcgccccccggcgggagccggtccctttcccgtcggggagcgcggggccggggcccaggggaccccgggccacggagagcgggaagaggatggattgcccggccctcccccccggatggaagaaggaggaagtgatccgaaaatctgggctaagtgctggcaagagcgatgtctactacttcagtccaagtggtaagaagttcagaagcaagcctcagttggcaaggtacctgggaaatactgttgatctcagcagttttgacttcagaactggaaagatgatgcctagtaaattacagaagaacaaacagagactgcgaaacgatcctctcaatcaaaataagggtaaaccagacttgaatacaacattgccaattagacaaacagcatcaattttcaaacaaccggtaaccaaagtcacaaatcatcctagtaataaagtgaaatcagacccacaacgaatgaatgaacagccacgtcagcttttctgggagaagaggctacaaggacttagtgcatcagatgtaacagaacaaattataaaaaccatggaactacccaaaggtcttcaaggagttggtccaggtagcaatgatgagacccttttatctgctgttgccagtgctttgcacacaagctctgcgccaatcacagggcaagtctccgctgctgtggaaaagaaccctgctgtttggcttaacacatctcaacccctctgcaaagcttttattgtcacagatgaagacatcaggaaacaggaagagcgagtacagcaagtacgcaagaaattggaagaagcactgatggcagacatcttgtcgcgagctgctgatacagaagagatggatattgaaatggacagtggagatgaagcctaagaatatgatcaggtaactttcgaccgactttccccaagagaaaattcctagaaattgaacaaaaatgtttccactggcttttgcctgtaagaaaaaaaatgtacccgagcacatagagctttttaatagcactaaccaatgcctttttagatgtatttttgatgtatatatctattattcaaaaaatcatgtttattttgagtcctaggacttaaaattagtcttttgtaatatcaagcaggaccctaagatgaagctgagcttttgatgccaggtgcaatctactggaaatgtagcacttacgtaaaacatttgtttcccccacagttttaataagaacagatcaggaattctaaataaatttcccagttaaagattattgtgacttcactgtatataaacatatttttatactttattgaaaggggacacctgtacattcttccatcatcactgtaaagacaaataaatgattatattcacagactgattggaattctttctgttgaaaagcacacacaataaagaacccctcgttagccttcctctgatttacattcaactctgatccctgggccttaggtttgacatggaggtggaggaagatagcgcatatatttgcagtatgaactattgcctctggacgttgtgagaattgtgctttcaccagaatttctaagaatttctgctaaatatcacctagcatgtgtaattttttttccttgcctgtgacttggacttttgatagttctataagaataaggctttttcttcccttgggcatgagtcagatacacaaggacccttcaggtgttactagaaggcgtccatgtttattgttttttaaagaatgtttggcactctctaacgtccactagcttactgagttatcaggtgcaggtcagactcttggctacagtgagaggcagcttctagacagagttgcttaatgaaagggtttgtaatactttacaaaccattacctgtacctggcctggcctccaaaatattaacattctttttctgttgaaactcgcgagtgtaactttcataccacttgaatttattgatatttaattatgaaaactagcattacattattaaacgatttctaaaatcaaaacatacttaatctgataccaaggaagggagggagtggttataagcaaatgaaaacaaattttgagagacagagcaaaagtaaaatcattctatagaaaaggtgtgtttatttcttaactcttgagttcttttaaaattagaacctaaatgatgcagtcaggggtatgaccaattccacatgagtgtcacctgtacattttattaccactacctccagtttccaaggcagggaagaagaggggaatagtcaaagcaatatgactagctaggtttgggctgctgtttgggctgctgtttttcctggacttttatgccaaactacataaatacttcttggaattcctgatttacgctcaactttgatccctggaccctagggccattagtttccttgaagcagtcctgctggtggatgagcagggaaacttgtagaccctgggaagccaattggtagagggtgcctgcccgccccatcagactgtcccaactggggtgggggtgaggatcatagtgatttctttttaaaagctagtatgactagtgagaatggatgtccaagggcttttctcttcctcccccgagtccacgattcttcatttgtgatcagggttggggtaacttcaccttggtgatcatatattctttttacaaaccaatccagccaagatatatgtgcttttctaaacagcttgtaaaagcaaaaacacaatgtatacacatataaaactgatttttttttttttgcttatatactttgctcaggtggagaacaaggtatgaaagccattatatggtgtcccttggggaccatcccataagtccagggtgttcccaatatacccacaagacaacatgttcaaaacttcatcacctggtccccacaaacctaccaccctcttccattccctcactctggtaaaagcaagccatcttctccagttacgcaaggcagaagcccaggagtgagcacaatgctgccctttcccttgcttctgacttctcatcaatcctattagaactactgactgcaccccacctctcctccatccccacgatcactgccttcatatgaactgcctttcctgtcctctggactttcagtggcttccttttttgctcacctgtccactttcttccccttccctctctccatccctccacatagtcatcagaaagatcatcaaaacaggcaaatgtgactgtattatttccctcacttatctttgtatgcagtttagagtgatttttaagagcacacactttgaaattaggagaacctgtgtctgaatcctgatttttgccatttgtgtgacttgtcaggttatttaatctctttgagcctgtccctcctcagtgaaataggaataataatacctacctcatagagttgttgtgaggattcagtgagatagactgtttctaaagtgtgtagcacagtgcctggcacatagtgggtgctcacattggagcacactattgtcgctatccctgcaggtgtgagttttacatcctttccaagaggcatttgctaataaccctaactaccgcctatccctgtgacactattttctgcctcagcaccctatttcttttgtagacattttctaagtctgtattttatttatttgttggctttttgtctatttctctactagaatgtaagctccatgagagcaaggatgtgtttgtctgatttcccgttacagccccagcacttagctgagtgactggcacctagtaagcactcagtaactgtttgctgaataaatggaagaatggtcaaaaggctcttcttgatctgatccctgcttgtctgtctggcctcatgctgccactattcctcactgcaccttcagctcaagaaaaacctctttacttgcttctttgaagtgccccttgggcctctgtgtctttgtacctgttgttccctttgcctgaaacaccctttgcctgcccgtctacatggtgaattcctaatcattgatgaagtctcagctcaatggctacctcctctgtgaagctgtccctgatttcttcaggcagatgttctttcccgccttccctgttcccaccgcactttgtaaatacctccatggaagcactttattgtattgtattgtaatttttttttgcatgtctgtttctactattagactgtaagcaccgtaaaagcagagattgtgctttttcatcctcatgttccccgagcctagcccagtgcctggcacgtaatagcttgtcattaaatatttgttgaatgaatctgtgaatgaacaagagtcatgcagttggaaaagtgttagaagctgtatgtattataaaggaaagaaatgcccttggtggcttccagggtgtttttttttttttttttggtctaaagaggagatctagagagtgttatacaatctctttgaatataagattactcgtttggatttttaaaataatatagatcttcataaataattgcaaagatataaacaagctttgtgatttctcaaatgctatgaagtccaaaataaatatttgcactattagtatttccatagtaaatgctatgagaaaatgtacagcaataaattttgaagctttaaaactgttaa

SEQ ID NO: 566 - DNA, 4447 bp, Homo sapiens
tgccatgttggattgtgcggccgccgccgccgctgcgggagggttgggggaggagttgggagtttagcgcagtcgccggagtgcgaggacaacgaccatccggccctagcctggccgggcgggtgccgggagcttccctttctcagcgcggcgcgaaggtggctcgccgtcagcgcctgcttccctcgacctcgtcctcctccccgctccggaggagctgcgagatgtggcgcctctgactccacttctccccgcccctgtcaccgagagggggaacgagctctcgcccactcgccggaggagacggccctggactcccaaccccgccggcgaaaccatgagctccgtccagcagcagccgccgccgccgcggagggtcaccaacgtggggtccctgttgctcaccccgcaggagaacgagtccctcttcactttcctcggcaagaaatgtgtgactatgtcttcagcagtggtgcagttatatgcagcagatcggaactgtatgtggtcaaagaagtgcagtggtgttgcttgtcttgttaaggacaatccacagagatcttattttttaagaatatttgacattaaggatgggaaactattgtgggaacaagagctatacaataactttgtatataatagtcctagaggatattttcatacctttgctggagatacttgtcaagttgctcttaattttgccaatgaagaagaagcaaaaaaatttcgaaaagcagttacagaccttttgggccgtcgacaaaggaaatctgagaaaagacgagatcccccaaatggtcctaatctacccatggctacagttgatataaaaaatccagaaatcacaacaaatagattttatggtccacaagtcaacaacatctcccataccaaagaaaagaagaagggaaaagctaaaaagaagagattaaccaaggcagatataggaacaccaagcaatttccagcacattggacatgttggttgggatccaaatacaggctttgatctgaataatttggatccagaattgaagaatcttttcgatatgtgtggaatctcagaggcacaacttaaagacagagaaacatcaaaagttatatatgactttattgaaaaaacaggaggtgttgaagctgttaaaaatgaactgcggaggcaagcaccaccacctccaccaccatcaaggggagggccacctcctcctcctccccctccacacaactcaggtcctcctcctcctcctgctaggggaagaggcgctcctcccccaccaccttcaagagctcccacagctgcacctccaccaccgcctccttccaggccaagtgtagcagtccctccaccaccgccaaataggatgtaccctcctccacctccagcccttccctcctcagcaccttcagggcctccaccaccacctccatctgtgttgggggtagggccagtggcaccacccccaccgcctccacctccacctcctcctgggccaccgcccccgcctggcctgccttctgatggggaccatcaggttccaactactgcaggaaacaaagcagctcttttagatcaaattagagagggtgctcagctaaaaaaagtggagcagaacagtcggccagtgtcctgctctggacgagatgcactgttagaccagatacgacagggtatccaactaaaatctgtggctgatggccaagagtctacaccaccaacacctgcacccacttcaggaattgtgggtgcattaatggaagtgatgcagaaaaggagcaaagccattcattcttcagatgaagatgaagatgaagatgatgaagaagattttgaggatgatgatgagtgggaagactgatctatatattatatatatatatatatttttaaggtgaaatactaaacactactttctgtctgtggattctgtaaaattatcatgtaaatgttctaccaatttgctgtatatttttgttgccttttttgcttttttttaatctgtgcaatacctcatttaatctgtaaaggtttgtcgtaatcctctacaaagctactccctgttattgtgtgcaagtttacaccaggatgctcacttgatttgtgaatatttttcattccatcaacaagggagtttaaatactatatgtgagactgacaaaaaccttaatgtaatttacttataatgccagaaggaaaacactattttcataccctactttttctgtacctaaattttcttaaaaaaaaatctagtatagcactacattcttttttaagtgatgcagaccttagtttctttagcccctttattttgaatacaatgctacatatgaatgttgaagctgatacattgcacagttctgtagacatcactacaccgatgtagtttctcaaattttagcaatatgctctacataaaatcactacagagatactagtggggaagacgattaacacacctcttacagtaatactgcctgttattggtatagcagtggtatttgcagactgggatcataaggagcccttaaatacttgttattgactggggttatttttatgctgtagcaaatgtgacaggctctttttagcaaaatttttgaaaatttttttggtattactctgaaacaaaatttaagttggagtttcagggatttagggagtagttttcattctacatgaactgaggtaatattatggtaactccaatatttggttaaaaaaactatacaaatcagaatagtactaaaatactgtagaattttagcatttttattttgcactttgtgtggattgaggtgttcagaaataccaaccataaaaatgtaatctagttggcaaaggtgtgcgctaaaacacggaaccgaacatgcattgatttggataacttttgagggtttttgtcaaatagcatgtgaagagttacatttttcttaaaagattggtggtcccaatgtcagagttcttggaacagataactgaatgatagattttttttttttaaagataaaactttacaacctgcacatttgttatgcatactaaatggtgtgttaaaattagggtttctttgcctctctacactacactaatctgcctaaaggtggttgtttcatatttataatgctaattatcatacctacctactttaaattttaggtagaaaattatctgatttaaatacaaacatatttttctcacattgagtaatatgcataatgtagttccaaatgtatttcattactatagtcacaatatccaactaaaaattacgctatctagaattgtaccaaccaaaatctcgtattggcagatcttgacaggctggacctgcaagatgtggcttgaattttaaccatttattacataatctctagtgatcatgcatctagttatcataagaaataatttaaaaggttttgttgctgaaagcagtaagtggtgcagtaaaatacttaagttattcaaagaatgttatctttcttgcaagagtaatttaagcacatgggaaagattctagactttttgtttcttgcaacaacagtgccctctgctgctagaaacctttttctacttactatcatttttattgtggcttgagctcagtcaatctggtgcagatgaggctggacaactactaaccaataaaatcaggagtttgtacaaaagttaaatggaacattataattattttaagtaatgttaattgaaaaaattttttctttttgacaatataaaaaacattttaaatttcctagaaatgtcttcagggtaatgccaatttaagatctctcttaacttgtggccaagaaattctagattttccagctgactttggtataatatatatttatcaggaacttctctcagcagagagtacccattcttcgagttcaaagcacaattttaaacatgtaaaatggatatataatttgccaaaggtaattaatttattctttttttcttaaagaagaaaaagacattggttgttgttacaaaaagtctaaattactgttggttgaaacacagcagctgtggagttcagtccaggcatgaagactaaatctgctttaccaagtaaggtgtaaggttgcatgtttcagtcctctaccatcctgcactgtgagcagcactatacctgtgcgttgtctgaaagccttccgtatattctccagctaaatggtcgtctggtagcctttgcatttaacaaactagcatgaggctttttatatctaaatgctacgtgatagacaatttcagctagccacatattgtatgtatgagattcataaagactttcaatcatttcattttcagacaactgaaattttgtttagtatgtgaattctttttttgaaatgtatagtgaataggatgttgcactggtggcaattcatcatggagcataataaaattaatttgacccaaatagaataaaataatgtgtttc

SEQ ID NO: 567 - DNA, 5639 bp, Homo sapiens
cttgcgcaggcgtagtgctcctgcttcctggccgagggcgggcgagcggagcctgctttcgcagcgatcgcgagcgtgtggcgattgcttctgtctgttatttagatatggaagctgaggggatgcacagaggcagccagaacctaggtcagggtctcgctcggtgctgaccgcccccggggtcgagtaggcgatgggggagcccggcttcttcgtcacaggagaccgcgccggtggccggagctggtgcctgcggcgggtggggatgagcgccgggtggctgctgctggaagatgggtgcgaggtgactgtaggacgaggatttggtgtcacataccaactggtatcaaaaatctgccccctgatgatttctcgaaaccactgtgttttgaagcagaatcctgagggccaatggacaattatggacaacaagagtctaaatggtgtttggctgaacagagcgcgtctggaacctttaagggtctattccattcatcagggagactacatccaacttggagtgcctctggaaaataaggagaatgcggagtatgaatatgaagttactgaagaagactgggagacaatatatccttgtctttccccaaagaatgaccaaatgatagaaaaaaataaggaattgagaactaaaaggaaattcagtttggatgaattagcaggtcctggagctgaaggcccctcaaatttgaaatccaaaataaataaagtgtcttgtgaatctggtcagccagtgaaatcacaggggaaaggtgaagtggccagtacaccctctgacaatttggatcctaagttgactgcccttgagccaagtaagaccacaggggctcccatttaccctggcttccccaaagtcacagaggttcatcatgagcagaaagcctcaaactcttcagcatctcagagaagcttacagatgtttaaggtgaccatgtccaggattctgaggctcaaaatacagatgcaggaaaaacatgaagccgttatgaatgtgaaaaagcagacccaaaaggggaactcaaagaaagttgtgcaaatggagcaggaacttcaggacttacagtcccagctgtgtgcagagcaggctcagcagcaggcaagagtggagcaactagagaagactttccaggaagaggaacagcatcttcagggtttggagatagcccaaggagaaaaggacctgaagcaacagctggcccaggctctgcaggagcattgggctctaatggaagagctaaatcgcagcaagaaggactttgaagcaatcattcaagccaagaacaaagaattagagcagaccaaggaagagaaggagaagatgcaagcacagaaggaagaagttcttagccacatgaatgatgtgctagagaatgagctccaatgtattatttgttcagaatacttcattgaggctgtcaccttgaactgtgcccacagtttctgctcctactgtatcaatgaatggatgaagcggaagatagaatgccccatttgtcggaaggacattaagtccaaaacgtactctttggttctggacaattgcattaataagatggtaaataatctgagctcagaagtgaaagaacgacgaattgttctcattagggaacgaaaagcaaagagattgttctgaagaccgtgctctaagggcatttgaaagactgccaggtagtgcgagcctgagatggtctggaggattctctctagccgtgactccgctgctctgaaggtcaactgagaagtcttgtgggacagagacttgagttaggaagccctcagtcacttgccttccacggtggccagccctgctgccatcattggctgaagcaccaccaggattcacggcacccaactgcttcagggtacttcgtagactctgcctcactacatgtcgaaagagttatttgagttctcttctgtttttttttaatttgttgttgttgttactgttttgatacctcggaaacacctccgttgacagttgttttggataggttgggtgtaccccatggctgcctctgaaggcagtgtctattttgagaggatggcttacctcttctttgtgaaaatactatctcatttcctggaaataaaatgtaaaacctgtcagttgctcagctgggctttggtgtatttaccttccttcccttcctgctcccagacagtctcacaagtaaacaccagcagctcatagattacaaccaagaaagtgactgtatcagatgatagacttcaagtgaatgtcagcctaagaggccaagctgcagatcgtggcaacagatgagctctgttaacctcctgactgtcgtgtttcctttttattacagaggtgggtcactgtttaccttgtttcaggggtgggagaaactcctttccttcagctggcatttgaatgtttccaaatctattttatctgacgtcatgaacacacaggcaatgattttatgacaacttgatgtgcttttttctttatttttcttttacattagaagttttctctcttttctccacctctcctttatttttaattttaattttaatttttgaaacaagatctgactctgttgcccaagctggagtacagtagtgcaatctcagctcactgcaacctccacctcccagactcaagccatcctcccacctcaacctcccaagtagctgggactacaggcatatgccatcacacccagctaatttttgtttttctgtagagacagggtttcaccatgttggccaggctggtctcaaattcctgaccttaagtgatccacctgcctaggcctctaaaatgctgggattacaggcgtgagccaccacgcccagcctataccccatgtattttcataaagggttggaaactattgattgccaactttttaaggatggtagggattttttctttgttgaatatactgtgaattttgggattctggagtccttagtcttcatttccattcttctgcccatgattactgatcaaaatactggtagagtcatggaggaagtaagttaaatgtggaaaaaatgctttaaaagtacttactataaccacatcataagaattctggaaaaatagagaacaaaaggaaaagattgttaccaccttgatttaataacttcttgtttccccatacatgtgttttgtttatagattgcatgggtatatgtcaatttttatatgttctgtgtttagtttacatattgtaattcatttttaagagagtacagacatacactttttgagtaggcaatatgttcacatagtttgaaattaaaggtacaaaatggcgtagaatgaaatgcctctcaccctttccccacagcgactacttcccactcagaggcaacaagtattacagttgcttgtatattcttccagagatctctgtctatacaagcaaaaacacatgtggtctttttccttgctttgcacaaatggtaaactgtacgctattctgaaccttgcttttttcagatatatgttggcaacagttccatgtcagtacatagtttcctttctttattacagctgcctgttttttcattgtgtatttgcaccatcatttacttttctggcttacttttgatagaaatctaggttggttcaaacctttttactcttaaaacaatgctgcagttaacacccttgtacatatatctttagagagaagatattttaaaaagaaatacctttttaaaaattattttattattttttaatagagactatgttgcctaggctggtcttgaaattctgggctaaagcaatcctaccaccttggcctcccaaagtgctgagattacaggcatgagccattgcacctggccaagaagagacatcttgacttgagcctgaagactatgtacagagactgacctcacagactgaccattccatcccacagctgctggacatagagtgatttgcagcccctcctttcagagtaccacatccctctcaagtgttccacaacatctaggaaagtgagctcttaaagacagactaaaaagagtaataaatcaatacaacaacattaaaagccagactagcggagtttgaatcttggccctgctgttagtaactgtgtgagccttgggcaagttactcagcctccttgtgtcttggttttggtttcttcatctctaagtaattatatctgtcattattgccctgatcacaaacaaaagcctgaatgtactatgtttaaaagacaaaccaaaaattaacccaaacttgcattatttgtctgagctacagaatgttctttccttggagagatatctgatattaaacatcatctgcattttacttgcctagaaaatacacggtaacttttctgccttgcagcatcaaactatagtacagctgagccccagtgctgtgcagtctgactctaattaaaggcaccttctttacagcagggctctggggaactggaaaagggggtttgtttcattatctggttttattaagcagatgaatgcagccagctatatgaagcactttgcagtgaatggcaggtgtcccatatctggttatgttaacctagaaagggctcactctacctctaggcatgtttcatcccaacaatcagactgtgccaaagcaggggactttgtcctttgtggattgcatagctggatacccatcatctgtttctctgattggaagctgctgttgtacagaaagacctgcatttcccccttgtctccagttctctcactactttttcctcctctgtgagtgaccatccaggcagtcaccataactgctggagtgtctgggattggtagctctctccaactgcctgcttgctctttacagcctctctctgtgactggaatctctccacctcatcgtatctaaggataacccagaaacatggggtgtcctaggtatgtttatctcgacactgaaccccctaggcttctgatgaatccagtgattagctaaatttgacatagaaagtaagaaggaatgtctactttgtattgtggtcctaatctaagatcaggagaatcctggaattgttatctgtctcttgctctgagatacagacttgttcataggtgtggggcctgattggaacaggatctgccattggtcacaataggtcaagggcttgttctgaaccctagttagcttcattcagagaaagaaacttcctacctggtcagctttttcagcttctccaacaaatgggagttgaggcagtaggagtgtggggttcttgggaagacgatggggccttgtattaaggagaaataatgaactatcttcttgattcttccattgagaaaagcatatgaatcctaggaaagggctcagcctgtgataggcattcaataaatactccaatgctgtcattcctttgtctacagcatccccaaacaatgtaccagtgatgggctacctgagctcatctagtcgccaagcagtatctcctgcttgctgctgctttactacattccagatgcccacctcatccaatttccagagccactatctctgctgtccactttccttcaggctctgtgaatacttcaacctgctgtgatttggggccgtttgtactctgcatgtattcaataaattcaattcagcaatagttaaaaaaaaa

SEQ ID NO: 568 - DNA, 5556 bp, Homo sapiens
gcgcttgccccgcagctgattcatagccccggcccgggccgcctctgcacgtccgccccggagcccgcacccgcgccccacgcgccgccgaggactcggcccggctcgtggagcccttcgcccgcggcgtgagtacccccgacccgcccgtccccgctctgctcgcgccctgccgctgcgccgccctcggtggcttttccgacgggcgagccccgtgctgtgcgggaaagaatccgacaacttcgcagcccatcccggctggacgcgaccgggagtgcagcagcccgttcccctcctcggtgccgcctctgcccagcgtttgcttggctgggctaccacctgcgctcggacggcgctcggagggtcctcgcccccggcctgcctacctgaaaaccagaactgatggctctatttgcagtctttcagacaacattcttcttaacattgctgtccttgaggacttaccagagtgaagtcttggctgaacgtttaccattgactcctgtatcacttaaagtttccaccaattctacgcgtcagagtttgcacttacaatggactgtccacaaccttccttatcatcaggaattgaaaatggtatttcagatccagatcagtaggattgaaacatccaatgtcatctgggtggggaattacagcaccactgtgaagtggaaccaggttctgcattggagctgggaatctgagctccctttggaatgtgccacacactttgtaagaataaagagtttggtggacgatgccaagttccctgagccaaatttctggagcaactggagttcctgggaggaagtcagtgtacaagattctactggacaggatatattgttcgttttccctaaagataagctggtggaagaaggcaccaatgttaccatttgttacgtttctaggaacattcaaaataatgtatcctgttatttggaagggaaacagattcatggagaacaacttgatccacatgtaactgcattcaacttgaatagtgtgcctttcattaggaataaagggacaaatatctattgtgaggcaagtcaaggaaatgtcagtgaaggcatgaaaggcatcgttctttttgtctcaaaagtacttgaggagcccaaggacttttcttgtgaaaccgaggacttcaagactttgcactgtacttgggatcctgggacggacactgccttggggtggtctaaacaaccttcccaaagctacactttatttgaatcattttctggggaaaagaaactttgtacacacaaaaactggtgtaattggcaaataactcaagactcacaagaaacctataacttcacactcatagctgaaaattacttaaggaagagaagtgtcaatatcctttttaacctgactcatcgagtttatttaatgaatccttttagtgtcaactttgaaaatgtaaatgccacaaatgccatcatgacctggaaggtgcactccataaggaataatttcacatatttgtgtcagattgaactccatggtgaaggaaaaatgatgcaatacaatgtttccatcaaggtgaacggtgagtacttcttaagtgaactggaacctgccacagagtacatggcgcgagtacggtgtgctgatgccagccacttctggaaatggagtgaatggagtggtcagaacttcaccacacttgaagctgctccctcagaggcccctgatgtctggagaattgtgagcttggagccaggaaatcatactgtgaccttattctggaagccattatcaaaactgcatgccaatggaaagatcctgttctataatgtagttgtagaaaacctagacaaaccatccagttcagagctccattccattccagcaccagccaacagcacaaaactaatccttgacaggtgttcctaccaaatctgcgtcatagccaacaacagtgtgggtgcttctcctgcttctgtaatagtcatctctgcagaccccgaaaacaaagaggttgaggaagaaagaattgcaggcacagagggtggattctctctgtcttggaaaccccaacctggagatgttataggctatgttgtggactggtgtgaccatacccaggatgtgctcggtgatttccagtggaagaatgtaggtcccaataccacaagcacagtcattagcacagatgcttttaggccaggagttcgatatgacttcagaatttatgggttatctacaaaaaggattgcttgtttattagagaaaaaaacaggatactctcaggaacttgctccttcagacaaccctcacgtgctggtggatacattgacatcccactccttcactctgagttggaaagattactctactgaatctcaacctggttttatacaagggtaccatgtctatctgaaatccaaggcgaggcagtgccacccacgatttgaaaaggcagttctttcagatggttcagaatgttgcaaatacaaaattgacaacccggaagaaaaggcattgattgtggacaacctaaagccagaatccttctatgagtttttcatcactccattcactagtgctggtgaaggccccagtgctacgttcacgaaggtcacgactccggatgaacactcctcgatgctgattcatatcctactgcccatggttttctgcgtcttgctcatcatggtcatgtgctacttgaaaagtcagtggatcaaggagacctgttatcctgacatccctgacccttacaagagcagcatcctgtcattaataaaattcaaggagaaccctcacctaataataatgaatgtcagtgactgtatcccagatgctattgaagttgtaagcaagccagaagggacaaagatacagttcctaggcactaggaagtcactcacagaaaccgagttgactaagcctaactacctttatctccttccaacagaaaagaatcactctggccctggcccctgcatctgttttgagaacttgacctataaccaggcagcttctgactctggctcttgtggccatgttccagtatccccaaaagccccaagtatgctgggactaatgacctcacctgaaaatgtactaaaggcactagaaaaaaactacatgaactccctgggagaaatcccagctggagaaacaagtttgaattatgtgtcccagttggcttcacccatgtttggagacaaggacagtctcccaacaaacccagtagaggcaccacactgttcagagtataaaatgcaaatggcagtctccctgcgtcttgccttgcctcccccgaccgagaatagcagcctctcctcaattacccttttagatccaggtgaacactactgctaaccagcatgccgatttcataccttatgctacacagacattaagaagagcagagctggcaccctgtcatcaccagtggccttggtccttaatcccagtacgatttgcaggtctggtttatataagaccactacagtctggctaggttaaaggccagaggctatggaacttaacactccccattggagcaagcttgccctagagacggcaggatcatgggagcatgcttaccttctgctgtttgttccaggctcacctttagaacaggagacttgagcttgacctaaggatatgcattaaccactctacagactcccactcagtactgtacagggtggctgtggtcctagaagttcagtttttactgaggaaatatttccattaacagcaattattatattgaaggctttaataaaggccacaggagacattactatagcatagattgtcaaatgtaaatttactgagcgtgttttataaaaaactcacaggtgtttgaggccaaaacagattttagacttaccttgaacggataagaatctatagttcactgacacagtaaaattaactctgtgggtgggggcggggggcatagctctaatctaatatataaaatgtgtgatgaatcaacaagatttccacaattcttctgtcaagcttactacagtgaaagaatgggattggcaagtaacttctgacttactgtcagttgtacttctgctccatagacatcagtattctgccatcatttttgatgactacctcagaacataaaaaggaacgtatatcacataattccagtcacagtttttggttcctcttttctttcaagaactatatataaatgacctgttttcacttagcatcctttggactctgcagtaggttgtctgggtcaagataactctcagtcacatttatattcatattatgctaaaatagtaaaatgaaacctcattgttggacataatttagatataactaaaaagttctatgaagtgggaaattccgtgttggctctggagcagctttgtctcctctgaaccaatatatcccaaaccaatatatgcaaagcacctggtacacaactggtattttagtacatgttggttcttttggtgcaatctcagctcactgcagcttccgcctcctagattcaaacaaacagttctcctgccccagcctccagagcacctaggactccaggtgcatgctaccacacctgactagtttttatatttttagtagagattgggttttaccatattggccaggctggtctcaaactcctgaccgcaggtgatccacctgcctcagcttccccaagggctgggattacaggtgtgagccaccatgcccagcctatttgtcacattatttgtcacatttattttacttttatttattttttgagatgaaatttcgctcttgttgcccaggctggagtgcaatggtgcagccttggctcactgcaacctccgcctcccagggtcaagcaattctcctgcctcagcctcctgagtagctgggattacaggcatgcaccaccacacccaggtaattttgtatctttagtagagatggggtttcaccatgttggtcaggctgttctcgaactcctgacctcaggtgatctgcctgccttggcctcccaaagtgctgggattacaggcgtgagccactgcgcctagccgtcacatttctaaacaagcatgaaaggggttcatttttgtcttcttcttgcctgccgtcagcatggtggaaatggctctgcctatgctcatgcttctggtgcccaatgccttgcactgtgccattcaacactatgaagagaaacaagtagccacacctcaaaataatgtggctgtcaacaactggcctaaataaacctacacaaaccagtacttgccttttgctggaaacattgattatgtgctcctcacgtagtagaaagcggtatcctgattagtctaacagttgtgttagactttagggccagtattgtcagcatttatttatttatgtacctttgttatgatgggatatttttcatttgaaacttgttcataaaaatgtcaatgacattgatgactgatttgtacatatttttcatatagttttgtttaaaaaataattcacgcaaaatcttgaagtcatttttgctattgaaataaaccttaattaaaatatttcatcatcaaaaaaaaaaaaaaaaaa

SEQ ID NO: 569 - DNA, 5201 bp, Homo sapiens
aggactagagagcgagccgcaaggaagtcggtgcagtcgagacccccctccccatcccagcgcatcgcgtctccgccgagcttgagggcacgccggggacccctccccagagccggccggaccccaggtgccgaggccttggggagcgcggggcgtcccgggtcgcggtgccctcgggacgagacagcccctggcagtgccaccaccgcagccgccgggcgatctccaagcggcgatctctaagcgctgctctctgctcggccgcgggccaggaggggagggtccggccttgccccgcaggcgtccattggcggcttcccccggcctccgcgccatgccgcgggccgtgtgaaaggcggcagcaccggaacccgcaggtgtccgcgggcgcgccaagcccttttgggtagggggcgccttactcgctatgctgcaagggccccgggccttggcttcggccgctgggcagaccccgaaggtggtgcccgcgatgagccccacagagctgtggccatccggcctcagcagcccccagctctgcccagctactgctacctactacacaccgctgtacccgcagacggcgcctcccgcagcggcgccaggcacctgcctcgacgccactccccacggacccgagggccaagttgtgcgatgcctgccggcaggccggctgccggccaaaaggaagctggatctggaggggattgggaggcccgtcgtccctgagttcccaacccccaaggggaagtgcatcagagtggatggcctccccagccccaaaacccccaaatcccccggggagaagactcggtatgacacttcgctggggctgctcaccaagaagttcatttacctcctgagcgagtcagaggatggggtcctggacctgaactgggccgctgaggtgctggacgtgcagaagcggcgcatctatgacatcaccaacgtgctggaaggcatccagctcatccgcaagaaggccaagaacaacatccagtgggtaggcaggggaatgtttgaagaccccaccagacctgggaagcagcaacagctggggcaggagctgaaggagctgatgaacacggagcaggccttggaccagctcatccagagctgctctctgagcttcaagcacctgactgaggacaaggccaacaagaggctggcctatgtgacttaccaggatatccgtgctgttggcaactttaaggagcagacagtgattgccgtcaaggcccctccgcagacgagactggaagtgcccgacaggactgaggacaacctgcagatatatctcaagagcacccaagggcccatcgaagtctacctgtgcccagaggaggtgcaggagccggacagtccttccgaggagcctctcccctctacctccaccctctgccccagccctgactctgcccagcccagcagcagcaccgaccctagcatcatggagcccacagcatcctcagtgccagcaccagcgccaaccccccagcaggccccaccgcctccatccctggtccccttggaggctactgacagcctgctggagctgccgcacccactcctgcagcagactgaggaccagttcctgtccccgaccctggcgtgcagctcccctctgatcagcttctccccatccttggaccaggacgactacctgtggggcttggaggcgggtgagggcatcagcgatctcttcgactcctacgaccttggggacctgttgattaattgagtggccctgcctgcccccagcagcctgcccccgactctacctcctcacagacaggctgacagcccctctgcctgcacagggacattggacactaggtgctgccctcagggcatggggtctcctcgcctttcctgccccagccggcagaagctgtgtggggagatatgaatggtacgggtgaggagtggataaggggtggtcctcaccttcctaatggaagctgggcctagggaggcccatccagtcttctgacttctgacctctcacaagaaggctgcaggtgaggtggccaagtccagggaaaggccctgctacctccttttgaggggtaattaggaccctcgacgtaccaagaagcacataatgcctttgtatttatttcaggttgagttgtttgtttgtcctccctgagttttagcagggaggttgttctagtttttagtgagacctctgcagacaggcccatcactgtccatgttccagggcaggtctgggtttccaagggaggggcccaggctacatccttggtttccccactgtggtgggggctgggactctgaggggctgtccagtctgctagaatgctaattgcacttaggcctcatggttctagtaaacggcagctgtgggcccttttgcctcttcccctgttcttggcctcacatctccagctgagctgccggtcttggcttcctggtcgcctctgtcccagagatggtcccagggagccatcctagggcaggtagcactgaggctcctgtggaaacaggagccacctgctcaggagacccctttcctgaggaagtccttacctctccccttgagatgtaaaaatggtccagcagagacaagctcccgtggaaaacagacaggagcatgggggcagctgtcatggctgtggcgggcacttttcctcagagtttctgccttgcgctggtccaggagccattttgcaccaaggacttggtaggcagaggcagccccactgtaaagaagggtcagattaaaacaaaaaactgccaaaagcatcccctctgccccccatgtggcactggcatcattctctgcttccctgggaggaattttttcaccatgttattgaaggggatggttcattaaggactccacccctcagagctcactcagaccccaaggacagaggtgactggggcttggtgacttgttcactccttttttcccaggtatactgaaggggtgacagagagaggtcttcatggcagaccaggccttcacagctaatggggagaggaactcatgttacctctgcaggcctggggtcctgagggggtcttttggcttcagcctgttcccccagaggcttgatcatcccacattgtcccttcagctcagctgctcttctcccccacccaccctgggatgtgggtgctctgggctgaaccaaggctatgacttctggagagaggctcaggggttggtctgagaggcctgccatccacccctcagggagctaggttttctcagaggctcagctggacagcactttttagaaaagtttgtagcattaagctggtttaaaatatgaagttggttttgttggatggctcctgagctgactgactgatgtctgaagtttgagacgagggattatttcagggtggggcccaatgtgatctaatgcccagctggggacaattgtgcctcatcatttgctcaaattcctgggcccccaagttagccccctcccaggagtggtcagcgggtcacagctgcccccactctataagcagggctaattgtgtaccctttgcagaaatgcttttggtctcctacccaaatactcacaagggtcttatcagacgcccgtcttaaagtccagcatgctcagggaccctgtgtaggatctcgtttgtggtgagtgggctgctctgaggtctccactgggctgccatttagccatgtgccatctctgaagtcagaggtgtttgactcccattccttgggctctggagctttccccaagaattacatcagagaaaaggaagaaggggcctgcaggacccattgggaatgagtttaatactgaagtctggaatgtaagctcatgccctagaggcctctccatatggctggtcaggggagctgccttcaggcttgtgccccgtgtgctcagcagctgcctctgtccccctctactgtccctttcacaccttgcctggccaaggggctagacctcccaggctaagcctcagattcagtgcaggacacaagctcatgcccccgtcttgccagtgacacttgaagcctcccgacttccacagagtgcttcaggacacattttgagtggtattttcttttctttttttcttctttttttttttttttgagatggagtctcgctctgttgcccaggctggagtgcagtggcctgatctcggctcactgcaacctctgcctcccaggttcaagcgattcttctgcctcagcctccagagtagctgggactatagacatgcaccaccacgcccggctaattttgtatttttggtcgagacggggttttgccatgttagtcaggctggtcttgaactcctgacctcaagtgatccaccacctcggcctcccaaagtgttgagatgacaggcacgagccaccaggcccagcctgagtggtattttctttagggaccaggtagactttaaaacgagggtaagagaaaagccagtgtctttctgaggtaaataatttctgccaggaaacttcccagccccaccagcagcccccctaaaaaaatcactcgtgtccccagggacttctaaagcttggggctccaggaaatcatccagtagagttggagattcagagatttcttgaagccagggacatgctcctaactcctttcccattaaaggtgttagaatagaccagagggtgtcccttttccacagtaatgggatcggctggtgtgccttcagggaggaagagggaggtggtcaagcttgaaaaactggctttaggatggttctgactttgttctccctccccaagtgttctcaacctccattctgcagtgttcagagttttagggaaagggtttgggtgccccagcatccaggtgttgtgtggcttagcgcatgtgaagtgaaaaccttctggggttgtttggaagcagctttctggttcttgtgattgtatcctgaggtcccagaaccctattctcccacgaggatcctcagtgaccatggtggccacacgcctggccagcctgctggctcctgggtgagctgaagaaccttgcctgtggcacttttcgagggtgagctggaaccgagagaacatggtccccgtgctgggactcatgcgggtcatttcctgccggcctggtttcgcctggtcgtgtctttatgagcaccatgtaagcctccttgtattgagataattgggcattaaacattaaactgcagctctgggcaaaaaaaaa

SEQ ID NO: 570 - DNA, 2763 bp, Homo sapiens
gtgggatccactgaggagtacataggctgctggatctggtggagccagcactgggcccacgggtggtaactggctgctgtggaggggggtacgtgagggggggggtctggggcttatcctcaggtcctgtgggtggggcagcgagtcggggcctgagcgtcaagagcatgccctagtgagcgggctcctctgggggagcccagcgcgctccgggcgcctgccggtttgggggtgtctcctcccggggcgctatggcggcgctggccagtagcctgatccggcagaagcgggaggtccgcgagcccgggggcagccggccggtgtcggcgcagcggcgcgtgtgtccccgcggcaccaagtccctttgccagaagcagctcctcatcctgctgtccaaggtgcgactgtgcggggggcggcccgcgcggccggaccgcggcccggagcctcagctcaaaggcatcgtcaccaaactgttctgccgccagggtttctacctccaggcgaatcccgacggaagcatccagggcaccccagaggataccagctccttcacccacttcaacctgatccctgtgggcctccgtgtggtcaccatccagagcgccaagctgggtcactacatggccatgaatgctgagggactgctctacagttcgccgcatttcacagctgagtgtcgctttaaggagtgtgtctttgagaattactacgtcctgtacgcctctgctctctaccgccagcgtcgttctggccgggcctggtacctcggcctggacaaggagggccaggtcatgaagggaaaccgagttaagaagaccaaggcagctgcccactttctgcccaagctcctggaggtggccatgtaccaggagccttctctccacagtgtccccgaggcctccccttccagtccccctgccccctgaaatgtagtccctggactggaggttccctgcactcccagtgagccagccaccaccacaacctgtctcccagtcctgctctcacccctgctgccacacacatgccctgagcagccaggtcccactaggtgctctaccctgagggagcctaggggctgactgtgacttccgaggctgctgagacccttagatctttgggcctaggagggagtcagagagggggatgtctgaagatggtcctggctgatcacttctttctttccacactcacacaaccccatgccttttcctgagatggcgctgggagttcccacatggacagccagggcataaacacttcccaccccggctcagccagttcctggagtcctgtgccccttttcattgccactgagccatttctagattcactggagctcaggattcatgtgtccttctttccctactctaccttctaccttggtctggacacattctggaacactggacaccctcgccagggccacttctgcactagggctctgtgctggaacccaggcatgctgccagccttttctctggatctgtcaggcctctgtccttgactcagatggacccctggtttccaagtagaaagaggctagatttgggccttgtctagctgttggctttggcctgaaccggaaccagtctcagatgaccacgggtttaaccttcttatcccagagacacccaattctagagctttatggagccgtacttccccctgaatcctagctctaggacatagatcatgactctcagcccttttacccaggatggagctggggcctgtatagccatattattgttctaagtaagttctagccccaccctcccgccttcttgagtgatacctattacggatgagttctggaaaagacccagctatgattcataaaaacacttctggatgaatcaagaaccatttcttgtttttcctagataattctctaaaaatatgattcttccatatagaatgctaagcttatttttacatgcagtttctagctccttcaacccagctgaggtcgtgccagggagacagagtctggagaagggcagaggaattttggaaggatccctggctcatagtagggaagctgggatgggggaggggtcaaaattatggcatgactgaacctgcatctgtgttgggtggacatgaatacttagctacctcagcaggaattccttccaggtcccctttaaagctgaggtccttagagtaatatgtccttaataaaaaggacaaatggatacagccttgaccctcccagtgaggagaccccaattcagcaataagtctcacccttctcccctacaggtcaggccaagaagggtgaaggcctcttgcactccagacctcatacgccccaacagcttctaattggatagaacttgctttaccttacagctcacaacctcagctgggttttaggtacccaaaaagggcctgtctagattttttcagaaaaacgtggagtgctaggggcagcctggaaaagatggggaacctgctagtgaactaggagggagacttccatagcctcagacttggatagggtaggctgagggggccctaagggagggactaaggctccaaggcaggtcacttttccttaggctgttctacttctggcttgttgcaagaggagtagatgccccctcacccacacaaaccccactcagtctccacccaactcctggcactgctcccaggggatcgggtctccactccagctttctcaattaaagacgatttatacaaaaaaaaaaaaaaaaaaaaaaaaaaaaaaaaaaaaaaaaaaaaaaaaaa

SEQ ID NO: 571 - DNA, 1448 bp, Homo sapiens
gcctctccagctgcgacacagatggcgcgcgggctcttgggttctgtagttttctcgcgatccaaaaggctccgtgcccaaagcaaatgctggccgccaacccaggcaagaccccgatcagccttctgcaggagtatgggaccagaatagggaagacgcctgtgtacgaccttctcaaagccgagggccaagcccaccagcctaatttcaccttccgggtcaccgttggcgacaccagctgcactggtcagggccccagcaagaaggcagccaagcacaaggcagctgaggtggccctcaaacacctcaaaggggggagcatgctggagccggccctggaggacagcagttctttttctcccctagactcttcactgcctgaggacattccggtttttactgctgcagcagctgctaccccagttccatctgtagtcctaaccaggagcccccccatggaactgcagccccctgtctcccctcagcagtctgagtgcaaccccgttggtgctctgcaggagctggtggtgcagaaaggctggcggttgccggagtacacagtgacccaggagtctgggccagcccaccgcaaagaattcaccatgacctgtcgagtggagcgtttcattgagattgggagtggcacttccaaaaaattggcaaagcggaatgcggcggccaaaatgctgcttcgagtgcacacggtgcctctggatgcccgggatggcaatgaggtggagcctgatgatgaccacttctccattggtgtgggctcccgcctggatggtcttcgaaaccggggcccaggttgcacctgggattctctacgaaattcagtaggagagaagatcctgtccctccgcagttgctccctgggctccctgggtgccctgggccctgcctgctgccgtgtcctcagtgagctctctgaggagcaggcctttcacgtcagctacctggatattgaggagctgagcctgagtggactctgccagtgcctggtggaactgtccacccagccggccactgtgtgtcatggctctgcaaccaccagggaggcagcccgtggtgaggctgcccgccgtgccctgcagtacctcaagatcatggcaggcagcaagtgaagccccagctggactcatggatgtgcaccctttgctccctgctctttctgcctctgggctcatgtatctgcgcagctctggtaccctctgtgggtgccatctctacctctgacacagactgcctgccttgaagctgagaaggcacagggcaaggagccaaggaccacagagcctcagccagcccaggatccgtcctcattttattggtgatgatgaatgggaatgaaatcagggggctgtctactagagcctggaataaatatgctgctttgtggatttttaaaaaaaaaaaaaaaaaaaaaaaaaaaaaaaaaaaaaaaaaaa

SEQ ID NO: 572 - DNA, 3531 bp, Homo sapiens
ccgcggcgccgatcccggctgaggcgcagcggcgagaggtcgcgggcagggccatggccccggggggccgctagcgcggaccggcccaacgggagccgctccgtgccgccgccgccgcccgggcgcccaggccccgccgctgcggaagaggtttctagagagtggagcctgcttcctgggccctaggcccctcccacaatgcttgtcgccggtcttcttctctgggcttccctactgaccggggcctggccatccttccccacccaggaccacctcccggccacgccccgggtccggctctcattcaaagagctgaaggccacaggcaccgcccacttcttcaacttcctgctcaacacaaccgactaccgaatcttgctcaaggacgaggaccacgaccgcatgtacgtgggcagcaaggactacgtgctgtccctggacctgcacgacatcaaccgcgagcccctcattatacactgggcagcctccccacagcgcatcgaggaatgcgtgctctcaggcaaggatgtcaacggcgagtgtgggaacttcgtcaggctcatccagccctggaaccgaacacacctgtatgtgtgcgggacaggtgcctacaaccccatgtgcacctatgtgaaccgcggacgccgcgcccaggccacaccatggacccagactcaggcggtcagaggccgcggcagcagagccacggatggtgccctccgcccgatgcccacagccccacgccaggattacatcttctacctggagcctgagcgactcgagtcagggaagggcaagtgtccgtacgatcccaagctggacacagcatcggccctcatcaatgaggagctctatgctggtgtgtacatcgattttatgggcactgatgcagccatcttccgcacacttggaaagcagacagccatgcgcacggatcagtacaactcccggtggctgaacgacccgtcgttcatccatgctgagctcattcctgacagtgcggagcgcaatgatgataagctttacttcttcttccgtgagcggtcggcagaggcgccgcagagccccgcggtgtacgcccgcatcgggcgcatttgcctgaacgatgacggtggtcactgttgcctggtcaacaagtggagcacattcctgaaggcgcggctcgtctgctctgtcccgggcgaggatggcattgagactcactttgatgagctccaggacgtgtttgtccagcagacccaggacgtgaggaaccctgtcatttacgctgtctttacctcctctggctccgtgttccgaggctctgccgtgtgtgtctactccatggctgatattcgcatggtcttcaacgggccctttgcccacaaagaggggcccaactaccagtggatgcccttctcagggaagatgccctacccacggccgggcacgtgccctggtggaaccttcacgccatctatgaagtccaccaaggattatcctgatgaggtgatcaacttcatgcgcagccacccactcatgtaccaggccgtgtaccctctgcagcggcggcccctggtagtccgcacaggtgctccctaccgccttaccactattgccgtggaccaggtggatgcagccgacgggcgctatgaggtgcttttcctgggcacagaccgcgggacagtgcagaaggtcattgtgctgcccaaggatgaccaggagttggaggagctcatgctggaggaggtggaggtcttcaaggatccagcacccgtcaagaccatgaccatctcttctaagaggcaacaactctacgtggcgtcagccgtgggtgtcacacacctgagcctgcaccgctgccaggcgtatggggctgcctgtgctgactgctgccttgcccgggacccttactgtgcctgggatggccaggcctgctcccgctatacagcatcctccaagaggcggagccgccggcaggacgtccggcacggaaaccccatcaggcagtgccgtgggttcaactccaatgccaacaagaatgccgtggagtctgtgcagtatggcgtggccggcagcgcagccttccttgagtgccagccccgctcgccccaagccactgttaagtggctgttccagcgagatcctggtgaccggcgccgagagattcgtgcagaggaccgcttcctgcgcacagagcagggcttgttgctccgtgcactgcagctcagcgatcgtggcctctactcctgcacagccactgagaacaactttaagcacgtcgtcacacgagtgcagctgcatgtactgggccgggacgccgtccatgctgccctcttcccaccactgtccatgagcgccccgccacccccaggcgcaggccccccaacgcctccttaccaggagttagcccagctgctggcccagccagaagtgggcctcatccaccagtactgccagggttactggcgccatgtgccccccagccccagggaggctccaggggcaccccggtctcctgagccccaggaccagaaaaagccccggaaccgccggcaccaccctccggacacatgaggccagctgcctgtgcctgccatgggccagcctagcccttgtcccttttaatataaaagatatatatatatatatatatatataaaatatctatattctatacacaccctgcccctgcaaagacagtatttattggtgggttgaatatagcctgcctcagtggcagcatcctccaaaacttagacccatgctggtcagagacggcagaaaacagagcctgcctaaccaggcccagccagttggtggggccaggccaggaccacacagtccccagactcagctggaagtctacctgctggacagcctccgccaagatctacaggacaaagggagggagcaagccctactcggatggggcacggactgtccaccttttctgatgtgtgttgtcagcctgtgctgtggcatagacatggatgcgaggaccactttggagactggggtggcctcaagagcacacagagaagggaagaaggggccatcacaggatgccagcccctgcctgggttgggggcactcagccacgaccagccccttcctgggtatttattctctatttattggggataggagaagaggcatcctgcctgggtgggacagcctcttcagccccttctcccctccccgcctggccagggcagggccaccccactctacctccttagctttccctgtgccactttgactcagaggctgggagcatagcagaggggccaggcccaggcagagctgacgggaggccccagctctgaggggagggggtccgtggtagaggcctggggccggtagaggctccccagggctcccttatgtccaccacttcaggggatgggtgtggatgtaattagctctggggggcagttgggtagatgggtgggggctcctggtggccttctgctgcccaggccacagccgcctttgggttccatcttgctaataaacactggctctgggactagaaaaaaaaaaaaaaaa

SEQ ID NO: 573 - DNA, 6188 bp, Homo sapiens
gcggccgcgggcggctctgaggagcccggagggaaccggcgacgaggggaccatgtaccgggacccggaggcggccagcccaggggcgccctcgcgcgacgtcctgctggtctctgccatcatcaccgtcagccttagcgtcactgtcgtcctctgcggcctctgccactggtgtcagcgcaaactgggcaaacgctacaagaattccttggagacggtgggcacgccagactcagggcgtgggcgcagtgagaagaaggctatcaagttgcctgcaggagggaaggcggtgaacacagcccccgtgccaggccagacaccccacgatgagtccgaccgccggaccgagccacgttcctccgtctcagacctcgtcaactccctcaccagcgagatgctcatgctctccccaggctccgaggaggatgaggcccacgagggttgcagccgagagaacctgggccggatccagttcagtgtcggctacaacttccaggagtccacgctcaccgtgaagatcatgaaggcccaggagctgccggccaaggacttcagcggcaccagcgaccccttcgtcaagatctacctgctgcccgacaagaagcacaagctggagaccaaggtgaagcggaagaacctgaacccccactggaacgagaccttcctctttgaaggttttccctatgagaaggtggtgcagaggatcctctacctccaagtcctggactatgaccgcttcagccgcaacgaccccattggggaggtgtccatcccccttaacaaggtggacctgacccagatgcagaccttctggaaggatctgaagccatgcagcgatgggagtgggagccgaggggagctgctcttgtctctctgctacaacccctctgccaactccatcatcgtgaacatcatcaaagcccggaacctcaaagccatggacatcgggggcacatcagacccctacgtgaaggtatggctgatgtacaaggacaagcgggtggagaagaagaagacggtgacgatgaagaggaacctgaaccccatcttcaatgagtccttcgccttcgatatccccacggagaagctgagggagacgaccatcatcatcactgtcatggacaaggacaagctcagccgcaatgacgtcatcggcaagatctacctgtcctggaagagcgggccaggggaggtgaagcactggaaggacatgattgcccgtccccggcagcccgtggcccagtggcaccagctgaaggcctgagtggggccaagggaggcccagggggccgagggcccaggtccccatcatgccctcaccactttatgcacaacgcccggcctgagccccctgccatagggaggggaggaccctgagggctcagccagggaggggtcccaggactcaactgggccccgtttctaggaagtaccagccccatcccccacagtccagctccggggaaggggctctgggaggcattttcctgctttgccccttttcttcctgacttactaatactaaagaagttgggggagctcgagagccagacggccagacaggcagacccctccagaggcccgccaggtgggcatggtcccccattttctttaaggcagcacctggagtggagagaggccactccctctccagcccccgatgtggacccggggaggggaggctgaggcgtttggccccggcctggccaggagaggcccatccccagggcagtttcaggtgccggctgggccctgaatgtcgaggatagtatatagcccgctcctgggtcctggagctgtggccctttgtactcgtgttgtgtccattgtgtgtgtgcgtggggacagaggcctggaaatgcggaggactatacagagaaggcaggttttgtgaaggccaggcagggttggaggccgggggtgtgagaggagaggcccatagggctgagtggggtcgggtgaggcagaggtcagaaacagaagagctgcagttgctggagctgggctgagaactgggctgcctcctgccatccccccgtctcctccccttctccccttggtgcccccctctgctcagaatctgaagtagttccctcctcagcaatttcatctcttgaacactgactcacaccttttaggcacctactgtgtgcatagcattccaccaggactcatctcccttccttctcagggggtcccgagccccgactagctttgccctaactccttcatcaaaagaccccccgccagcttcccacacctcatacgcagccacatctgccctattctccatgctttccagcttgcctgcccttcctcatctctccctgcctgtgcagacctccacccttctttcctccacccctccatcccccaatgcttgtagaccttccattcattccgtctcatcgtgcgtggtctctgatcgtccatcacctgaccttctccaggactgtcttctcacccttccccactccctggtccccgggagcagctccttctgcccgactcactcacagtgcagggaaaggaggcagggaaaagaccaggattctgtgagttctgaggttgccacacacaaagaagctgtggtttctctgcctcggccactgatgagactaaaactggcttccccttggagacggcagatttcaggctgatccctgcttaagccctctcatccccacgctggtcctggtattgatacaagacccagctggtgacaaagcctccaatcctgggggtccacgagcctgggcctgacattcccagaactaccgccaggtggcgccaggcccccacagtctgtggccgtggtcttagcccccagttccactctggatgggcctgtgacaccccaaagagaagaaggggactctggatagggtccccacatccagggcgtggggagaccattggcatttgggaaccattttccttcgaacggcttccccttgagctgagcattctgcttgctgcagtagacgggtcgccttttgcccataccgaaattttctgaaattaaatcgcacacccccaccatttcctctccctgggatctggaggaacatcatacatagtaggtgaatcgttttgtagagtgaagaatgctaatgtaaagcaaatagtcacccacgttccttgtaaatccaaatgtttctatattgtagctttgcttaaaatggggtcggccccaactgcatcctcctctttggcgggctggggagcggcccccagccgggacgggagggcagcgaccccgaggcctcgtggacgtgggagagagtgtggtgggaagtcttgagcggaggaggggatctgcccttctccactcctctcttggatccgcctcggtttcctgtccccccaccacccgcctgccccgcggaagaccgcccagtgagccagcccccaccttccaggcgccttcgccctggggatccaaccaacttgtatcgagtgggcggggcaacggctccccatttttcccgagccccgcccacagagctcttagccaatcctatgcagagagcatctcctggcaggggtctcttcccaaccagaccccacccaggcacattagcgaccaggcttgggcttccccagcgccccaccaccaccacgtgcaggtggagctctgggatgctatgttggggcggcaagcggtgggccgagggccgggtaggctagcacgggaggtaagggtggtatgggatggggcgggggcggtctagggcaataggagagcagagaatgggggaacttgagggtggggggagggcaccggagccttgccaccatcccaggactttgggcaagtcacccgcactccctgggcctcggtttccccatctgtaaaatgatggtaataatacttcacctacctcataggggaggttgtgaggccaccatcacctgacctgggggtcaaggcaggaggactccgaaggtgctacccgtgagcaaagtgtaattaccgaatcctgactgcaaggcccacctgcccctcccccacagagcctccagagctagctgaggccaacgcaggcccatccgtctcttcactctgtcgcaggccctttcatgggcttcgtctgccatctttgtgggtgccctagacttagtccttatcttgtcctggtttcctttcttgtgaccatctccccatgaaagtgctgtacaaattccacccgccccaggacccccgcacctgccctctggcaccagatgccagggaagggacagaggaaaacagccacaaacaagccaggggggctccccggagccccaggggtggggattggtggccactgtttgtatgttcttgagtgcaagtgttttataaaaaataaaacaaaaacccaccatcacaaaaaaaaaaattttgcagcgaagagaaatgaagaaaaactgaagaaaaaaaaaaaacaggaaaaaaagaaccatacaaaatttttccaccacacataccctctaagccagcaagatttcctctttgcaaaatcatatttttgtgggaatgggccctgctttttgtggcaaggcctgttctgattaataaaggatcgtgaaaaagtagggccttggctgtttcctccgtgggtcccagccctccctcacctccctgggggcagaggcagtggggtgaaggggatgggggccccggggctgagcctcccctcagtgtgtcacctttgggatttgacttcactggtgaccaggcccttcccgagtgtccagccatcctcagatctctatagaatatgatcccactggcttcccagaaagcagagaggcagctacatctcccagatcaggcctgacacaaggctttttgggagtagagtcctctctaggcctcaggggtgccctccagggtcacccagcctgacgtcccctccctcagttcccagaggacacttgccaccctccaaggcagctcagacaaaccaaagggggacgctccagctttcccaccaccatccatggggccactgtagtttcaggccagcgcctccttcctggtccctgaggtgggaaaaggaaagacaatgagctctgtgtctgttggctggacctgcggcttctctcagccctcttctagtttcattctttaggattagaaaagtctcttccactcaatagaacaggttccagcctgaggtgtgggaagctgggttgtaatcccttctgcagcctctgtggccctgggcaagctctttccttccacctgtttcttctggccacaacaaagcaataaccatccccatcccctgccctttcttccccacccagcccaggggaagctgagcccccgcagctctcagggtacttcagaaggaaggtgctacatctggttcagacacaggcacaaaaggaacgagcacatccccattgtcatgtgtccacctgctggcccctgcccccaccaggagtgaagcgggccatcccatccgccctctgctcccagcacttggggccagcagctgcctcccggagctgcactaagtaccccatccaaagctgtctgtccctcatttcccacaacctggtttagatatcacttctgatctctgttccagagatcagaggaagccccggggtcaggtaagtagcctcaggggctcccttggccagagcttctgttcaggcgctctccatgaaagcagccctggaaaactgagcctgaagtcagagacagctcaggcccagcacagggggcagtcccttgccactggctcgggcccttccctggactttttgccttcctccatttttgcttctctgggtctgtcttcgtccatgcctgctctgagatgctcccccacccctccctgtacctgggaccaccgccctctggtgttttctttctcctgtgagtccccccctggatactgctgctttctggaaggctgtcctgggttacgtcctgcgctcctctccctcccacgcaaagacaaccagaaggacaagccttgagcacgccgatgccccagctcgtggctccccagaccatctgtttcccgtgaagacgccccgctccccgtgtctgtgtcctgcgtgtatgtgtcgtgtcttgtgtagattgtgagccccctgggcagggatccctgtctgcatacatgttccatgtggcacgcccaggtgtgctaataaacgttcatcttcagaacaaaaaaaaaaaaaaa

SEQ ID NO: 574 - DNA, 1314 bp, Homo sapiens
cggggcgggagatttgaaaagtccttggccagggcgcggcgtggcagattcagttgtttgcgggcggccgggagagtagcagtgccttggaccccagctctcctccccctttctctctaaggatggcccagaaggagaactcctacccctggccctacggccgacagacggctccatctggcctgagcaccctgccccagcgagtcctccggaaagagcctgtcaccccatctgcacttgtcctcatgagccgctccaatgtccagcccacagctgcccctggccagaaggtgatggagaatagcagtgggacacccgacatcttaacgcggcacttcacaattgatgactttgagattgggcgtcctctgggcaaaggcaagtttggaaacgtgtacttggctcgggagaagaaaagccatttcatcgtggcgctcaaggtcctcttcaagtcccagatagagaaggagggcgtggagcatcagctgcgcagagagatcgaaatccaggcccacctgcaccatcccaacatcctgcgtctctacaactatttttatgaccggaggaggatctacttgattctagagtatgccccccgcggggagctctacaaggagctgcagaagagctgcacatttgacgagcagcgaacagccacgatcatggaggagttggcagatgctctaatgtactgccatgggaagaaggtgattcacagagacataaagccagaaaatctgctcttagggctcaagggagagctgaagattgctgacttcggctggtctgtgcatgcgccctccctgaggaggaagacaatgtgtggcaccctggactacctgcccccagagatgattgaggggcgcatgcacaatgagaaggtggatctgtggtgcattggagtgctttgctatgagctgctggtggggaacccaccctttgagagtgcatcacacaacgagacctatcgccgcatcgtcaaggtggacctaaagttccccgcttccgtgcccatgggagcccaggacctcatctccaaactgctcaggcataacccctcggaacggctgcccctggcccaggtctcagcccacccttgggtccgggccaactctcggagggtgctgcctccctctgcccttcaatctgtcgcctgatggtccctgtcattcactcgggtgcgtgtgtttgtatgtctgtgtatgtataggggaaagaagggatccctaactgttcccttatctgttttctacctcctcctttgtttaataaaggctgaagctttttgtactcatgaaaaaaaaaaaaaaaaaa

SEQ ID NO: 575 - DNA, 4482 bp, Homo sapiens
tgaggagccgcccggtcgcctgcgcgctccctccggcggcgtccccagcccgcggcccctctgctgccggcccccggctcgccggctgcgggagtggcctcaagatggatgaagacggcggcggcgagggtggtggcgtgcctgaagacctctcattagaagagagagaagaacttctagacattcgtcgaagaaaaaaggaacttattgatgacattgagaggctgaaatatgaaattgcagaggtgatgacagagatcgacaatctaacttccgtagaggagagcaaaacgactcagaggaacaaacagatagccatgggaagaaagaaattcaacatggatcccaaaaagggaattcagtttctaatagaaaatgacctgctacagagttccccagaagacgtcgcccagttcctttataaaggagaaggcctaaataagaccgtcattggggactacctgggtgaaagggatgaatttaatattaaagttcttcaagcctttgttgaactccatgagtttgctgatctcaaccttgtacaagccttaaggcagttcttatggagcttcaggctgcccggggaggcgcagaagattgatcgcatgatggaggctttcgcttctcgctactgcctgtgcaaccccggggtcttccagtccacagacacgtgctacgtgctgtcattcgccatcatcatgctcaacaccagcctccacaaccacaacgtgcgtgacaagcccacggcagaacggttcatcgccatgaaccgcggcatcaacgagggcggggacctccctgaggagctgctgaggaatttgtatgagagcattaagaacgagccatttaagatcccggaggacgacgggaacgacctgacccacaccttcttcaaccccgaccgcgagggctggctcctgaagctgggagggcgtgtgaagacctggaagcgccggtggttcatcctgaccgataactgcctctattactttgaatacacaacagataaggagcccaggggaatcatcccgttggaaaacctcagcatcagggaggtggaggacccccggaaacccaactgttttgagctctacaatcccagccacaaagggcaggtcatcaaggcctgtaagactgaggccgacggccgcgtggtagaggggaaccatgtggtgtaccggatctcagccccgagcccggaggagaaggaggagtggatgaaatccatcaaagccagtatcagcagagatcccttctatgacatgttggcaacgaggaaacgaaggattgccaataaaaaatagctttcctggctaaaagacccaggtaaaagacccaaccccagcagaaagacaccgcgggcggcccctccgcggaaggcgtggcagggaggcagtcgccctgcggtgcaagctgctgctccagagcataccgtggcccaggtggtatccccaaggcctcgtgccgtggctggggtcctgggaggtggtcgccctgcagtgcaagctgctgctccagagcgtaccgtggcccagactgatcctcgaggcctcctgccgtggctggggtcatggtcggctgcgcatgtccagaagcatttccttcctgcgaccatcccggcgcccctagggggagaagccaggacagcagcttccgctgtctccacagcagacacgggacggattccacagacgggagcctcattcgtaccatgccaaacgcattcactcggggcagtattaaccgttctagaaagccactgttttatagcaaaacaggaaaggaaaagctaccagttttttattcagaatttttctcagatatataggattatagcttttatatgcctttttatattctgaaattataacaaaagatactttctaacagtagtatttttagaatggcagctataaagttaactcctggacacaagtatatactgtgcactgaaaaaatatccatctacacagcacccaaggggagggctgggggcaccggcacgggggcagcgtgcagccctgccctgtcaggctgtcagacaagccccggggggcagcaggtgggctcgggacgggctgggggagggacggccatggcacttgggggctccagggtgactcccatgaggcctcccttcaaccaggctttttggccccacaaatactttaagcaaatcattaaaattataacagttaatggtttgggggtgtttaggctgtaactgctaactcctaggaaacagccttttccctggacacagatggtccatacgctgagccacgtgaaactgctgatgttttgtttagatgcacacacatggcagcgtttcatacaggtcagcaggttagaccggcttttgaccatattcatcgctatttaaaacctgtggcaaaatgaacgcttattttacagactttctaatttgaccagatttcttaatgaatagacacagaattaactaaaaacagtctcaccccatgtagtgcgccgtgtcctgagagaggtgccctccctacgaggagggaagaacaggccctggggtgcagaggcccggcacgtagagaacccagatagacgccggtggtggaactggtcaaactccacgcccgcctgggaggttgtcaggttgctgtggatgtaaggataggaggtgcccagtgctccgctcaaggaaggctggatctgggccccacctacagagagggctcagggctggaccgggggcattgtgtgcttgggccgacccgggccggtggcagacgctgttctctgtcgggagatttgcgtccccaggaccctgttacacagtgggctgttgggttggtggctggcttttcctctatggacttcctcttcctgccccacctgcataggcacacacaccttgaatctgcaccctctggagggcatctgtactcctgtgcaaaatgcccagtccagagacaaaacctcagactttgtgcacctaggtttccttctcagcagcggagactgttctttgagttgccttgaagtggaggccgagcggctgcgggcccttcgcctccctgcggctgaccttgatgtagctttaagtcacactagactgcagaggggtccgaggccagaaacccctgtcctgcatcagactttcattcccacgttcttaggctttgttactgatacctcaaatcggaagttttagttctgagaaaggcaagtcagcgttcttgaaatgcctgactggtagatatgcaactctggcctccagtcttccatgaaaataaatgctgcctggacccccacccagaccacacactgacggccggctccggcggtgcccacccctcaggctggcccggcacccaagactggccacagccagctctgtcagcatgttgtgctcggacaagctgtttccttcttctgaccaacccaggtgtgacctggggatgcagagctttctgttttgggtgttgggagaagcagcaggaaggagtcgccagatgatcaagctccccctttgctgtcatctgtgaatgagcttcgccaggtggtgggcacctgggagccatgcagaggctgtggtgctgagttagactccaggtactttgtggtcaaaggaaatcgcctagctccaggctgtgttaggacagtattagcatgaaggctgtgcgaccatcatgcctgctgatccttgaggcaggcctggtccagaaaactctgggtcagtgactgcgcagggccagccgctaccaggacggccctgaaacaggacacatctgttttttgtccctcaccctgggcaggccgcgtcacaatcacagtcctcctcctccccaccctgacgtctgagcgcagggcttgaattgttagtcccaactctggccaaagatacttttttccagagacagaggccaggaggcagtgaggggagccccgcggggaggcggcggcgactgccacagcccttccagcctgtcttgctggccgccctggttcatatttgagtttaattgtactgaccctggacccagataagcagcaactttgtgtctttggggtcacagaacattttggggcagtttaatgtggtaccaaactgaaaataggagctatttatagatggagcagcacttagtgcttcatagaaagcaatgcctatttttaaagttacaaacgcagatatctacatagatatgctttgctgagaagttaggtctgtggtagaccagaaaccacaaattgactttttttcttagaaaatatttctatttgcggtaaatatagtaatatgtaaataatgtacatctgttgatttctggagtgtctgttattcaatgatgtatatactcccacagctcgcatgaaggaacagcctctattgatacttggttgtaaagtgaagtaagattggagggtggatggctgtcagagctcttgcagatactgtgttcactaaataaaaatcacatgtattgttaaaaaaaaaaaaaaaaa

SEQ ID NO: 576 - DNA, 6122 bp, Homo sapiens
gggggcggagccgggcggtgtttcatccctcagcctcaggctgagccggaccgagccgagaggacccgagtggggccgaggccagtagccccggggccctgagcagaggccgtagcttgcgccgcacccgcggccaggcggagccaaagatgccggcctctgctgcgcggccccgcccgggtcccgggcagcctacagcctcgcccttcccgctactgctgctggcggtgctgagcggcccggtatccggccgcgtcccccgctcggtgcccagaacctcgcttccaatctctgaggctgactcctgtctcacccggttcgcagtccctcacacatacaattactctgttctccttgtggatcctgcctcccacacactttatgttggcgcccgggacaccatcttcgctttatccctgcccttctcaggggagagaccccgcaggattgactggatggttcctgaggctcacagacagaactgtaggaagaaaggcaagaaagaggacgaatgtcacaattttgtccagattctcgccattgccaatgcctctcacctcctcacttgtggcaccttcgcttttgatccgaagtgcggggttattgatgtgtccaggttccagcaggttgaaagacttgagagtggccgggggaaatgtccttttgagccagctcagcggtcagcagctgtaatggctgggggggtcctctatgctgccactgtgaaaaactacctggggacggagccaattatcaccagagcagtgggtcgtgccgaggactggattcggacagataccttgccttcctggctgaacgccccagcctttgtcgcagccgtggccttgagcccagccgaatggggggatgaagatggagacgacgaaatctacttcttctttacggagacttcccgagcatttgactcatacgagcgcattaaagtcccacgggtggcccgtgtgtgtgcgggggacctcgggggccggaagaccctccagcagagatggacgacgtttttgaaagctgacctgctctgtccagggcctgagcatggccgggcctccagtgtcctgcaggatgttgctgtgcttcgacctgagcttggggcagggactcccatcttttatggcatcttttcttcccagtgggagggggctactatctctgctgtctgtgccttccgaccacaagacattcggacagtgctgaatggtcccttcagagaactaaaacatgactgcaacagaggactgcctgtcgtggacaatgatgtgccccagcccagacctggagagtgcatcaccaacaacatgaagctccggcactttggctcatctctctccctgcctgaccgcgtactcaccttcatccgggaccacccactcatggacaggccagtgtttccagctgatggccaccccctgctggtcactacagatacagcctatctcagagtcgtggcccacagggtgaccagcctctcagggaaagagtatgatgtgctctacctggggacagaggatggacacctccaccgagcagtgcggatcggagctcagctcagcgttcttgaagatctggccttattcccagagccacagccagttgagaacatgaaattgtaccacagctggctcctggttggctcccgtactgaggtgacacaagtgaatacaaccaactgtggccgtctccagagctgctcagagtgcatcctggcccaggacccagtctgtgcctggagcttccggctggatgagtgtgtggcccatgccggggagcaccgagggttggtccaagacatagagtcagcagatgtctcctctttgtgtcctaaagagcctggagaacgtccagtagtgtttgaagttcccgtggctacagctgcgcatgtggtcttgccatgttctccaagctcagcatgggcatcctgtgtgtggcaccagcccagtggagtgactgcactcaccccccggcgggatggactggaggtggtggtgaccccaggggccatgggcgcttatgcctgtgaatgtcaggagggtggggcagcccatgtggtagcagcttacagcttggtatggggcagccagcgagatgctccgagccgggcccacacagtgggggcgggactggctggcttcttcttggggattctcgcagcatccctgactctcattctgattggtcggcgtcagcagcgacggcgacagagggaacttctggctagagacaaggtgggcctggacctgggggctccaccttctgggaccacaagctacagccaagaccctccctccccctctcctgaagatgagcggttgccgctggccctggccaagaggggcagtggctttggtggattctcaccacccttcctgcttgatccttgcccaagcccagcccacattcggctaactggggctcctctagccacatgtgatgaaacatccatctagagctgggcaaatgaccactagtgtataagtgatcactggaacggagtgaccactgagatgctgggggtcactgggcctggaagaccatcccagcctctgagttctctttgagtatgagtgattacttggattttagtatctgttctctctgagcctggatgggcttggggccagacctttgcctgattcctgattcccatgagaaatcagaactgctttctgcagcaaatcagggcttccccctaacatctgaactcctgtaaaccttcatccctggccccctatcttgggcccattagttttggggatggggcacagggcatagctatgactttgctttctggttggagcctggccggaaggaagagccctggaggtggttgggggcaaatgtgccctgagtccttggggtggttctgcttattcttcaagtttatctgaatctgtggggagtgcatgatccccatgttgcaatatggagtctctgccctgagatcttccccatctcagttttccttccatgaaagagtacgtgtaaatacatagtgttcataagagacctggccacatgtgcatgaatgactgggccgatgcttaggaatatttatgagggatggggagggagacaattggaatgggggcgttgcctgcagaactttagaccctgtagccatagagggaatggcgttcctttctaaaaggaactgaaacactgcccctctccccattgccccacaaccttactctaaatttgagtagagaaaagctcctaaagtgaccttccgggtgggaagggcagcagtacacatgaccccatccttttctttgtttttaccccctggctgccaccactgccatgtcacagctgctttctctggctggagtgtaggctgtaccccatttccttggctcccattaaaaatcaacaacattctaatgattagggaacaacagaaggggaacagtcataggatatacgagcagtataaagatacgtttgcaatcagtgactactcagggtgacacccttgccctaaagcaggagtcccccctacctggggtccatggactccctgaaattgtatgcaaaatgttgtttgtacatgtgtgtctgtatgtctctgtggggaggttttatggcttttgtcagattttcaaggccttaacaaagttaaaggaccactgccctgaggttactgcactgaggccaagttaggatggcatcactctgtggcagctctccctggacttgccctgcctggaacagggtgatttgctggaatggagttaccactgagatgccaaaggttgctgggtctggaagactgttgtggcctctcagttctctttgagtctgactgactgtggccagtccctggactggtagctgctggaggccttcttgtttctccagtccctggaagctgagctctatgtgtatttgatgacattgtcagctcttaccaaacgtcaagacctcttcctgcttgaccactcgcacatggctctaggcttctcctgctgagtcctggtcttggcctgtgaatgtgcctcgttcatccctggtgcttgagcccctcaagctccagtcaatgatccagtccttcccctttgaagttttctgctctactttccttggcagcagcctgtgaactactcaaaagagtccccttgggtttggaattatcagtggctttgccactagtaaatgtgtgatcttcggcaagtaacctaacctagggacatcagtttactcatctgcgaagtggggataataaaacctacctcagggttgcttcaaggattaaatgagaaaatatgtcaacaataaagacctgtctgtaccaatagatgttgttattgcaaaaatgggcttactatccataaccatatagcttaactatatgataaccatgacattcgtaggctgggcatggtggcttacgcctgtaatcccagcactttgggaggccaaggcaggtggatcacaaggtcaggagatcgagaccattctggctaacacggtgaaaccccgtctctactaaaaatacaaaaaattagccgggcgtggtggcgggggcctgtagtcccagctactcgggaggctgaggcaggagaatggcgtgaacccgggaggtggagtttgcagtgagccaagatcacgccactgcactccagcctgggcaacagagcaaaactccgtctcaaaaaaaaaaaaaaaagataaccatgacactcgcaatcatattaagcctcactcagtaaaggacagtcattgtttcacagatatcctgttctgggtcacctctggacagctcatagctgctggtttctaggttttaggaggcagatctatgatttttgtaatcctcagacctgtctgaccttagtggcctgagatccctttgtatagaatggaggaaggctgtgtgttctttggtttaccctcagcctatctttcaaccccactcacttgaggttgtggcctagttcctctttgggggagggaggaaggtggggagatgtcaaaggggactgggcttcctgtggggagtgggagagaagagtttttcaaggaggagagagaccagggctcttatactctgggccactatctgcctgctctaatcacctagggccaggcaccagacaactagggatggcctctttaccccaaagcctgctgaaattactcaaactagccaatcctaagtctgcctaccctgcctcagtcattccttccaatggaaaccacaataagcactcttgcccacgttttccctgctccctctgcatcccaactgaccctggtgcttccccatgtggcccctgtatagtgtgctttgcctcctgtttctagggacctgtgagtatcagctttctcgatgacagtcatttctgtgtctatgtgtcttattataccttattaaaacaaacctgggtacatttgtaagacagcagggattctctgaagattaatgattgagaaggatgattggacctgtctagtcagggaggctgaggcctcaggccttcattaggcacgttgcatgtctgtcaagtaagggccactaatcacctcacatgggttcatctgaactttatgccagcccaaaacacgaggacgtgccacccatcctcagcactctcaagacacacttaagtgtgtttgatacgtaagctccaattccttcctccataagaagagagaaggcagaagtggctttccccgaggtgaggacggggatgggagttttttcttttgagtgatgtagacctatgccctgcttccatgccacttcctcagatgtgacagacctctgctgggatggaatgtgtgtttgctggagacagctgtggcatagaggattgtgagaaagggtccccatgcttggtgtggaaggagggagctgctcaccctctgtatgggcttggatgaggagcttctcagcggcagtcataagaaccagaggattttctgccctttgctgggagccacatgagccccctggattcatgtggaattcttgggagagggatgaccaccctgaagatggctgagatcaaatatctcatcagatgactggatgcttagaatcgggttaacttgattaaataaataaatagaaatagtttttgtacctaaaaaaaaaaaaaaaa

SEQ ID NO: 577 - DNA, 6978 bp, Homo sapiens
gacgccttggacgcggttcaggaatccgccgccgctagccggctcgggcctgagcggggagggcgccaggcaggacctctcgcaggctcgctgcgcaggacggcgcccgcctggcgccgcttcccttccagcgtgccgaccggccccgcagcgcctccatccctccggcccgccccggagaagacgcacagctcgggccgcgcgggcgccggggccgcggaaccgcttctgccgggatcttccaggaggaaagcgaagttgcgagcggatgctgcccgcgccggaccccagccgcggagggtcggggccgccggtggagtctcggcggccggggacaagggtgtcccccacctgaagacggcaagctgggtcctgagtgatgcccctcagctgagtgtccaaggctggcccgaggagcccccacggccccacctttccccatggagaaaggactcactttgccccaggactgccgggactttgtgcacagcctgaagatgagaagcaaatacgcccttttcttggtttttgtggtgatagtttttgtcttcatcgaaaaggaaaataaaatcatatcaagggtctcagacaagctgaagcagattccccaagctctagcagatgccaacagcaccgacccagccctgatcttagctgagaacgcatctctcttgtccctgagcgagctcgattcagccttctcccagcttcagagccgtctccgcaacctcagcttgcagctgggcgtggagccagccatggaggccgcaggggaggaagaggaagagcagagaaaggaggaggagccgcccagaccggccgtggcggggccccggcgccacgtgctgctcatggccaccacgcgcaccggctcctcgttcgtgggcgagttcttcaaccagcagggcaacatcttctacctcttcgagccgctgtggcacatcgagcgcacagtgtccttcgagccggggggcgccaacgccgcgggctcggccctggtgtaccgcgacgtgctcaagcagctcttcctgtgcgacctgtacgtgctggagcacttcatcacgccgctgcccgaggaccacctgactcagttcatgttccgccggggctccagccgctccctgtgcgaggaccccgtctgtacgcccttcgtcaagaaggtcttcgagaagtaccactgcaagaaccgccgctgcggccccctcaacgtgacgctggccgcagaggcctgccgccgcaaggagcacatggccctcaaggcggtgcgcatccggcagctggagttcctgcagccgctggccgaggacccccgcctggacctgcgcgtcatccagctggtgcgcgacccccgggccgtgctggcctcgcgcatggtggccttcgccggcaagtataagacctggaagaagtggctggacgacgagggccaggacggcctgagggaagaggaggtgcagcggctgcggggcaactgcgagagcatccgcctgtccgcggagctggggctgcggcagcccgcctggctgcggggccgctacatgctggtgcgctacgaggacgtggcacgcgggccgctgcagaaggcccgcgagatgtaccgcttcgccggcatccccctgaccccgcaggtggaagactggatccaaaagaacacgcaggcggcccacgacggcagcggcatctactccacgcagaagaactcctcggagcagttcgagaagtggcgcttcagcatgcccttcaagctggcccaggtggtgcaggccgcctgcggccctgccatgcgcctcttcggctacaaactggcgcgggacgccgccgccctcaccaaccgctcagtcagcctgctggaggagaggggcaccttctgggtcacgtaggggggccggggccccgtatgcccctcctcgtgaaaggcctgccccgtctttctgccgcagccctcgcagagggcgggtgcacagcgccatgagcgggcagcgcctcctgtagcagtagggcccccagccagcgctccagccaaagcggcggccccagggttaattgcggagaacaggacagtgcccggtccccttgagggccatcacacccagacccaacgggttgcagcctcctgagcaggcctaggcaggcccgggcctgttggcaagcttcgatctcacacacacagaaacatacattcgtgcctggagaccctgcaggccagagtccaaatatttaacaatcagaaggggcaaggctctgaccagtgacagtcagacctcctgctttatttggtgttaaccgtttcttgtctggatggtgaagtctggaatctgggtgggtccttggaggaggggctaggacagccgtgggtgtcaaaggtggcatttgaggctcgtttgaggtgacagtggctgtttaccaactagtacagagcgattcagcgttttcatgaatgggttggctgtgctggttactgatgaatatgggccccttatagagctgcaaaacacacacatgcgtatagacatacatacatgtacaccatacatagacaagcatcataaaggcacaagtgcacacacatctatgcagacaagcttcctcgctgcttatgcccacagggtttttctgtatgacacacctcagaggagcctgtgcttaacatttgtaggattatttcgagggcagggcaggggaaagaaacgcgttaaagggccatgacatgacacagttccctggccgggtttggactgaacagtggattcagaactgcagcgttcaaagcccctgcccgccttagattctcatggctacctcctctgacccatccacatccttgcggctggcaggcaggatgttttgaaatggtgcagccaaaggccccgtctagcttggctggctcccgaacatgtccatatttgaaggctgcctcaggcctggcaggcagaagcagctgtggtccctggaggcaaaaggcagctcacggggccttccatttccagccaggcctcatctggggtagggccaagaggaaagtacagagtgcccgtgggggagaagtcccaccaggatgccccccctcccctgagaagcccgccttctccctcgtggacaggagtcagccagttggttgctgtggttacagccagtgcctggaattcctccttagggccctgggaagagtattgcttaacgcaggatgtgctgggtgttttgtttcgggcttttatttatggcttggtgtctttcttgtttcatggctgtgtttttgcttttgtttctgtaggagcgcctcttccaagcagtggaggcctgagggcttgagggaggctggggaaaaccagcagggagcacttggctcctggcagagggagaggacaggaggaggagccttccccaggaggaacgaggagaggtggccacgtggcaggccacagtgccctatgggcttttctgtttgaaccccatgtgggatgaatctcaaagccaccagcgttcttgcctagtgtccagagcagcagagatttgcagccctcgcccctccctgagaagaagctggatttgaaaatccctcacaggccctaacatgtttcctgggtgggcaggggcctcatgacaagcgacaagtgtacccagagtagaaggccttccccactcccacctcaaacccaggagcagaactcagtatccagagcttacaaggagctgcaagggtttgccgagggctgcccagctctgcttctggtttcctggacaatttctctgtcagatacggcccattgtaaacccagagggctgcattttgggttgagtaatatggacaccatggaagtacaggatctgagtccaacattgccatgggggagggaagagtgtgtcctggcaggaagccaccattggagaaggtgaggccagtaaccatctcatgggattcgctataatcagcctatttgagctgctgggtctctgtcactgtggactccagtcattcaaggaggtctccactcttgggttttttttattttcttttcttttgctattttgcctgaacaccccaacactcttggttttagagtccaagagtaagttgtgcagagacatggttctaatttggagttcaaaggaacaccagctctgaaaacatgaccgtggggccaggatgtttctggcaggcccagaagtgctggccgttcttccccagcctccccactgctccctcctctgttccccatgtggaggtcggaggggctgggactggggagggggcagccacctccatccaaggctcttcctaggggccctgctaatgtggacagtagactttatccctccttcttactctgggccaagacctcccactccgccctctgaggatggtaccaagaatgggcctttgggacttctcaggacattgacaatgtgcacactgcaggttgacttaatttatttattttttgaaaagaagagacagaaaataccttattatctgcagggactcaaagctgtacccaaatcaagaaagacaaaataacaatagaaaccattcacacactccgttcatgcatggacaccagaagacgattcagaacacaagaggagaatgagctggagcgccagcaccacgatggccccaggacgttgtttaagatctgagatcccttggtttctctcttgttgatctgagatgctacatcagggcccttgctgctgtattacctctgcccgggtgtttgagacaggtcacaagcgcgtggatgtttcctggaagtgtattcccctggggctcagcgatgctctgggaacccttggggtttggggaaggacagtgtggtgtgactattggcttgaaacgttatggatatggttggagtcacccatgtggatatgattttcagcttggagctgggatggagaagatggaagcactggtggccgggcctctttttccagcgaggccagccctggcttctcctctgttccagcttgtctgccagaagccttcccctgcaaggtgcccacctgcccggagacagagggagcagctgaggcctctctccactggccgccagcctccctagcacaaggggaccattcagcaatgagtgtttactcatgttctttcttgttgatgagttctgcggcccagcatatagaaatggctcagaacgttccaggccttggtgagacacagcagcgtccaatgctcacaggctgtccccactctgcctgttcccatcttcccctcgggacctgtttataaattgaggaatggatgagggccctggagggtccttgggagtagttagtggagggcaggattctcaggtccccatagagagggaaagagaagaccagatgtgcatagaagccagtctctgtcacatacaccgcaggtggtcaccgagttattttccaaaagctgaggaacataaagcaaatttaggcttttgtccttctgcaatacatgcacttgaaaataaacagaaaagagatgtttaataacaagtttacttccggtctgctagcaccctcagcctgggagctactgccagaggctggcgtagtggggcagctgctgaccaaaccccacagaacagagggcaccaggcatcacacgacatctttccctcccatctctgccatctgtctgtctggcaatggaaggagcttcagcaggaggtccttcccagaaggttgattcttggcctgggtggtagaggagatatcctgaccctaaagtcttccagccccgggtcatcctctcctatactagggcctattgaccgtagaggccaggtgcggtggctcatacctgtaatcccagcagttggggaggccaaggtgggaggattgcttgagcccaagagttggagaccagcctgggcaacatggtgagaccaattgactgtagggcttgtcccttgctaagacaggagcagaagactggatggctgtgtcctcaaggcagtcccctcccatccccattcccaaagtcagaaagtgaagccagatctcaagggctgatacctgaggcaaggagagctaaggggagagaaattggggctgagtggaagcagatgcctgcacaagccaagtgtgtcttattgatctgtacaagctgatagaaggaccatctgctgaaatccagggctcctgagttggtgggtttgcttgtgaagcttctaggacaaggcgcagccagatggaagggagagggtccagggcttcctaaatgcagccgcatcacctgtcaactcgctgcagtttcagagacagtggaagctgctctttacctcaaaagcacaaagcagaattggcaacttcacttgtctcaagagctccaagatcctttggtctcgtgtcctttggcaccccgtaactggactggggacaaatttgttacgtgtttccaaggctacagacatggcgccatcctcacaggcctagctcatgtcatggatcaggtgctttgctggggggatacaatgacccatgtggtctgcgtcttctgccattggcttgaactgggcaccccctgaagtctccatctcagctgtatattctagtccaaattttcctggctcccctgctccctcccaggtcctgcacactgtctttttgccaacacctcagccctgtttgctatttcatgtctgcatggtacgagacaccccttcacggcatacactgccatggtatgtacatatgcatccacgtgtgtgtatgtgtagcatgtagctcattctgctcagcctctggcgccgttccacattgctcccagccccattgctgtcactgtcgtcccagatgtccttgccatggccacagacaatctgccgtctcctggaaacgctggggctgcccttcagagagctggcagccccagcagtcagggcctgctttgcagaatagaatgtgaacccaactcctgatggcctacttgacttatttaattaaagatgaaatcatgcaatgagcaaaacctgcaaaaaa

SEQ ID NO: 578 - DNA, 10411 bp, Homo sapiens
agtctttcccataatgagctgcatcatctgaactgatgtcacagcatcatgcagcaggtcaaacaaggcatctcctagtattgcatcctacagatgtgctgtaaacatcaaaagaagacggtgggatcaggagatgctgttttggaaagaagtgaggtttagacttctccatgttaaccatgagcgtgacactttcccccctgaggtcacaggacctggatcccatggctactgatgcttcacccatggccatcaacatgacacccactgtggagcagggtgagggagaagaggcaatgaaggacatggactctgaccagcagtatgaaaagccacccccactacacacaggggctgactggaagattgtcctccacttacctgaaattgagacctggctccggatgacctcagagagggtccgagacctaacctattcagtccagcaggattcggacagcaagcatgtggatgtacatctagttcaactaaaggacatttgtgaagatatttctgatcatgttgagcaaatccatgccctccttgaaacagagttctccctaaagctgctgtcttactctgtcaacgtgatagtggacatccacgcagtgcagctcctctggcaccagcttcgagtctcagtgctggttctgcgggagcgcattctgcaaggtctgcaggacgccaatggcaactacactaggcagacggacattctgcaagctttctctgaagagacaaaagagggccggcttgattctctaacagaagtggatgactcaggacaattaaccatcaaatgttctcaaaattacttgtctctggattgtggcattactgcattcgaactgtctgactacagtccaagtgaggatttgctcagtgggctaggtgacatgacctctagccaagtcaaaaccaaaccctttgactcttggagctacagtgagatggaaaaggagtttcctgagcttatccgaagtgttggtttacttacggtagctgctgactctatctctaccaatggcagtgaagcagttactgaggaggtatctcaagtatctctctcagtagacgacaaaggtggatgtgaggaagacaatgcttctgcagtcgaagagcaaccaggcttaacactgggggtgtcatcatcttcaggagaagctctgacaaatgctgctcaaccctcctctgagactgtgcagcaagaatccagttcctcctcccatcatgatgcaaagaatcagcagcctgttccttgtgaaaatgcaacccccaaacgaaccatcagagattgctttaattataacgaggactctcccacgcagcctacattgccaaaaagaggactttttcttaaagaggaaacttttaagaatgatctgaaaggcaatggtggaaagaggcaaatggttgatctaaagcctgagatgagcagaagcaccccttcgctagtagatcctcctgacagatccaaactttgcctggtattgcagtcttcttaccccaacagcccttctgctgccagccagtcttatgagtgtttacacaaggtggggaatgggaaccttgaaaacacagtcaaatttcacattaaagaaatttcttccagcctgggaaggcttaacgactgctataaagagaaatctcgacttaaaaagccacacaagacctcagaagaggtgcctccatgccgaacacctaaacgggggactggttcaggcaaacaagctaaaaatacaaagagctcagcagtgccaaatggagagctttcttatacttccaaggccatagaggggccacaaacaaattctgcttccacatcctcacttgagccttgtaatcagagaagttggaatgccaaattgcaattgcagtcagaaacatccagttcaccagcttttactcagagcagtgaatcctctgttggctcagacaacatcatgtctccggtgccacttctttcaaaacacaaaagcaaaaaaggtcaagcctcctctccaagtcacgtcactaggaatggtgaggttgtggaggcctggtatggctctgatgaatacctagcactgccctctcaccttaagcagacagaagtattggctttgaagttggaaaacctaacaaagcttctgcctcagaaacccagaggagaaaccatccagaatattgatgactgggaactgtctgaaatgaattcagattctgaaatctatccaacctatcatgtcaaaaagaagcatacaaggctaggcagggtgtctccaagctcatctagtgacatagcctcttcactaggggagagcattgaatctgggcccctgagtgacattctttctgatgaggagtccagtatgcctctcgctggcatgaaaaagtatgctgatgagaagtcagaaagagcttcatcctctgagaaaaatgagagccattctgccactaaatcagctttaattcagaaactgatgcaagatattcagcaccaagacaactatgaagccatatgggaaaaaatagaggggtttgtaaacaaactggatgaattcattcaatggttaaatgaagccatggaaactacagagaattggactccccctaaagcagagatggatgaccttaaactgtatctggagacacacttgagttttaagttgaatgtagacagtcattgtgctctcaaggaagctgtggaggaggaaggacaccaacttcttgagcttattgcatctcacaaagcaggactgaaggacatgctgcggatgattgcaagtcaatggaaggagctgcagaggcaaatcaaacggcagcacagctggattctcagggctctggataccatcaaagccgagatactggctactgatgtgtctgtggaggatgaggaagggactggaagccccaaggctgaggttcaactatgctacctggaagcacaaagagatgctgttgagcagatgtccctcaagctgtacagcgagcagtataccagcagcagcaagcgaaaggaagagtttgctgatatgtcaaaagttcattcagtgggaagcaatgggcttctggactttgattcagaatatcaggagctctgggattggctgattgacatggagtcccttgtgatggacagccacgacctgatgatgtcagaggagcagcagcagcatctttacaagcgatacagtgtggaaatgtccatcagacacctgaaaaagacggagctgcttagtaaggttgaagctttgaagaaaggtggcgttttactaccaaatgatctccttgaaaaagtggattcaattaatgaaaaatgggaactgcttgggaaaaccctaggagagaagatccaggacacaatggcagggcacagtgggtcgagtccacgtgacctgctctctcctgaaagtggaagcctggtaaggcagctggaggtcaggatcaaagaactgaaaggatggctaagagatacagagcttttcatcttcaattcctgtctgagacaagaaaaggaaggaacaatgaatactgagaaacaactgcaatactttaagtccctctgtcgtgaaatcaagcaacgacgtcgaggagttgcctccattctgcgactatgccagcatcttttggatgaccgggagacttgcaatctgaatgcagaccaccagcccatgcagctgatcattgtaaatcttgaaagaaggtgggaagccattgtcatgcaagccgtccagtggcaaacacgtctacaaaagaagatgggaaaggaatctgagactttgaatgtgattgatcctggcttgatggacctaaatgggatgagtgaggatgccctggaatgggatgaaatggacataagtaacaagttaattagtttgaatgaggaatcaaatgaccttgatcaagaactccaacctgttatcccttccttgaagcttggagagacaagtaatgaggaccctggttatgacgaggaggctgataaccatgggggatctcagtatgcctcaaatattactgccccctctagtccacacatttaccaggtgtacagcctccacaatgttgaactctatgaggacaaccacatgccatttctgaaaaacaatccaaaggtcactggcatgacacagcctaatgttttaactaagagtctcagtaaagactcttcattttcatctaccaaatctttgccagatcttctaggtggttccaatttggtaaagccctgcgcatgtcatggaggagacatgagccagaattcaggcagtgagagtggaattgtcagtgaaggagacacagaaaccactaccaactctgaaatgtgcttgctcaatgcagtggatgggtccccaagtaaccttgaaactgaacatctggacccacaaatgggagatgcagttaacgtgttaaagcaaaaatttacagatgagggggaaagcattaagcttccaaatagctctcagtcgtccatttcaccagtgggttgtgtaaatggaaaagttggagatttaaacagtattaccaaacatacccctgactgtttgggagaagaattacaaggaaaacatgatgtgtttacattttatgattactcatacctccaaggctcaaaactcaaattaccaatgataatgaaacagtcacaaagcgaaaaagcgcatgtggaggatcccctgcttcgtggtttttattttgataaaaaatcatgcaaatctaaacatcagactacagagttacaaccagatgtacctccccatgaaaggattttggcaagtgcatctcatgaaatggatcgcatttcatataaaagtggcaatatagaaaagacattcactggcatgcagaatgccaaacagctctcccttttatctcatagttcatctattgagtccctttctccagggggtgatttatttggattgggcatctttaaaaatggcagtgacagcctccagcgaagcacttctttagaaagttggttgacttcctataaaagcaatgaagatctctttagctgtcacagctctggggatataagcgtgagcagtggctcagttggtgaactaagtaaaagaacattagatctcctgaatcgtttggagaatatccagagcccctcagagcaaaagataaaacgaagtgtttctgatatcactcttcaaagcagttcccaaaagatgtcctttactggccagatgtcattggacatagcatcttctatcaatgaagactcagcggcatctctaacagaacttagcagcagtgacgagctctctctttgctcagaggatattgtgttacacaagaacaagatcccggaatcgaatgcatcgttcaggaagcgtctgactcgttcagtggctgatgaaagcgatgtcaatgtcagcatgattgttaatgtctcttgcacctctgcttgcactgatgatgaagatgacagcgacctgctctccagctctacccttaccttgactgaagaagagctgtgcatcaaagatgaggatgacgactccagtattgcaacagatgatgaaatttatgaagactgcaccttgatgtcagggctagactacataaagaatgaattacagacctggattaggccaaaattgtctttgacaagagataagaaaaggtgcaatgtcagtgatgagatgaagggcagtaaagatataagtagcagtgagatgaccaatccctctgatactctgaatattgagacccttctaaatggctctgtaaaacgtgtctctgaaaataatggaaatggtaagaattcatctcatacccatgagttagggacaaagcgtgaaaataagaaaactattttcaaagttaataaagatccatatgtggctgacatggaaaatggcaatattgaaggtattccagaaaggcaaaagggaaaaccgaatgtgacttcaaaggtatcagaaaatcttggttcacatgggaaagagatttcagagagtgagcattgtaagtgtaaagcacttatggatagtttagatgattcaaatactgctggcaaggaatttgtttcccaagatgttagacatcttccaaagaaatgtccaaatcaccaccattttgaaaatcaaagcactgcctctactcccactgagaagtctttctcagaactggctttagaaaccaggtttaacaacagacaagactctgatgcactgaaatcatctgatgatgcaccgagtatggctggaaaatctgctggttgttgcctagcacttgaacaaaacggaacagaggaaaatgcttctatcagcaacatttcctgttgcaactgtgagccagatgttttccatcaaaaagatgccgaagattgttcagtacacaactttgttaaggaaatcattgacatggcttcgacagccctaaaaagtaaatctcaacctgaaaacgaggtggctgctcctacttcattaactcaaatcaaggagaaagtgttggagcattctcaccggcccatccagctgagaaaaggggacttttattcgtacttatctctctcatctcatgacagtgattgtggggaggtcaccaattacatagaagagaaaagcagcactccattgccactagacaccactgactcgggcttagatgacaaggaagatattgaatgcttttttgaggcctgtgttgagggtgactctgatggagaggagccttgtttctctagtgctcctccaaatgaatctgcagttcccagcgaagctgcaatgccactacaagcaacagcatgttcttctgagttcagtgatagttctctttcagctgatgatgcagatacagtggctctttcaagtccttcctctcaggaaagagctgaggttggaaaggaagtgaatggtttgccccaaacttccagtggctgtgcagaaaacttagagtttactccttcaaagcttgacagtgaaaaggaaagttccggaaaaccaggtgaatctggaatgccagaagaacataatgctgcttcagccaaatctaaagttcaagacctctccttgaaggcaaatcagccaacagacaaggccgcattgcatcccagccccaaaactttaacctgtgaagaaaatcttctaaaccttcatgaaaaacgacatagaaatatgcataggtagaatgtaccccctccccaagcatgaaaatcatctcactgaaagatacgcctggctgcaactcaggggtggcctcatcctcccgccctgggctggcctctggttccatcacgtttgtcactgccgtttattacattgacttctcccaagatgaatcttccttccaaatgtgttttctccacacaagccttgtgatctgaatgtgtgcgctggttctctttaggtgatcgtctttgaagttcagcaaagctgcttgttctcccatggattcctgtcccaagctacctctaccaaccctctctctccagctagacttttctctttgcctcctcccttcccttccactctttaaagttctgcagttcaccaactggtagtccattaaattctcctgtctagaatgacccccccaccagtacttgaccaatttcatgtatcaatctggatttttttttaacggtataatgactgtgtttattgaaagagttttacctaaaaagccaacatttgaattggttgcagcatagagaagaaacactggtccttctttcaaaattaagcaactattaaaagcgccattttatttatttcatttaaaaaataatctatgcagcatttcaagaaacaaccatatggtgttgtatattataaactggtgacattctactattgaattatgtacaacattttcattttttatgcttcttgaggtggtaatgagaaaaaagttttttaaaaaagtgtgccttgctgtatttcttataccatttattaaaaagctgctttcacggtaaaattatgttggtttgaaaggaggaaatagcaaggttaagatgtgtgaataatttctgtatatatgtataaccaagtacaaacattgatgtataatgacagtataaaatgctttcatgtttgtgatgtctagtgatgtggaaaatataagccttaaatccattagattgcatggtaattaaaattggcataataaacacagattattgggggaaaaggaaaattagtgatctcttctactatgttctttaccaaattgttgcatctggttctgaaaaagtatagcatgtagcagcttccaaacatattcatattgcttaagaggcttaacattacctaaactagagactagacgtaaagccttcagttttcaaaatctttctggtcactataaagatcttggaacagcaaatgattaaatgtcagttcccctaaaccaataaacatttatactagattttttatttccacttatcattaatgatttaatgttggatttcaggtaccttgtatgtcttaatttattttaaatatttattttgaatgagtttgatagaaagctagtagaaaagtacagaaaatttgactattatttatagatttcaggtatatttatatgtgtaaaagaaattgacaaagaaatatttcatctggcctttactgactcctgttaaatgcagttttaaatttatatcgtaacacctacttaagtgcctgacacagtaggtattcaataaaaatttactgaattaaaggattaaattaggtgacatggtgacatctatccctttattttgacactaaaacatggacacaactagaaagaggtacaatgcaatataaagtcacaatagataatatatatcaaatttctaaaaggtaaagaatgttgtgggttcatgcagtcacaggaatgacaatcattcaacagatagttcagaaacactttttatctgcaaggcactattctagatccagaagatgcaatgttgaacaaacagacaaagccctgccctcagaaggctgtcctgcattaggaacaagtgaacacgcaaatgacatgaagtatttgttgcagagctgaggaacagagcaaatgtagtgatagaagcgcaatgagagaagcagcagtgggtacaaggaggaagaaaaagggcttgcagagagtggaaagttagtggaatattcatgaaacttcattgcaggggtaatagaagaaaaagtaaattgggaggacttaatggaaggtcttttaaaaagttaacttggagcttctgtatgtaaaatgctaggtaataaggacactttgtacaggctgttttgcacctgattttatttatcattagtgccacgccaagatcatttagacgatgcttatctgtaattctaccactttaataactatttgtatttttatgccccttctgatcttttccatatgtatttctaaatggataaattattctaggcttcttaataggtagtaatttgttcaaaagcggttttagccagacatctagttgcagtgttcaagaggattatgggggaaagagattagagataattgtctagttagggggcagctggagaaaataagctaagtttgcaataacagagtacacaagtatagtggcccaggatgtagtgaaagaacaaatcctagagtctttgaaatttctaagggcattctagacctctgttgggatatggtattattttacatactgacacaacctaaattttctttgggtagtaactaatgtcaagtctacatcgactggtaaaacattcaaagaacaaactgacaatgatgttctacctacttgttacatgctcatggaagaccgtgcagtattgaaagtatttgttaattatctgcttagtattaacactaaatttgtagaatgactttcaggtttgttgaacaatgccttttcaggttggaagaagaaaaatagcctcaatctcccaccccatgtaggcactacctccccaattacccttagaaaatgatcacaccaactctgcctacacacttccagtgatagtggctcattgtctgttaaggcaaactgttccactgttgggcatatctctttgttagaaagttctttcttaggttgctaaaatctgcctagtaccccgctaccctgttctgtcttatggagcagcccagattatctttactccctctttctcatggcaaccctgaagataatcaaggccagttactcatcatctcccaaccactgtttcctcaactgcccttcatatgtcatggttttcagatccattccaacctgactgaatgttaacagacagaattcttcacattaaggaactgtcttcatcatcatacatgtagaaaagaatctgaacatttaagtgcgaagttttctctagaaatatattcaagatatgtttattctattattgtaaatttcaaacaataaataaataagaatccaaaaaaaaaaaaaaaaaaaaaaaaa

SEQ ID NO: 579 - DNA, 2986 bp, Homo sapiens
aatcagagacgtagcggagcccggcggactacattgcccagtaacctcctgggctccgctgtgtttttctattctggggtgtaaggggcagctggaccactccagctgggactgctaggaaggttgcgggtccacccggccgagccgaacgagggaaatggtcctcacccggccactcgccggttgaaaaggggccgccctggcagggaagcggccgccgcggcgcggtgcagcgcagcggcgagaaggagtgcgttatcgtcttgcgctactgctgaatgtccgtcccggaggaggaggagaggcttttgccgctgacccagagatggccccgagcgagcaaattcctactgtccggctgcgcggctaccgtggccgagctagcaacctttcccctggatctcacaaaaactcgactccaaatgcaaggagaagcagctcttgctcggttgggagacggtgcaagagaatctgccccctataggggaatggtgcgcacagctctagggatcattgaagaggaaggctttctaaagctttggcaaggagtgacacccgccatttacagacacgtagtgtattctggaggtcgaatggtcacatatgaacatctccgagaggttgtgtttggcaaaagtgaagatgagcattatcccctttggaaatcagtcattggagggatgatggctggtgttattggccagtttttagccaatccaactgacctagtgaaggttcagatgcaaatggaaggaaaaaggaaactggaaggaaaaccattgcgatttcgtggtgtacatcatgcatttgcaaaaatcttagctgaaggaggaatacgagggctttgggcaggctgggtacccaatatacaaagagcagcactggtgaatatgggagatttaaccacttatgatacagtgaaacactacttggtattgaatacaccacttgaggacaatatcatgactcacggtttatcaagtttatgttctggactggtagcttctattctgggaacaccagccgatgtcatcaaaagcagaataatgaatcaaccacgagataaacaaggaaggggacttttgtataaatcatcgactgactgcttgattcaggctgttcaaggtgaaggattcatgagtctatataaaggctttttaccatcttggctgagaatgaccccttggtcaatggtgttctggcttacttatgaaaaaatcagagagatgagtggagtcagtccattttaaacccctaaagatgcaacccttaaagatacagtgttcagtattattgaaatatgggcatctgcaacacataccccctattatttctacctctttaggaagacacctattccacagagactgatttatagggggcagcactttatttttttctggaaacccaagttctctttgactcctctttttgtccaaaagtgatctggtcggatctcacaaggccatccaatgagaccccgcacagcattttctaaagaagaatcgaagcctgaccactttcaccttgggcaagaaggtttggcctttgagttgctattctatgctgaagagcctgcttagaggaggagtaccaggagggagccagcatttcagatctgaagtagacgataggaatgtggaagaacacatacatagtgcttaagaaatacatttaacctgttatgtcagtatttatcaatgaagtttgataattcacttttctgtcattgttaaagcgtacatactgtaaattaaagggaggtgaatggaaattaatgaataaacattttgagtttccctagtgttgaaggaaggtgtactttttcttgtcagaaagataaaaaaaatcaagttgagatgatgtttgaatttcaagaaaagaggctgctttctgtcagtgccctctcattagatctgtgttaattagttagcactccactgcacatgctaatgacttcctctgacagccacacaccgaatcttgatgaaaaaagagaagagcatttgccttgttacatagtctgttacaagccagatatgttgctagctctcaagagttgtaatatattaagaactacaacttatttgattaaaactcagctgtatagatccttttataaagcaccttttgttaaacatcagcctttcattggtattttaaaagcaaggcagatagatatgaagtcagccaactctgacatgcgtcctttcttatctcccttacctgacactaggggctctagagaggcagagagagcactcacaaatcacactaaaactgccagcggcctgactcttactcagtttagcaaaaattcttgcctaaaaagtgataagtaaaaatctgtttatggtatacagttatgtctcgaatctttgaatcaaatccatgttcttattttagaaaggtaagagttcttcaaattcagctacataccaccggctctcccaacctcagacggtgggcatttctggatggatggctgcggttatggataaaggctgtaactgttaacacagaaaaacatgaaaagctcaggcccaagaaaggccttggagccagccaaacagaatttgttctaatggacatggatgatgttgaacagaaaaaagtttacaagtgctttgtggttgcactaatgtatactcactgccattttaagagggggaagtacattttaaaatatatttgaatgtcatgtactgatatgcagtagcttattgtttttctagttgcagagaatgtgaagtttaatctcttaaaatatttagatggtctactttttcattgaatttgtcaatatgtaattgcgttgtaaaatattatatatatatatatatatatatatatatatatatgcttaacttcccaagtgttctgcattgaaccacttagggaaaattttgtttgtttttatgttttgtaatttttaaaattaagtaaagactggatcaaaataattgcatccaacctggaccgtgaa

SEQ ID NO: 580 - DNA, 4564 bp, Homo sapiens
ggggaggcgccgggggcgcgcgcgcgcgcgctgggcgctgctgggctgcggcggcggcggcggcggcggtggttactatggcggagtcggccggagcctcctccttcttcccccttgttgtcctcctgctcgccggcagcggcgggtccgggccccggggggtccaggctctgctgtgtgcgtgcaccagctgcctccaggccaactacacgtgtgagacagatggggcctgcatggtttccattttcaatctggatgggatggagcaccatgtgcgcacctgcatccccaaagtggagctggtccctgccgggaagcccttctactgcctgagctcggaggacctgcgcaacacccactgctgctacactgactactgcaacaggatcgacttgagggtgcccagtggtcacctcaaggagcctgagcacccgtccatgtggggcccggtggagctggtaggcatcatcgccggcccggtgttcctcctgttcctcatcatcatcattgttttccttgtcattaactatcatcagcgtgtctatcacaaccgccagagactggacatggaagatccctcatgtgagatgtgtctctccaaagacaagacgctccaggatcttgtctacgatctctccacctcagggtctggctcagggttacccctctttgtccagcgcacagtggcccgaaccatcgttttacaagagattattggcaagggtcggtttggggaagtatggcggggccgctggaggggtggtgatgtggctgtgaaaatattctcttctcgtgaagaacggtcttggttcagggaagcagagatataccagacggtcatgctgcgccatgaaaacatccttggatttattgctgctgacaataaagataatggcacctggacacagctgtggcttgtttctgactatcatgagcacgggtccctgtttgattatctgaaccggtacacagtgacaattgaggggatgattaagctggccttgtctgctgctagtgggctggcacacctgcacatggagatcgtgggcacccaagggaagcctggaattgctcatcgagacttaaagtcaaagaacattctggtgaagaaaaatggcatgtgtgccatagcagacctgggcctggctgtccgtcatgatgcagtcactgacaccattgacattgccccgaatcagagggtggggaccaaacgatacatggcccctgaagtacttgatgaaaccattaatatgaaacactttgactcctttaaatgtgctgatatttatgccctcgggcttgtatattgggagattgctcgaagatgcaattctggaggagtccatgaagaatatcagctgccatattacgacttagtgccctctgacccttccattgaggaaatgcgaaaggttgtatgtgatcagaagctgcgtcccaacatccccaactggtggcagagttatgaggcactgcgggtgatggggaagatgatgcgagagtgttggtatgccaacggcgcagcccgcctgacggccctgcgcatcaagaagaccctctcccagctcagcgtgcaggaagacgtgaagatctaactgctccctctctccacacggagctcctggcagcgagaactacgcacagctgccgcgttgagcgtacgatggaggcctacctctcgtttctgcccagccctctgtggccaggagccctggcccgcaagagggacagagcccgggagagactcgctcactcccatgttgggtttgagacagacaccttttctatttacctcctaatggcatggagactctgagagcgaattgtgtggagaactcagtgccacacctcgaactggttgtagtgggaagtcccgcgaaacccggtgcatctggcacgtggccaggagccatgacaggggcgcttgggaggggccggaggaaccgaggtgttgccagtgctaagctgccctgagggtttccttcggggaccagcccacagcacaccaaggtggcccggaagaaccagaagtgcagcccctctcacaggcagctctgagccgcgctttcccctcctccctgggatggacgctgccgggagactgccagtggagacggaatctgccgctttgtctgtccagccgtgtgtgcatgtgccgaggtgcgtcccccgttgtgcctggttcgtgccatgcccttacacgtgcgtgtgagtgtgtgtgtgtgtctgtaggtgcgcacttacctgcttgagctttctgtgcatgtgcaggtcgggggtgtggtcgtcatgctgtccgtgcttgctggtgcctcttttcagtagtgagcagcatctagtttccctggtgcccttccctggaggtctctccctcccccagagcccctcatgccacagtggtactctgtgtctggcaggctactctgcccaccccagcatcagcacagctctcctcctccatctcagactgtggaaccaaagctggcccagttgtccatgacaaaagaggcttttgggccaaaatgtgagggtggtgggtgggatgggcagggaaggaatcctggtggaagtcttgggtgttagtgtcagccatgggaaatgagccagcccaagggcatcatcctcagcagcatcgaggaagggccgaggaatgtgaagccagatctcgggactcagattggaatgttacatctgtctttcatctcccagatcctggaaacagcagtgtatatttttggtggtggtgggtttggggtggggaagggaagggcgggcaaggagtggggagggagtctggggtgggagggaggcatctgcatgggtcttcttttactggactgtctgatcagggtggagggaaggtgagaggtttgcatccacttcaggagccctactgaagggaacagcctgagccgaacatgttatttaacctgagtatagtatttaacgaagcctagaagcacggctgtgggtggtgatttggtcagcatatcttaggtatataataactttgaagccataacttttaactggagtggtttgatttctttttttaattttattgggagggtttggattttaactttttttaatgttgttaaatattaagtttttgtaaaaggaaaaccatctctgtgattacctctcaatctatttgtttttaaagaaatccctaaaaaaaaaaattatccaattgaacgcacatagctcaatcacactggaaatgtttgtccttgcacctgagcctgttcccactcagcagtgagagttcctctttgccctgaggctcagtctctctcgtattttgtccccacccccaattccttgagtggtttttgctctagggccctttcttgcactgtccagctggttgtaccctctccaggcatttattcaacaaatgtgggtgaagtgcctgctgggtgccaggtgctgggaatacatctgtggacaagacatgcttgggtcctactcctggagcactgtaaaaagagctgattcaagtaagtagatgcctgttttgagaccagaaggtttcataattggttctacgacccttttgagcctagaattattgttcttatataagatcactgaagaaagaggaacccccacaaccccctccacaaagagaccaggggcgggtgatgagacctggggtttagaaccccaggtgagacctcaaatcactgcattcattctgagcccccttcctgtccccaggggaggtgtattgtgtatgtagccttagagcatctctgcctccaacccagcagttctctgccaaagcttgtggaggagggagagccctgtccctgccctcaggctccccagtgctcctggcccttctatttatttgactgattattgcttctttccttgcattaaaggagatcttcccctaacctttgggccaatttactggccactaatttcgtttaaataccattgtgtcattggggggaccgtctttacccctgctgacctcccacctatccgccctgcagcagaaccttggcggtttataggtaatgatggaacttagactcctcttcccagagtcacaagtagcctctgggatctgccaacacacgtccactcccaagccactagcccactccccagttggcccttctgcccttaccccacacacagtccaactcttccacctctggggaagatggagcaggtctttgggaagctcccacacccacctctgccactcttaacactaagtgagagttggggagaaactgaagccgtgtttttggccccccgaggctaaccctgatccatagtgctacctgcacctctggattctggattcacagaccaagtccaagcccgttcttacgtcgccataaaggcccccgaacggcattctcggtacttctgtttgtttttgtacattttattagaaaggactgtaaaatagccacttagacactttacctcttcagtatgcaaatgtaaataaattgtaatataggaaatcttttgttttaatataagaatgagcctgtccaatttctgctgtacattattaaaagttttattcacagag

SEQ ID NO: 581 - DNA, 2689 bp, Homo sapiens
acatctcccggcggcgggccgcggaagcagtgcagacgcggctcctagcggatgggtgctattgtgaggcggttgtagaagagtttcgtgagtgctcgcagctcatacctgtggctgtgtatccgtggccacagctggttggcgtcgccttgaaatcccaggccgtgaggagttagcgagccctgctcacactcggcgctctggttttcggtgggtgtgccctgcacctgcctcttcccccattctcattaataaaggtatccatggagaacactgaaaactcagtggattcaaaatccattaaaaatttggaaccaaagatcatacatggaagcgaatcaatggactctggaatatccctggacaacagttataaaatggattatcctgagatgggtttatgtataataattaataataagaattttcataaaagcactggaatgacatctcggtctggtacagatgtcgatgcagcaaacctcagggaaacattcagaaacttgaaatatgaagtcaggaataaaaatgatcttacacgtgaagaaattgtggaattgatgcgtgatgtttctaaagaagatcacagcaaaaggagcagttttgtttgtgtgcttctgagccatggtgaagaaggaataatttttggaacaaatggacctgttgacctgaaaaaaataacaaactttttcagaggggatcgttgtagaagtctaactggaaaacccaaacttttcattattcaggcctgccgtggtacagaactggactgtggcattgagacagacagtggtgttgatgatgacatggcgtgtcataaaataccagtggaggccgacttcttgtatgcatactccacagcacctggttattattcttggcgaaattcaaaggatggctcctggttcatccagtcgctttgtgccatgctgaaacagtatgccgacaagcttgaatttatgcacattcttacccgggttaaccgaaaggtggcaacagaatttgagtccttttcctttgacgctacttttcatgcaaagaaacagattccatgtattgtttccatgctcacaaaagaactctatttttatcactaaagaaatggttggttggtggttttttttagtttgtatgccaagtgagaagatggtatatttggtactgtatttccctctcattttgacctactctcatgctgcagagggtactttaagacatactccttccatcaaatagaaccactatgaagctacctcaaacttccagtcaggtagttgcaattgaattaaattaggaataaataaaaatggatactggtgcagtcattatgagaggcaatgattgttaatttacagctttcatgattagcaagttacagtgatgctgtgctatgaattttcaagtaattgtgaaaaagttaaacattgaagtaatgaatttttatgatattccccccacttaagactgtgtattctagttttgtcaaactgtagaaatgatgatgtggaagaacttaggcatctgtgggcatggtcaaaggctcaaacctttattttagaattgatatacacggatgacttaactgcatttttagaccatttatctgggattatggttttgtgatgtttgtcctgaacacttttgttgtaaaaaaataataataatgtttaatattgagaaagaaactaatattttatgtgagagaaagtgtgagcaaactaacttgacttttaaggctaaaacttaacattcatagaggggtggagttttaactgtaaggtgctacaatgcccctggatctaccagcataaatatcttctgatttgtccctatgcatatcagttgagcttcatataccagcaatatatctgaagagctattatataaaaaccccaaactgttgattattagccaggtaatgtgaataaattctataggaacatatgaaaatacaacttaaataataaacagtggaatataaggaaagcaataaatgaatgggctgagctgcctgtaacttgagagtagatggtttgagcctgagcagagacatgactcagcctgttccatgaaggcagagccatggaccacgcaggaagggcctacagcccatttctccatacgcactggtatgtgtggatgatgctgccagggcgccatcgccaagtaagaaagtgaagcaaatcagaaacttgtgaagtggaaatgttctaaaggtggtgaggcaataaaaatcatagtactctttgtagcaaaattcttaagtatgttattttctgttgaagtttacaatcaaaggaaaatagtaatgttttatactgtttactgaaagaaaaagacctatgagcacataggactctagacggcatccagccggaggccagagctgagccctcagcccgggaggcaggctccaggcctcagcaggtgcggagccgtcactgcaccaagtctcactggctgtcagtatgacatttcacgggagatttcttgttgctcaaaaaatgagctcgcatttgtcaatgacagtttcttttttcttactagacctgtaacttttgtaaatacacatagcatgtaatggtatcttaaagtgtgtttctatgtgacaattttgtacaaatttgttattttccatttttatttcaaaatatacattcaaacttaaaattaaaaaaaaaaaaaaaaa

SEQ ID NO: 582 - DNA, 1462 bp, Homo sapiens
ggcaagcgccggtggggcggcggcgccagagctgctggagcgctcggggtccccgggcggcggcggcggcgcagaggaggaggcaggcggcggccccggtggctcccccccggacggtgcgcggcccggcccgtctcgcgaactcgcggtggtcgcgcggccccgcgctgctccgaccccgggcccctccgccgccgccatggctcggccgctagtgcccagctcgcagaaggcgctgctgctggagctcaaggggctgcaggaagagccggtcgagggattccgcgtgacactggtggacgagggcgatctatacaactgggaggtggccatcttcgggccccccaacacctactacgagggcggctacttcaaggcgcgcctcaagttccccatcgactacccatactctccaccagcctttcggttcctgaccaagatgtggcaccctaacatctacgagacgggggacgtgtgtatctccatcctccacccgccggtggacgacccccagagcggggagctgccctcagagaggtggaaccccacgcagaacgtcaggaccattctcctgagtgtgatctccctcctgaacgagcccaacaccttctcgcccgcaaacgtggacgcctccgtgatgtacaggaagtggaaagagagcaaggggaaggatcgggagtacacagacatcatccggaagcaggtcctggggaccaaggtggacgcggagcgtgacggcgtgaaggtgcccaccacgctggccgagtactgcgtgaagaccaaggcgccggcgcccgacgagggctcagacctcttctacgacgactactacgaggacggcgaggtggaggaggaggccgacagctgcttcggggacgatgaggatgactctggcacggaggagtcctgacaccaccagaataaacttgccgagtttacctcactagggccggacccgtggctccttagacgacagactacctcacggaggttttgtgctggtccccgtctcctctggttgtttcgttttggctttttctccctccccatgtctgttctgggttttcacgtgcttcagagaagaggggctgccccaccgccactcacgtcactcggggctcggtggacgggcccagggtgggagcggccggcccacctgtcccctcgggaggggagctgagcccgacttctaccggggtcccccagcttccggactggccgcaccccggaggagccacgggggcgctgctgggaacgtgggcggggggccgtttcctgacactaccagcctgggaggcccaggtgtagcggtccgaggggcccggtcctgcctgtcagctccaggtcctggagccacgtccagcacagagtggacggattcaccgtggccgactcttttccctgctttggtttgtttgaaatctaaataaaactactttatgagaaaaaaaaaaaaaaaaaa

SEQ ID NO: 583 - DNA, 2040 bp, Homo sapiens
tcgctgcgaaggacatttgggctgtgtgtgcgacgcgggtcggaggggcagtcgggggaaccgcgaagaagccgaggagcccggagccccgcgtgacgctcctctctcagtccaaaagcggcttttggttcggcgcagagagacccgggggtctagcttttcctcgaaaagcgccgccctgcccttggccccgagaacagacaaagagcaccgcagggccgatcacgctgggggcgctgaggccggccatggtcatggaagtgggcaccctggacgctggaggcctgcgggcgctgctgggggagcgagcggcgcaatgcctgctgctggactgccgctccttcttcgctttcaacgccggccacatcgccggctctgtcaacgtgcgcttcagcaccatcgtgcggcgccgggccaagggcgccatgggcctggagcacatcgtgcccaacgccgagctccgcggccgcctgctggccggcgcctaccacgccgtggtgttgctggacgagcgcagcgccgccctggacggcgccaagcgcgacggcaccctggccctggcggccggcgcgctctgccgcgaggcgcgcgccgcgcaagtcttcttcctcaaaggaggatacgaagcgttttcggcttcctgcccggagctgtgcagcaaacagtcgacccccatggggctcagccttcccctgagtactagcgtccctgacagcgcggaatctgggtgcagttcctgcagtaccccactctacgatcagggtggcccggtggaaatcctgccctttctgtacctgggcagtgcgtatcacgcttcccgcaaggacatgctggatgccttgggcatcactgccttgatcaacgtctcagccaattgtcccaaccattttgagggtcactaccagtacaagagcatccctgtggaggacaaccacaaggcagacatcagctcctggttcaacgaggccattgacttcatagactccatcaagaatgctggaggaagggtgtttgtccactgccaggcaggcatttcccggtcagccaccatctgccttgcttaccttatgaggactaatcgagtcaagctggacgaggcctttgagtttgtgaagcagaggcgaagcatcatctctcccaacttcagcttcatgggccagctgctgcagtttgagtcccaggtgctggctccgcactgttcggcagaggctgggagccccgccatggctgtgctcgaccgaggcacctccaccaccaccgtgttcaacttccccgtctccatccctgtccactccacgaacagtgcgctgagctaccttcagagccccattacgacctctcccagctgctgaaaggccacgggaggtgaggctcttcacatcccattgggactccatgctccttgagaggagaaatgcaataactctgggaggggctcgagagggctggtccttatttatttaacttcacccgagttcctctgggtttctaagcagttatggtgatgacttagcgtcaagacatttgctgaactcagcacattcgggaccaatatatagtgggtacatcaagtccatctgacaaaatggggcagaagagaaaggactcagtgtgtgatccggtttctttttgctcgcccctgttttttgtagaatctcttcatgcttgacatacctaccagtattattcccgacgacacatatacatatgagaatataccttatttatttttgtgtaggtgtctgccttcacaaatgtcattgtctactcctagaagaaccaaatacctcaatttttgtttttgagtactgtactatcctgtaaatatatcttaagcaggtttgttttcagcactgatggaaaataccagtgttgggtttttttttagttgccaacagttgtatgtttgctgattatttatgacctgaaataatatatttcttcttctaagaagacattttgttacataaggatgacttttttatacaatggaataaattatggcatttctattgaaatttcaaaaaaaaaaaaaaaaaa

SEQ ID NO: 584 - DNA, 5062 bp, Homo sapiens
gaacaagggagctggcgccgccagcagccgccgagctgggttgagccgctgggccgcgccgcgcgccgccgccgtctgggaggctcggcccggccgcccgagcaggccgcgcgcgggccgccgggcccgaggccagagccatgggcgagaccaagatcatctaccacttggatgggcaggagacgccgtaccttgtgaagctgcccctgcccgccgagcgcgtcaccttggcggactttaagggcgttttgcagcgacccagctataagttcttcttcaagtctatggacgacgatttcggagtggtgaaggaggagatctcggatgacaatgccaagctaccatgcttcaatggccgggtggtgtcctggctggtgtcagctgagggctcacacccagacccagcccccttctgtgctgataacccatcggagctgccaccacctatggagcgcacgggaggcatcggggactcccgacccccatccttccaccctcatgctggtgggggcagccaggagaacctggacaatgacacagagacggactctttggtgtctgcccagcgagagcggccacgccggagggatggcccagagcatgcaacccggctaaatggaactgcgaagggggaacggcggcgagaaccagggggttatgatagctcatccacccttatgagcagtgagctggagaccaccagcttctttgactcagatgaggatgactccaccagcaggttcagcagctccacagaacagagcagtgcctcacgcctgatgagaagacacaagcggcggcggcggaagcagaaggtttctcggattgagcggtcctcgtccttcagcagcatcacggactccaccatgtcactcaacatcatcacggtcactctcaacatggaaaaatataacttcttgggcatctccattgtgggccaaagcaacgagcgtggtgacggcggcatctacattggctctatcatgaagggtggggccgtggctgctgatggacgcatcgagccaggagatatgttgttacaggtaaacgagatcaactttgagaacatgagtaatgacgatgcagtccgggtactgcgggagattgtgcacaaaccggggcccatcaccctgactgtagccaagtgctgggacccaagtccacgtggttgcttcacattgcccaggagcgagcccatccggcccattgaccctgcggcctgggtctcccacactgcagccatgaccggcaccttccctgcatacggcatgagcccctccctgagcaccatcacctccaccagctcctccatcaccagttccatccctgacacagagcgcctagacgacttccacttgtccatccacagtgacatggctgccatcgtaaaagccatggcctcccctgaatcagggttggaggtccgtgaccgcatgtggctcaagattaccatccctaatgctttcatcggctcagatgtggtggactggctgtaccacaatgtggaaggcttcacggaccggagggaggcccgcaagtatgccagcaacctgctgaaagctggcttcatccgccataccgtcaacaagatcaccttctccgagcagtgctactacatcttcggtgacctctgcggcaacatggccaacctgtctctccacgatcacgatggctccagtggcgcctctgaccaggacacactggcccctttgccgcacccgggggccgccccttggcccatggctttcccgtaccagtacccgccacccccgcacccatacaacccgcacccgggcttcccggagctgggctacagctacggcgggggcagcgccagcagtcagcacagcgaaggcagtcggagcagtggctccaaccgtagcggcagcgatcggaggaaggagaaggacccgaaggccggggactccaagtccgggggcagcggcagcgaatcggaccacaccacacgcagcagcctgcgggggccgcgggagcgggcgcccagcgagcgctcagggccggcggccagcgagcacagccaccgcagccaccattccctggccagcagccttcgcagccaccacacacacccgagctacggtcctcccggagtgccccctctctacggcccccccatgctgatgatgcccccgccgcccgcggccatggggcccccaggagcccctccgggccgcgacctggcctcagtgcccccggaactgaccgccagcagacagtccttccgcatggccatgggaaaccccagtgagttctttgtggatgtgatgtgagcagggcccctcccccagctccattccgctcccaccccagccggctgcgttcctctctccatccgtccgtcttttttactttgtctggtacctgaaagggaaataaaaggaactaaatccaggtgcgctaactgctcgcagggtgctgcgagggtggggtgcacctaccgattggctctgcagccccctaacctgcctctggccccagttcgtttcctctgcccactaatccctgcgcaggacttcccaggaccccttttgtctctgggaccagacttgttggtgctaccccttactcccctctgcaacccccattttgggagttgaccccagcaatgaccttggtggcacgctcactccctcattctctcgtttcccctttagctccctttcaccatttattcagctacatcatccctctattaaccccaccccatcaggcacgtgtgcaaacctcttgactttaccccacattactgaaaccaaaatatatttgcttcatctgcccctactaaccatccccctgcctgctgcctcagtcctgcaacctaaagctgtagtcgcctccaatagccatccatgccatccctgcctgtgcctagatcagaggcccagagggccccctcagttgcctgagcagctggtggcttccagggagcatctctgctctacccctgccccatgcctgccctgcgtgctggttccttcagacccctaaccctactaaccagcaggctcatctcacctccaggcctgaaacatttcttttctttcttttttcctcccccaatttaccctgggcctggagcagccaagaatttcgggctgtttgactttctgtgagcccccagcgaggggaggcccagcctccgaggagaccaggaaccctgcttcagcagcccctcagggcttcccaaggatgtccagcccccacacccacacgttaacataatgagtcactaggcttctggggagggcccaacttcacccatgcatgagagactctcctcctttccagagagaatcggatcgcaccacgtgtggcagcctgcggcggggggaggggggcctctttagctctctttatctttctctctcactcatgtatgcatacatgcacagagatgcatacacaggtgcctatgcaagttcatttaagcctcagggctggtccctgcccaaagggctggaccctcctaatcctctcctaggttgtggggctggtcccctgacacccttctccccttcctggtagaccttaaacctcgcacacatgtccccagcattttctcacctggataaagcccataagctgggtctcaggctgggctcagcaaaggactcgccttgcaaccgacaggccattcccacccccacacacaacctcccctgttttcacattcaccatggcatcccagagcaaggacacaggagcccacaggccagttgaggttgggcaaggagacttccaggacttccagacagagtaccaggttttatttttcaccttattctctactttaaacaaatcataactttctctttaagcctctgctataaattctcctggctctcctgggcttccatattttgggggctggggtgtcaaaagtgagatgaagttcttagctccaggttttggggtaaaccaaggtaggaacattttggcatttatttcaattaacaatacttccttggacgggtgcggtggctcacgtctgtaatcccagcactttgggaggctgagacaggtggatcacttgaggtcgggagttcgagaccagcctggccaacatagcaaaaccctgtctctactaaaaatacaaaaattagatgggtgttttggcacctgcctgtaatctcagctactcaggaggctgaggcacaagaatcgcttgaatccaggaagcaagcggaggttgcagtgagttgagatcgcactccagcctgggtgacagagtgagattctgtctcaaaagcaaactaacaaagaaaaacaatacttcctggggttttggtgtgcagagggctttgttggaagtgtgactcaatcttgcctgccttctgggagctctagaattgttcccaacccagtccatggcttctagccaccactacagggctgtttcatgtacttctctctctgactctgtcttgtccgactctcttgagaatttctcaacgattgctcatgcctgtcagtatcagtgcttccatcgttccatctttgattcacttctctttcctttctatttactcccaaaatggagtcattcatcctgatgtcctcaattgctgctgatatgctggtgattcccaaatacatagctccaacccccaacttcccccagactttagatctgtattggtattacctactggacatctctatggacagttccgtatagactcaactcatctgcccaaccaagtatgttcctcctgaattcctctcctggttacttcatcacaatctacataggctcaccagctagaaacatttatgagcttacattccttcttcccatatcttatcagcatatcatatccatttcactccaacactctgtcttgaatttggccctccctctcccctctctactttaattcattggagcatgggatttggagttaggtggttttgggtttgaattccagctctactatttttggttgtgtgatagagttatttaacctctctgagcctcagttccctcgtatgtaaaatgatgataataatacctacctcacagggttgttgtgaggattta

SEQ ID NO: 585 - DNA, 6364 bp, Homo sapiens
ctgggatagaagcggcaggagcagcgttggcaccggcgaaccatggctgggattttctatttcgccctattttcgtgtctcttcgggatttgcgacgctgtcacaggttccagggtataccccgcgaatgaagttaccttattggattccagatctgttcagggagaacttgggtggatagcaagccctctggaaggagggtgggaggaagtgagtatcatggatgaaaaaaatacaccaatccgaacctaccaagtgtgcaatgtgatggaacccagccagaataactggctacgaactgattggatcacccgagaaggggctcagagggtgtatattgagattaaattcaccttgagggactgcaatagtcttccgggcgtcatggggacttgcaaggagacgtttaacctgtactactatgaatcagacaacgacaaagagcgtttcatcagagagaaccagtttgtcaaaattgacaccattgctgctgatgagagcttcacccaagtggacattggtgacagaatcatgaagctgaacaccgagatccgggatgtagggccattaagcaaaaaggggttttacctggcttttcaggatgtgggggcctgcatcgccctggtatcagtccgtgtgttctataaaaagtgtccactcacagtccgcaatctggcccagtttcctgacaccatcacaggggctgatacgtcttccctggtggaagttcgaggctcctgtgtcaacaactcagaagagaaagatgtgccaaaaatgtactgtggggcagatggtgaatggctggtacccattggcaactgcctatgcaacgctgggcatgaggagcggagcggagaatgccaagcttgcaaaattggatattacaaggctctctccacggatgccacctgtgccaagtgcccaccccacagctactctgtctgggaaggagccacctcgtgcacctgtgaccgaggctttttcagagctgacaacgatgctgcctctatgccctgcacccgtccaccatctgctcccctgaacttgatttcaaatgtcaacgagacatctgtgaacttggaatggagtagccctcagaatacaggtggccgccaggacatttcctataatgtggtatgcaagaaatgtggagctggtgaccccagcaagtgccgaccctgtggaagtggggtccactacaccccacagcagaatggcttgaagaccaccaaagtctccatcactgacctcctagctcataccaattacacctttgaaatctgggctgtgaatggagtgtccaaatataaccctaacccagaccaatcagtttctgtcactgtgaccaccaaccaagcagcaccatcatccattgctttggtccaggctaaagaagtcacaagatacagtgtggcactggcttggctggaaccagatcggcccaatggggtaatcctggaatatgaagtcaagtattatgagaaggatcagaatgagcgaagctatcgtatagttcggacagctgccaggaacacagatatcaaaggcctgaaccctctcacttcctatgttttccacgtgcgagccaggacagcagctggctatggagacttcagtgagcccttggaggttacaaccaacacagtgccttcccggatcattggagatggggctaactccacagtccttctggtctctgtctcgggcagtgtggtgctggtggtaattctcattgcagcttttgtcatcagccggagacggagtaaatacagtaaagccaaacaagaagcggatgaagagaaacatttgaatcaaggtgtaagaacatatgtggacccctttacgtacgaagatcccaaccaagcagtgcgagagtttgccaaagaaattgacgcatcctgcattaagattgaaaaagttataggagttggtgaatttggtgaggtatgcagtgggcgtctcaaagtgcctggcaagagagagatctgtgtggctatcaagactctgaaagctggttatacagacaaacagaggagagacttcctgagtgaggccagcatcatgggacagtttgaccatccgaacatcattcacttggaaggcgtggtcactaaatgtaaaccagtaatgatcataacagagtacatggagaatggctccttggatgcattcctcaggaaaaatgatggcagatttacagtcattcagctggtgggcatgcttcgtggcattgggtctgggatgaagtatttatctgatatgagctatgtgcatcgtgatctggccgcacggaacatcctggtgaacagcaacttggtctgcaaagtgtctgattttggcatgtcccgagtgcttgaggatgatccggaagcagcttacaccaccaggggtggcaagattcctatccggtggactgcgccagaagcaattgcctatcgtaaattcacatcagcaagtgatgtatggagctatggaatcgttatgtgggaagtgatgtcgtacggggagaggccctattgggatatgtccaatcaagatgtgattaaagccattgaggaaggctatcggttaccccctccaatggactgccccattgcgctccaccagctgatgctagactgctggcagaaggagaggagcgacaggcctaaatttgggcagattgtcaacatgttggacaaactcatccgcaaccccaacagcttgaagaggacagggacggagagctccagacctaacactgccttgttggatccaagctcccctgaattctctgctgtggtatcagtgggcgattggctccaggccattaaaatggaccggtataaggataacttcacagctgctggttataccacactagaggctgtggtgcacgtgaaccaggaggacctggcaagaattggtatcacagccatcacgcaccagaataagattttgagcagtgtccaggcaatgcgaacccaaatgcagcagatgcacggcagaatggttcccgtctgagccagtactgaataaactcaaaactcttgaaattagtttacctcatccatgcactttaattgaagaactgcactttttttacttcgtcttcgccctctgaaattaaagaaatgaaaaaaaaaaacaatatctgcagcgttgcttggtgcacagattgctgaaactgtggggcttacagaaatgactgccggtcatttgaatgagacctggaacaaatcgtttctcagaagtacttttctgttcatcaccagtctgtaaaatacatgtacctatagaaatagaacactgcctctgagttttgatgctgtatttgctgccagacactgagcttctgagacatccctgattctctctccatttggaattacaaccattgtattttgtttgtggcataaattacagtcatctgtctttcactggaatgaagaccatgcctaggaacattttttaaggactcagctgtggcttttagggcttggttcataccatgggggaaaaaaaagtcctaggagaaagcgacgtggctcattagtgttgcctcttcagtgctcaagccgcctggtggattcctatgacacagggggcctggaaagaaagggaaagtggatttaaaatatatatatacgtaacccaagccccataacccctaactggacaaatgaggtctgtttctttgggcctgaggctgtgccatataaagtcttattttgggactttacaaacttgtcctaactatcttgtggatagtgggctgtgacaatctggaatagagaacgttcacacttcgctcctttaaagaagcgaccccagatctgcaagggagtagattctgctatcttggcctcacagcccttcctgttgattacaaagcccgtggaagaaaacagaacacaccctcctcagttccgtctaaatgtgtttcttctgcttcaattacaccagttctggggcaaagacactgatgaaacaacacccatacctgaaaagaataaatgtgtgactttcaaatcccctttcgcagtgaaagaaacagcaaacacttaagattcagcatctgttctccagttgcactgaggaatgcactgtctcgcagcaccagctctgcagagcccttgccccagactctttgcggttttatttatatgtatttccatatttcattcctgtgtgtcactgctgcattggtgtggcagcaagtgaccaaatgctacaggtcttactatggacaccaggtcaggtgcaaccacacaaaacaaagccagttccatgagctgcctatgatatgcattgcggaagtaacattttacccagggtgtgccattgcagtgatataaatatatttttttcttagactaaatatgagctgactatctcttttgatgtgtgtacataggtgtgagtgtgtgtgtatgcgtgcctgtctgtgtgcgggtgtgtgtatgtgcatagcctcatgcttaggactacccatgaatgttgtggaatgctacacctggagagttctggttttccaccagtttcaagatgaagaactacatgatacagtggacctggagaccatccccttggaaagacaacccagagatgttcagcatcctgtatctacacgcatcctgtatctacacgtgtattttgtagctgtcacactaaccttaataagaattctacagctttggacagaggcattttcaccttaatggtgaagtaatttaaaatataaatccattcaggtgacaacccatcatcaaaattacaaattttctgattgaactcatctgaatcatcagttccttgatggagagagagaaggagatggaatgtgtctggtaaccccaaatggagtacaagtagcctttgttttcctgcataaatggacttgttgaatgcgaacgaatatatgcaattcatatacttttggagatgaacgtagatatgtgtgtcagctttgagatggtgtgtcctggattaatactttgtctcccaatatcacagaaaaatacatgccagtgactcttgaggttaaggtagttgggatgaaatggcctcaggcaatttcacattccctaattacctggaaagttctacagtaattaatatgcagctaactcctgttgccctcacaagagcatcagccttctagaatcggagctccggagtgtgaagattcagtattgatatgatatgtataccaaactccagccaacttactgccatttttcataatctgagtggctgccttgcttatcctaagctgtggttgcagaaaccgtggccatttatataagctataacatcaaatcagggaaaaatgaggaaaaaaaatagattctgaaccatttattgttgaataagtagagaaaatcatcaataaatatttattacattctgacagggtgtgtggcattgtgttctatgccagagtgacaaagttgattcacccctttttggggaccttaatatattttttaagggatgtgcctatgcattgatgcctgaaaaatatgtataaagaaatgaggttgactcttctgagcagttcatcttttccagaggtaagggtaggaggccaacttcagggtctgggtctgagcccgtgggcaagccctggccgagtgagctccaatgctaactcatgtgccgatctctagagcagtgggaaactaccccgctgcaccaaatcaagtagcttcaccttgtgtatgcaggccccaagttattttttagcaatcttacgagtgaaatgttctggtgggttgaaaaacgttcttattttaaagaaaggttgtgctcgctacactgctggtgtgtgcattctgagacctcttgtattcaatctgtgaaggatatgtgtattaatccgtacacccgtatagcctcaatatttgtctgaagacacttaaattctgacccataaaggaaagttctagaagcaatattttcacttatttaacattctccaaacaacatcaagcattgatacacactgaagagtgcgtttattttttgtatcactctaagtatgttggaatatgcaaggactgtggttcaaattagaatgtataaggcatattataatttagttcatactgaataagaaattaacagaacattgttcggttcacacgttccaaactttgagtgatttctggagttagacatagattttctattttgttttaatttgtcaaggtatttttcttcccttcatgaactttaggtacacataacttatgtcatttatttatggtcttttatacctagtttgtaaaattgtaaaatagcaaactaaatgcaaagagtttgcatttgaaaataataaagtagttgccgtatacaaccctgcaaaaaaaaaaaaaaaaaa

SEQ ID NO: 586 - DNA, 5399 bp, Homo sapiens
ggggaagcttcgcaggcgtgcacggagcagtgagatcactggcgttataaatatcccggtgccagcgcggagatccgctcgggtggcctctctcttcccctctccccttctcttccccgaggctatgtccacccggtgcggcgaggcgggcagagccagaggcacgcagccgcacaggggctacagagcccagaatcagccctacaagatgcacttaggacccccgcggctggaagaatgagcttgtccttcctcctcctcctcttcttcagccacctgatcctcagcgcctgggctcacggggagaagcgtctcgcccccaaagggcaacccggacccgctgccactgataggaaccctagaggctccagcagcagacagagcagcagtagcgctatgtcttcctcttctgcctcctcctcccccgcagcttctctgggcagccaaggaagtggcttggagcagagcagtttccagtggagcccctcggggcgccggaccggcagcctctactgcagagtgggcatcggtttccatctgcagatctacccggatggcaaagtcaatggatcccacgaagccaatatgttaagtgttttggaaatatttgctgtgtctcaggggattgtaggaatacgaggagttttcagcaacaaatttttagcgatgtcaaaaaaaggaaaactccatgcaagtgccaagttcacagatgactgcaagttcagggagcgttttcaagaaaatagctataatacctatgcctcagcaatacatagaactgaaaaaacagggcgggagtggtatgtggccctgaataaaagaggaaaagccaaacgagggtgcagcccccgggttaaaccccagcatatctctacccattttctgccaagattcaagcagtcggagcagccagaactttctttcacggttactgttcctgaaaagaaaaagccacctagccctatcaagccaaagattcccctttctgcacctcggaaaaataccaactcagtgaaatacagactcaagtttcgctttggataatattcctcttggccttgtgagaaaccattctttcccctcaggagtttctataggtgtcttcagagttctgaagaaaaattactggacacagcttcagctatacttacactgtattgaagtcacgtcatttgtttcaatgtgactgaaacaaaatgttttttgataggaaggaaactggaattctttgtactaatacagggagcacactccttcagttcagcaagacataaagccttttgctttatgcttgagggatatttagaactttgtattttcggaaagttaaataacagggactacgtatttttctgacttttacagattaacctgaaagaacatacatgatacatttttatttttggtttccaaagaatattttgatgcagataaaatattttgttaacttttgtttttttttgtttgttttcttaaaagtacctctgcattgagcatattttcttacttttattattttaattaatatgacataagcaatcattttatgctgtttatgaattataaatgtgtttatagctcatttgtaatatggaaatcttttacatttttcctattcactgcacttttttattgtttttatttctagccatacctcagataatatgtttagttttacattttaaaatgtttaaattctctttcacagcaccaaaggctcagcttggatttgtgtgtatgtgtatgtcaattcatgacattatgtggaatcctaaacctttggtggctgggatatgatgggttagaagcaaggagaaaatataaggactttttgatggaattaaatgtgggaggtaaggaaaaggatttagaggtaaaagtacactaagtttgcaacatttattgagatctaagtctgtcttgccttcatttctctttttatctcccccttgccctcattcttgaacagctggaggaatacattttattctgtccatgaagcatacactatgaaattcaagtgcttaaaaatacttctatgactctctgctatcccactgtatagatccacagggagcaaacacttagaaatgatagagaactgaaggagatcaatggtttaacagttatccatgccaagtcccattgtcagaaatattcttattactcagtcaaacactctttgagcttcccttcctaaaggtaaccaatccagtgaatagatgtgcccttttataaggaaacttctgatgtttattaaaaaaactggccttttgatagaggtaacttaatttgggaatttgttgtgttgaaatggcatttaatttcaacctaaatactgactgctggacataaatcacagaaaatttaacttaagaaaatttacaaaatttattctcaggtaatcattttaataaagttctgcaaaatacacgtttatcttacattcagaaatgtggcaaaaaaggcatagctaaaggctaaacatatggctttagtagtaacaaaagggttcatagaaacttcatggtttgcatttaaacatgtttaaagtgtacttataaactatttttttcttaaagcaaactatgatttattttggtgcacaaatacaaagtggaaacttaccaaaattgaactagctaccatataagcagattgctttaatttgatgggaaaatagtacacacatatatataacaaataatatattaaaaaacccatccatcaactaaaacattatatgtatacatcagtatagtgttttattataaagccaattatctgattaagcattctttccactgaatgcataatgtttaaatagcataaaatgaaatgctacaaaaattgaactaatttatactttaaagtatttctgggttaaatgaaacaatgaaattttttagtatgttcaactctcatccaaatggcatatgaccctgtttacacagcctaaagctaaaaatattactctagtttattctaatctattgttaagtattgtgcactgtataccaagttcttagggcacatgaaaaattttagctgccaaacaggaactagtaaacatatgttcctaataagtgaagggaaagataataatgatggtcaacaataagccacgtcaatgcataagttgtataggctaaatgttgcttgtaggctacattaaactcaaatgtaatagtttatcttatactcctggtttgatttgattagcatattaacgtgaaagtaggatagctactaaatatatattatgcaagtcaggaatcattaatttcaaaatttaaagccatgctaaaattaaaaagaaaatattaaattacacaattacacttgtctttactggccatacaaaatgattttttttttttttttgagacagagtcttgctctgtcaccaggctggagtgcagtggcatgatctcggctcactgcaacctccaactccctggtttaagggattctcctgcctcagcctcccaagtagctgggattacagactcatgccaccacgccagctaatttttgtatttttagtagagacggggtttcaccatgttggtcaggatggtctcaatcctggcctcttgatagtcctgacctcatgatctgcccacctcggcctccccaaagtgctgggattacaggtacaatgatgtataattaatgcttagtgaagcataaagttacctacatcaattaattaaatgaacttatgtacagaaaacatgtataaatataagtctatactaatgcttacaactttctaagagggttcttgcttatgtagctttttattattttaagtaactagaaccaccaaatatcaaataaaattatttggttatggttatgttcatctaaacacaacaataacttttatattaatatttaggagtctattttgtctataggtgacaaacatctccagactaacatgtcagttttatcaattatattatgtttaattatttaagatttctttatgtggaacatctatagagataaatagaaattttcaataagatgtagtaacactgtgatttatctttcaagagtctctcttcacttccttctaaagagactaatttgagagtacaggtgcatattaattttcttggttctttcagctgaattatattggtccagaagttcaaaatcatgtgacaataataagggatactgacagaagttatttccaagtttgtgtatatattataaaaattacatatataaaactaaggcttttatttctgttatttttaagcttttatttcttgtagctaaaaataaaacatcataaatctggtaggtaaatttcttattaaatcaatcttgaaatagaaaatgtaataactttcttaccattaacattttttacccttccatagaagggagggaataaatcatgacttatcccattttcaataacaaaacgaaactatggcactaaccaaaaacttgcattctggcataatttttacagttgcagagaattgtttctgggctcattaaaaaaagtagtattgcagacattgctgcaatgggaagcagacaataacttcttaaaggaattctacacctcctttaagatttacttaattgctacatctaaattctgataatttaaaatccattttaggtgataaaattttttaaaagttttgaaggaaacctctggataaatggacaaggcctaatttttttttgtagtcaatccaactgtactggccaatttttgaaataagattatatgattaggtattagcagagacaaagagttacctcctccatcttactctgccctatttgaaagtctcaggggagaaaagggaacaagatgctgatccaacctgagtggagtcaggtgaggcatctttacatctaagaatttttttttaaattttattattattatacttcaagttctagggtacatgtccacaatgcacatgtctgtcacacatgcacacatgtgccatgctggtgtgctgcacccaccaacctgtcatccagcattaggtatatctcctaatgctatccctcccctctccacccaccccacagcaggccccggtatgtgatgttccccttcgtgtgtccatgtgttcttattgttcaattcccacctatgagtgagaatatgtggtgtttggtttttggtccttgcaatagtttgctgagaatgatggtttccagcttcatccatgtccctacaaagaacatgaactcatcattttttatggctgcatagtattccatggtgtatatgtgccacattttcttaatccagtctatcattgttggacatttgggttggttccaagtctttgctattgtgaatagtgctgcaataaacatatgtgtgcatgtgtctttaaaaaaaaaaa

SEQ ID NO: 587 - DNA, 4463 bp, Homo sapiens
ccaccgcgcccgcggccggcccaggcagcactcgcgagcagcggcggccccgccggcggccgagttgggagaatgcggcggcgctcgcggatgctgctctgcttcgccttcctgtgggtgctgggcatcgcctactacatgtactcggggggcggctctgcgctggccgggggcgcgggcggcggcgccggcaggaaggaggactggaatgaaattgaccccattaaaaagaaagaccttcatcacagcaatggagaagagaaagcacaaagcatggagaccctccctccagggaaagtacggtggccagactttaaccaggaagcttatgttggagggacgatggtccgctccgggcaggacccttacgcccgcaacaagttcaaccaggtggagagtgataagcttcgaatggacagagccatccctgacacccggcatgaccagtgtcagcggaagcagtggcgggtggatctgccggccaccagcgtggtgatcacgtttcacaatgaagccaggtcggccctactcaggaccgtggtcagcgtgcttaagaaaagcccgccccatctcataaaagaaatcatcttggtggatgactacagcaatgatcctgaggacggggctctcttggggaaaattgagaaagtgcgagttcttagaaatgatcgacgagaaggcctcatgcgctcacgggttcggggggccgatgctgcccaagccaaggtcctgaccttcctggacagtcactgcgagtgtaatgagcactggctggagcccctcctggaaagggtggcggaggacaggactcgggttgtgtcacccatcatcgatgtcattaatatggacaactttcagtatgtgggggcatctgctgacttgaagggcggttttgattggaacttggtattcaagtgggattacatgacgcctgagcagagaaggtcccggcaggggaacccagtcgcccctataaaaacccccatgattgctggtgggctgtttgtgatggataagttctattttgaagaactggggaagtacgacatgatgatggatgtgtggggaggagagaacctagagatctcgttccgcgtgtggcagtgtggtggcagcctggagatcatcccgtgcagccgtgtgggacacgtgttccggaagcagcacccctacacgttcccgggtggcagtggcactgtctttgcccgaaacacccgccgggcagcagaggtctggatggatgaatacaaaaatttctattatgcagcagtgccttctgctagaaacgttccttatggaaatattcagagcagattggagcttaggaagaaactcagctgcaagcctttcaaatggtaccttgaaaatgtctatccagagttaagggttccagaccatcaggatatagcttttggggccttgcagcagggaactaactgcctcgacactttgggacactttgctgatggtgtggttggagtttatgaatgtcacaatgctgggggaaaccaggaatgggccttgacgaaggagaagtcggtgaagcacatggatttgtgccttactgtggtggaccgggcaccgggctctcttataaagctgcagggctgccgagaaaatgacagcagacagaaatgggaacagatcgagggcaactccaagctgaggcacgtgggcagcaacctgtgcctggacagtcgcacggccaagagcgggggcctaagcgtggaggtgtgtggcccggccctttcgcagcagtggaagttcacgctcaacctgcagcagtaggagggtccgggaggccctgccgtcctgtctcctgcaccattgggtggagtctggtgatcacattattgattatgtttcttaaactttccgcgaaactaatatacctcagtattccatcatggtctgaaagtcaaacttcggcaaggcacggacgactgtgcagacacagcagcggcaagaagcgagaactgccctccccctcctctcggtgcagcccagccgggcccccttccccaggccggagcgcccctcttccttccagctttcacttctgccggctccgcaactgagtgacacccagcgacaaccgactggggagtggtagaagcaactgaacggatgcgtgcgagctgaggacagggcgggaggagggggcacacatgccccaggggagcgaggagaactcttgaaatctccattttcaatcccttcgaaatcacgtatggtttccacaaagccgagtcgtgtcacgtggcaggtttacgtcaatagtccctctctctgctcctccattcgcaagtgtcttcctgggccagactcccctccacctcatgtacttgctatattgaggatgaagttttctatggtgggacactaaatataaagctatatagagaaagaatgtacggtcagttccctatggtttctgtagatcatcgtcatcttgtatattccccacaaagccgttcgcagcttccgggagaaggggccagagcccggtggggccagtttctcacagagggaggaggtggcctttgtcccctggagcccgatcagccagttggtgctactgctgtggccagctggggggcttcctccagaccaccggcctcggccccggcatccctgttgggcgtcagcctgagagtccctactgtgcgtcagaatccaccttgcgtgctgtgcgtatctgtgaacctggagcggttacttattttgacagatatcactttgggtctttttacattaaatttcttttctctaaggaatataagacataccccatagctctgtgtgagccagcaataccgctgccccctggcgacagggcagaccaatgatgccaggcagctgtcacacgctagtattggcttcattgtgatctgagccctgcacgctgggccttcagaattaatggccagcagtgtcagggatgagcccgtcagccagggcacaggcctggctcacagtcctgcacacctgctggcctggggagctccagccaggcagcgagtcctgccccgcccgcagctccctcccacaccccgcctggccaagatgactgcttcagggggctttggggaaagaattaggaagggtcagaaccaaacaatacctgctcatttacactgaggattcagggcgggagacaggagccttggggtcctgttaaaccacagacagttatgaactgaaagtcataacggggagaggtgcctggcttctacctgggtgctcaggaatgttcctcgtcacccctgccactctgtggtcggtgccctgcttcctcctccactcctggccgccttctccagcgccgcacacacagatgctcagtctcagagaggctggcacggcctggcagtctgagaaaagcgtcagttaggcacacctgcaggcccctcggtgggacagcggcggccttggagttaggagccaccctgggaggttgtgccggtgccatgctcctccctgtgtcttgtatgaaaggggccactgtgtgtcttcctccccggcgggagccccacatgtgtgcactgtaggacagcggccccgaggtggaagcctggctggagggctgccctataggtcttctcttcccgcctcccctgccatgcaaccagatgtgttgtgagtgggcagcgtgcccccacgctggagtaactccgcacgcttctgtctttcacggtgggcgctcggggggagcctgaggaaaacccccttaggtacctgtgcgaggctgtggagtgcaggccagagcagggtgtgcgtagcccccagcacccaggttcttctgtcagaccctgtgacctgcgagctgctactactgtaaggagggaaatggatgaatctggctcgttttaaaatcacgttttctgacgaatcctttgccccttcacctttaccccgcccgcacccctaggccctctcagccttcctatcatcccacgtgtctacccagacccttgtgcggcccatgccctgggggcggcgtcctgtccctgagctgggaggcggctttggatggtccgggcgtcaagagcaggggtgggccggggaggggtcctttgcggtgagctatgtttacatgacacagtgtgccaaagtgacttactgcggttgcgttagtttttaatcatcaggactatctcaccctcccactcctgtttttaaaactcagaattctttcctaagagcccttcgagcaaagcgtgccgaagttagttgtcttctctgtgctggtcctttcttatgtcctcataaaagctcagatgatggtatctgtgagtatgttttgcaaattcaaaatatagtttggtaatttttttttccagttgatttttaaaaagaactgctgtacagagcttgtactttgtccattttatagatggaaaccatccttgaaaattgtttaacttaaataaagagaagatactttctagataccgctaaaa

SEQ ID NO: 588 - DNA, 7971 bp, Homo sapiens
ctaaaaataccattaagtaatagtattagcttttgtattctgagattcaacagcagcagtcacttccctccactcctatgtgtatcccaggaccaccctgggcggggagggctgaggtcagggaggtctgaagctggtcctgggctccgggggtgacagtgatgaggaactgggtgcacacatgagtggggcagccgggcctggccagagaagcaacacacacgtgcacagacatgtttatccacatacacatgtgcacgcatgtgcacaaacacattgcaggcaggcatgttgacgcctcaggcagcggaggaccctgactctgggccctgctgacccaggcaaggccccattgtgatgcgtgccatgacctcagaatgtcactggtgcttagcacctatccgctctccagactgcgtctgtgttctacggcagttacacacacgcagtggtattcacaagcggttttgtggactcaaaggttttctccctgagaggcataacccaggccagctgattcatcagaatcaggtgagtgtgacctgctctcttccctccaggctgacttggggacagtggctatggtatgggcggtgttggcctctgggcagctacagaggagggtcatccctgagcactcaccgggcgcccgttctacactgcccatgtagacgattttctctttcgtcttcatggtggcttcgtagagtgggtgctgttcccaaatgtacccattcgacaggtgagccgtctggggtcagagaggcagtaactggcctgggaatccagacaagaccctgggttttgctctcagccctgctgtgtgccatgctagacttcaggcctcaaccctgagacctccctgctctagatcccaaatctgcccagatttccgatcccaatggggcagagcctggccctggcagagacactgggatggatccactgtgggtggggaggagggaagggtcctcagaacacacctggggcctaagctgggtcttgatggtcactgtgggacccactggacacacacagtcccttgtctgggagtggcatggggagccttctgcccttgggcagttgtggaaagtgaaggagccctggagagctggctgaggggagactatcttcccttgtgttcaaaggggtccaggcactggggctctccccaagtatttcttattctgtctggcctcgctttccttttgccctgagtattctcaggagggacggtccatctagatgtcctccaggagcaaggacccactgttcttcatcagtgacccaggaaaatgaagccccctcctgtggggacagctcagaatggtggagtccacagtccctccctgagagacatggtttccatgagcacagtggctgctttggagacagtaatcattttcatccccaaaaccaaacacactcctgctcaaatggtgttattgctaaagcagcttcactggttagactgaagggccatggtagcccaagtgatgagcggggtagaatggagcagtcaggagagatcttgttccccgtaggaaactgggcatctctgtggccctgaacatcccaggaggccgatcgtacagagacctctggtgcctgaccgcagttcacatccacatccctggaatagaccatcacaggctcttcacccttggcaggtggacaccattcaacctgccggggcaggatggacatggtagagaatgcagatagtttgcaggcacaggagcggaaggacatacttatgaagtatgacaagggacaccgagctgggctgccagaggacaaggggcctgagcccgttggaatcaacagcagcattgatcgttttggcattttgcatgagacggagctgcctcctgtgactgcacgggaggcgaagaaaattcggcgggagatgacacgaacgagcaagtggatggaaatgctgggagaatgggagacatataagcacagtagcaaactcatagatcgagtgtacaagggaattcccatgaacatccggggcccggtgtggtcagtcctcctgaacattcaggaaatcaagttgaaaaaccccggaagataccagatcatgaaggagaggggcaagaggtcatctgaacacatccaccacatcgacctggacgtgaggacgactctccggaaccatgtcttctttagggatcgatatggagccaagcagagggaactattctacatcctcctggcctattcggagtataacccggaggtgggctactgcagggacctgagccacatcaccgccttgttcctcctttatctgcctgaggaggacgcattctgggcactggtgcagctgctggccagtgagaggcactccctgccaggattccacagcccaaatggtgggacagtccaggggctccaagaccaacaggagcatgtggtacccaagtcacaacccaagaccatgtggcatcaggacaaggaaggtctatgcgggcagtgtgcctcgttaggctgccttctccggaacctgattgacgggatctctctcgggctcaccctgcgcctgtgggacgtgtatttggtggaaggagaacaggtgttgatgccaataaccagcattgctcttaaggttcagcagaagcgcctcatgaagacatccaggtgtggcctgtgggcacgtctgcggaaccaattcttcgatacctgggccatgaacgatgacaccgtgctcaagcatcttagggcctctacgaagaaactaacaaggaagcaaggggacctgccacccccagccaaacgcgagcaagggtccttggcacccaggcctgtgccggcttcacgtggtgggaagaccctctgcaaggggtataggcaggcccctccaggcccaccagcccagttccagcggcccatttgctcagcttccccgccatgggcatctcgtttttccacgccctgtcctggtggggctgtccgggaagacacgtaccctgtgggcactcagggtgtgcccagcctggccctggctcagggaggacctcagggttcctggagattcctggagtggaagtcaatgccccggctcccaacggacctggatatagggggcccttggttcccccattatgattttgaatggagctgctgggtccgtgccatatcccaggaggaccagctggccacctgctggcaggctgaacactgcggagaggttcacaacaaagatatgagttggcctgaggagatgtcttttacagcaaatagtagtaaaatagatagacaaaaggttcccacagaaaagggagccacaggtctaagcaacctgggaaacacatgcttcatgaactcaagcatccagtgcgttagtaacacacagccactgacacagtattttatctcagggagacatctttatgaactcaacaggacaaatcccattggtatgaaggggcatatggctaaatgctatggtgatttagtgcaggaactctggagtggaactcagaagagtgttgccccattaaagcttcggcggaccatagcaaaatatgctcccaagtttgatgggtttcagcaacaagactcccaagaacttctggcttttctcttggatggtcttcatgaagatctcaaccgagtccatgaaaagccatatgtggaactgaaggacagtgatggccgaccagactgggaagtagctgcagaggcctgggacaaccatctaagaagaaatagatcaattattgtggatttgttccatgggcagctaagatctcaagtcaaatgcaagacatgtgggcatataagtgtccgatttgaccctttcaattttttgtctttgccactaccaatggacagttacatggacttagaaataacagtgattaagttagatggtactacccctgtacggtatggactaagactgaatatggatgaaaagtacacaggtttaaaaaaacagctgagggatctctgtggacttaattcagaacaaatcctactagcagaagtacatgattccaacataaagaactttcctcaggataaccaaaaagtacaactctcagtgagcggatttttgtgtgcatttgaaattcctgtcccttcatctccaatttcagcttctagtccaacacaaatagatttctcctcttcaccatctacaaatggaatgttcaccctaactaccaatggggacctacccaaaccaatattcatccccaatggaatgccaaacactgttgtgccatgtggaactgagaagaacttcacaaatggaatggttaatggtcacatgccatctcttcctgacagcccctttacaggttacatcattgcagtccaccgaaaaatgatgaggacagaactgtatttcctgtcacctcaggagaatcgccccagcctctttggaatgccattgattgttccatgcactgtgcatacccggaagaaagacctatatgatgcggtttggattcaagtatcctggttagcaagaccactcccacctcaggaagctagtattcatgcccaggatcgtgataactgtatgggctatcaatatccattcactctacgagttgtgcagaaagatgggaactcctgtgcttggtgcccacagtatagattttgcagaggctgtaaaattgattgtggggaagacagagctttcattggaaatgcctatattgctgtggattggcaccccacagcccttcaccttcgctatcaaacatcccaggaaagggttgtagataagcatgagagtgtggagcagagtcggcgagcgcaagccgagcccatcaacctggacagctgtctccgtgctttcaccagtgaggaagagctaggggaaagtgagatgtactactgttccaagtgtaagacccactgcttagcaacaaagaagctggatctctggaggcttccacccttcctgattattcaccttaagcgatttcaatttgtaaatgatcagtggataaaatcacagaaaattgtcagatttcttcgggaaagttttgatccgagtgcttttttggtaccacgagacccggccctctgccagcataaaccactcacaccccagggggatgagctctccaagcccaggattctggcaagagaggtgaagaaagtggatgcgcagagttcggctggaaaagaggacatgctcctaagcaaaagcccatcctcactcagcgctaacatcagcagcagcccaaaaggttctccttcttcatcaagaaaaagtggaaccagctgtccctccagcaaaaacagcagccctaatagcagcccacggactttggggaggagcaaagggaggctccggctgccccagattggcagcaaaaataagccgtcaagtagtaagaagaacttggatgccagcaaagagaatggggctgggcagatctgtgagctggctgacgccttgagccgagggcatatgcgggggggcagccaaccagagctggtcactcctcaggaccatgaggtagctttggccaatggattcctttatgagcatgaagcatgtggcaatggctgtggcgatggctacagcaatggtcagcttggaaaccacagtgaagaagacagcactgatgaccaaagagaagacactcatattaagcctatttataatctatatgcaatttcatgccattcaggaattctgagtgggggccattacatcacttatgccaaaaacccaaactgcaagtggtactgttataatgacagcagctgtgaggaacttcaccctgatgaaattgacaccgactctgcctacattcttttctatgagcagcaggggatagactacgcacaatttctgccaaagattgatggcaaaaagatggcagacacaagcagtacggatgaagactctgagtctgattacgaaaagtactctatgttacagtaaagctaccactctggctgctagacagcttggtggcgagggagatgactccttgtagctgatacttggcaaaagtgtcactgaaagacaagctaaatgtagttattttatcctgttagaacaaaaattctaattaaaatagttaacttgaagagtagaaacaattgtattttgaagtctcatacaagctgtctgatagagaactttcaggcagatcccaccattagcctgtaaacaaaaggtgtggcaccagccacctgggaccaaataagaattgaattgtgcttgtccagatatgaacaaatatgtagtgagtatagagtttaccaataatcataacaaatattaaagatttccttggagtcagaggaaaaaacaaacaattataatgttgtctagggacgacatgatacgctacctcctttttcctgaagttttattccattatattgacaagatggagaaagcaagatcatgaaggtgtgcaaatgattcttacggcatggacaaggatttttcaatttattttttaaactgtttccataccctttctttttcttgctttttgtttttgccattgtgtttacgtttgagacacaaccagtcattggtggcaggggcatagagtggtcagtctgaaagggaggctctcttaagagctatgtgccttccaaccagagggagacccagtagaaagaaaaacatcctgggaaatccagctaccagggccctcccagtggaggcatcttacatttaggctacttcaagtatcctcagaaatgtattctgcacccccggccccgcccatgctgagggaaggggagcagttgccaatatttgcaccatcttcacatgcacatgttgcaacaagagcttctgggaaggtaagcggcatcggagctagatcacgtttcacaattagtggttattcttttctgtgtttgttttgcactttaaaaaagagagaacacatgcaaatgaacttgcttgtgtgtatttgatggctctaagggctataaattacaaacaaaacacatcccagacattaggagttcataagtatatttaatgaaattggtggttttaggaagtcaactttagttttgctttgtttgcatgtccactggtttttttattttgatatttgtctttttttaaattttacagtagtcattgaaagttatgtttctttgcttacttcattttttccctctaattatttaagattggaacaaaagtataaatattatttatttgaggtagaatttttttcatgtagtttcttaatatatacttgaaggaaatgtttcaccttatttttggtctttgtttattcatttagaccctgcaagttgattctcattgccagattccattaccctttcttcctcataggtagtaattaccaatgtaactaagcatttgtgttctgatatctgaggccagtaactattaatatctagttctcagagcatttggaaaggttatcttaaatggctacctaaattgaaatccttttcagaaaaaatataattgcaagtaggtaggagtggcctaaattgtctaatgtaataaagtcagacaaaatgcacactttatagtttcaagattttcagtaaataaaatctgtccattcctacctggacatgtcccattaaaaagtggaagattttaaataatttctttacagatgttttatttaaacaggtagcacaatctactaatgttgtgtgatttgtgttatactggttgtaattaatttttttaattcatgaactagcggaaaatttattaaattaactattaactacattcaccttgtaaattactgtataaaacttgttgacaatgcactgactttagaaagatgttaatgtacataaatagagtgtaaataaaatagtgttgatgtactgaaatatgaactgtatcaaaagtattggtaattgtatatggggtgtacctgtttatctgttaactattatccaaacaaattaaatactgtggttgcctctatgtgctgtttttcctcatacaagtaaacacagaaagtc

SEQ ID NO: 589 - DNA, 5125 bp, Homo sapiens
aaaagatatggtggggtgcttaacagaggaggttagacaccggcgggaaccagaggagcccaagcgcggcgcctgggcctcggggctgcaggagtcctcggtgggggtatggaggtcgccggggaaggaggacggttcagttgctaggcaacccggcctggacccgcctctcgctcgcgttgctgggagactacaaggccgggaggagggcggcgaaagggccctacgtgctgacgctaattgtatatgagcgcgagcggcgggctcttgggtcttttttagcgccatctgctcgcggcgccgcctcctgctcctcccgctgctgctgccgctgccgccctgagtcactgcctgcgcagctccggccgcctggctccccatactagtcgccgatatttggagttcttacaacatggcagacattgacaacaaagaacagtctgaacttgatcaagatttggatgatgttgaagaagtagaagaagaggaaactggtgaagaaacaaaactcaaagcacgtcagctaactgttcagatgatgcaaaatcctcagattcttgcagcccttcaagaaagacttgatggtctggtagaaacaccaacaggatacattgaaagcctgcctagggtagttaaaagacgagtgaatgctctcaaaaacctgcaagttaaatgtgcacagatagaagccaaattctatgaggaagttcacgatcttgaaaggaagtatgctgttctctatcagcctctatttgataagcgatttgaaattattaatgcaatttatgaacctacggaagaagaatgtgaatggaaaccagatgaagaagatgagatttcggaggaattgaaagaaaaggccaagattgaagatgagaaaaaagatgaagaaaaagaagaccccaaaggaattcctgaattttggttaactgtttttaagaatgttgacttgctcagtgatatggttcaggaacacgatgaacctattctgaagcacttgaaagatattaaagtgaagttctcagatgctggccagcctatgagttttgtcttagaatttcactttgaacccaatgaatattttacaaatgaagtgctgacaaagacatacaggatgaggtcagaaccagatgattctgatcccttttcttttgatggaccagaaattatgggttgtacagggtgccagatagattggaaaaaaggaaagaatgtcactttgaaaactattaagaagaagcagaaacacaagggacgtgggacagttcgtactgtgactaaaacagtttccaatgactctttctttaacttttttgcccctcctgaagttcctgagagtggagatctggatgatgatgctgaagctatccttgctgcagacttcgaaattggtcactttttacgtgagcgtataatcccaagatcagtgttatattttactggagaagctattgaagatgatgatgatgattatgatgaagaaggtgaagaagcggatgaggaaggggaagaagaaggagatgaggaaaatgatccagactatgacccaaagaaggatcaaaacccagcagagtgcaagcagcagtgaagcaggatgtatgtggccttgaggataacctgcactgtaatagcctaaacacaactcttatttacttacagccttatgtttttgtattttcttggtagactaggtaatttttttttaaaggacaggaaactgatattttaaagaccaatttgttctacctagcattttaactagtttttctgccagctatgttgaatgcacaaattctgtcacgcatgttcattcattgctacataatttggttcttctggaatatttttatgtagctcttggagtacagctatgaaaattaacaactgttaaaggaaataccttttttttttttttgtaattttttccttgaagaaccaaagtattttttcagctggttgttgaatagggttaagtccgcttggattagctgtgcctttcattactttgttacagaaatgcagtgacttatactaagacaatttattgtttaaaaaaaaaattggcaagacaactatatggttaagaatttccagtatgaccacacccaataactgttattagagtgttaatggattattgtgttttaggtgacatagttaactgtaaagtaacctgactcagtatagttactggtaccacagtgaggtgaataaaacgggattttcagaagttagcctgaatttaactgtatttttaaatttaacctccattaactaagcatcttttctttgtggtagggtctaccttctgcttccctggaaaggatgaatttacatcatttgacaagcctattttcaagttatttgttgtttgtttgcttgtttttgtttttgcagctaaaataaaaatttcaaatacaattttagttcttacaagataatgtcttaattttgtaccaattcaggtagaagtagaggcctaccttgaattaagggttatactcagtttttaacacattgttgaagaaaaggtaccagctttggaacgagatgctatactaataagcaagtgtaaaaaaaaaaaaaaaagaggaagaaaatcttaagtgattgatgctgttttcttttaaaaaaaaaaaaaaaaattcattttctttgggttagagctagagagaaggccccaagcttctatggtttcttctaattcttattgcttaaagtatgagtatgtcacttacccgtgcttctgtttactgtgtaattaaaatgggtagtactgtttacctaactacctcatggatgtgttaaggcatattgagttaaatctcatataatgtttctcaatcttgttaaaagctcaaaattttgggcctatttgtaatgccagtgtgacactaagcattttgttcacaccacgctttgataactaaactggaaaacaaaggtgttaagtacctctgttctggatctgggcagtcagcactctttttagatctttgtgtggctcctatttttatagaagtggagggatgcactatttcacaaggtccaagatttgttttcagatatttttgatgactgtattgtaaatactacagggatagcactatagtattgtagtcatgagacttaaagtggaaataagactatttttgacaaaagatgccattaaatttcagactgtagagccacatttacaatacctcaggctaattactgttaattttggggttgaacttttttttgacagtgagggtggattattggattgtcattagaggaaggtctagatttcctgctcttaataaaattacattgaattgatttttagaggtaatgaaaacttcctttctgagaagttagtgttaaggtcttggaatgtgaacacattgtttgtagtgctatccattcctctcctgagattttaacttactactggaaatccttaaccaattataatagctttttttctttattttcaaaatgatttcctttgctttgattagacactatgtgctttttttttttaaccatagttcatcgaaatgcagctttttctgaacttcaaagatagaatcccatttttaatgaactgaagtagcaaaatcatctttttcattctttaggaaatagctattgccaaagtgaaggtgtagataatacctagtcttgttacataaaggggatgtggtttgcagaagaattttctttataaaattgaagttttaagggacgtcagtgtttatgccatttttccagttccaaaatgattccattccattctagaaatttgaagtatgtaacctgaaatccttaataaaatttggatttaattttataaaatgtactggtgatattttgggtgtttttttttaaatgaatgtatatactttttttttgaagagtggagagtagtgatgtctagagggagctattttgtgctgaggccactatgttctgtaaatatataattttaagagcaacctcacaatccctgctaagtggagtttattatttgaagactaaaatggaattccatagttcctgataggttatattctgggttattattctgagttatctacaaacatttttgagatttgtctttacactctgattgtagtttccagcagcccatgcacactgccaagtaagtctcattttttcctgttagaaatggtgaaatatcatataatcacttataaagaaaactgatatgaaaaaattttagagttgtttgctttatggtcactcaagtagggtaagtgttccacaaattccacaagttgatagtttaacatggatgtctgaaagccacatatataatttcttaggattcttaaattagtaaatctagcttactgaagcagtattagcatcactattttagattgcaaaaataccttaattgtgtggaactggcttgtagagtggtacttaagaaaaatgggattctacctctatttctgttttagcacacttaatcaggaaaggatatattaactttcataaaaatatttttgttgtgtgaataggttaatgatatggtaaggcccctaaaataactgaattaattgtttattgtaattgtaggccattcccattattaaaaataaagacaaaacttgaagtaactgaaaatcttatcgtgctatgtagaaatattgaactaatattcaaatatttgaatgctttggtttcagggattggtttaaaattggagtccttttttatgggttagtcttacaaaaatttaagcctttatatttttgactttaaatcaaaacaaatgttattttaaatgtacagaatagattggtagtgcagaagagtgtaagttcttcataggagctttagaaaagagaaatatgtgctaattcagtttttttttaatctgcactgtacatatatacttggtaattatgagcttgattttgtttttggaaatatgtgttcataatttaggtaatttgctacttaaagcactaagtctctgatacctgaaaagtacatgtaaatggtgatggtgaaataatactgcagttaacttaatagatgtatactggtgatttttgtatgctggattaaaactccagatattaaaatataacctggataaaaagcc

SEQ ID NO: 590 - DNA, 1141 bp, Homo sapiens
ccacactcagtctggcctcggggcctttgcactggctgtgtcccctgcctgtgatgccattctcctctgcctggccaactcctacgtttattcaagtctggaccttgtcatcggctcctcaggaaggcactccgggacccccagatgggggcggttccctgtgactcctggcacggaggccaaccccttccttgttcaatggttccttgagggaccattcccatgtgattatcgaccattcggcaggcgttcaaagtcaaaggccccacactgagtcctggcccagcgccctgtgcccgttggctgctggagggacagacggggcgtgcggctgaccatcccgtgcccgcaggctgaggatgcagcgctggaaggcggcggccttggcctcagtgctctgcagctccgtgctgtccatctggatgtgtcgagagggcctgcttctcagccaccgcctcggacctgcgctggtccccctgcaccgcctgcctcgaaccctggacgcccggattgcccgcctggcccagtaccgtgcactcctgcagggggccccggatgcgatggagctgcgcgagctgacgccctgggctgggcggcccccaggtccgcgccgtcgggcggggccccggcggcggcgcgcgcgtgcgcggttgggggcgcggccttgcgggctgcgcgagctggaggtgcgcgtgagcgagctgggcctgggctacgcgtccgacgagacggtgctgttccgctactgcgcaggcgcctgcgaggctgccgcgcgcgtctacgacctcgggctgcgacgactgcgccagcggcggcgcctgcggcgggagcgggtgcgcgcgcagccctgctgccgcccgacggcctacgaggacgaggtgtccttcctggacgcgcacagccgctaccacacggtgcacgagctgtcggcgcgcgagtgcgcctgcgtgtgaccctacctcactcggccggcgcggcggccactccccccgcctcgacggcaccactggccggccccgcgaaagactgcgcgtgcgtagagcacgccggcgcggccccgggactctcgcgataactgtactgagataaagtgtggcaactcgaaaaaaaaaaaaaaaaaaaaaaaaaaaaaaaaaaaaaa

SEQ ID NO: 591 - DNA, 7723 bp, Homo sapiens
atgccgctggcgcagctggcggacccgtggcagaagatggctgtggagagcccgtccgacagcgctgagaatggacagcaaattatggatgaacctatgggagaggaggagattaacccacaaactgaagaagtcagtatcaaagaaattgcaatcacacatcatgtaaaggaaggacatgaaaaggcagatccttcccagtttgaacttttaaaagtattagggcagggatcatttggaaaggttttcttagttaaaaaaatctcaggctctgatgctaggcagctttatgccatgaaggtattgaagaaggccacactgaaagttcgagaccgagttcggacaaaaatggaacgtgatatcttggtagaggttaatcatccttttattgtcaagttgcattatgcttttcaaactgaagggaagttgtatcttattttggattttctcaggggaggagatttgtttacacgcttatccaaagaggtgatgttcacagaagaagatgtcaaattctacttggctgaacttgcacttgctttagaccatctacatagcctgggaataatttatagagacttaaaaccagaaaatatacttcttgatgaagaaggtcacatcaagttaacagatttcggcctaagtaaagagtctattgaccatgaaaagaaggcatattctttttgtggaactgtggagtatatggctccagaagtagttaatcgtcgaggtcatactcagagtgctgactggtggtcttttggtgtgttaatgtttgaaatgcttactggtacactccctttccaaggaaaagatcgaaaagaaacaatgactatgattcttaaagccaaacttggaatgccacagtttttgagtcctgaagcgcagagtcttttacgaatgcttttcaagcgaaatcctgcaaacagattaggtgcaggaccagatggagttgaagaaattaaaagacattcatttttctcaacgatagactggaataaactgtatagaagagaaattcatccgccatttaaacctgcaacgggcaggcctgaagatacattctattttgatcctgagtttactgcaaaaactcccaaagattcacctggcattccacctagtgctaatgcacatcagctttttcgggggtttagttttgttgctattacctcagatgatgaaagccaagctatgcagacagttggtgtacattcaattgttcagcagttacacaggaacagtattcagtttactgatggatatgaagtaaaagaagatattggagttggctcctactctgtttgcaagagatgtatacataaagctacaaacatggagtttgcagtgaagattattgataaaagcaagagagacccaacagaagaaattgaaattcttcttcgttatggacagcatccaaacattatcactctaaaggatgtatatgatgatggaaagtatgtgtatgtagtaacagaacttatgaaaggaggtgaattgctggataaaattcttagacaaaaatttttctctgaacgagaggccagtgctgtcctgttcactataactaaaaccgttgaatatcttcacgcacaaggggtggttcatagagacttgaaacctagcaacattctttatgtggatgaatctggtaatccggaatctattcgaatttgtgattttggctttgcaaaacagctgagagcggaaaatggtcttctcatgactccttgttacactgcaaattttgttgcaccagaggttttaaaaagacaaggctatgatgctgcttgtgatatatggagtcttggtgtcctactctatacaatgcttaccggttacactccatttgcaaatggtcctgatgatacaccagaggaaatattggcacgaataggtagcggaaaattctcactcagtggtggttactggaattctgtttcagacacagcaaaggacctggtgtcaaagatgcttcatgtagaccctcatcagagactgactgctgctcttgtgctcagacatccttggatcgtccactgggaccaactgccacaataccaactaaacagacaggatgcaccacatctagtaaagggtgccatggcagctacatattctgctttgaaccgtaatcagtcaccagttttggaaccagtaggccgctctactcttgctcagcggagaggtattaaaaaaatcacctcaacagccctgtgaagtgacctcagtgagatatttggtaccatggtgtaagctgatagcacaagttctggcgacaggtagcacgtatctgagagacacctgcaagcacacactgtcccagctggtacccataatgctgctgttcctgctgctgctcctgctttcctctcttctcgctttaaatgattgttagcaagttagattttcctggagcttcggaagaaatgaaaatggaaacatgatgaagatatagtcactgaatcaatgagaaaaataatgaacatatgaataccacctaaaaatacactgaataaagtacaccatatagcattatttttataggaaatatttcatgtcccttaaatattctttgttagttatagggatggacagtttatgttaagcacttagcttaaacaatccgtttatattagcactgtatcccttgtgccatccaacattttgtatgtttttgtaaacagttcatatacagtacatttctgtactgctttctttaatgtatacatgccttgtttaacttggaatctattattattaatcaattgactattaaatctggttaaatagttcacctggattaacagtattgttggacagtcctaaaaatggccagattgtggaacagctgttgaatgtaatacttccaaaatgtacatatctttccccacgtctgtttcactggttcgttcatttgtttgtttcttaaagtcaggtgctctgtcagactaacctagagagctgttatggtagagaaagttatcatatgtgtgtggcatgaaatcaagaatacacctatgaagttagtccatatactttgcaactccttagagtacttttttccttaattaaggaagtagtccttgcacttctaatcttacatagcatccatacttagaatttggcatatcatctgggattttgccaatatacgtcaaagccctttaagagtcatggtaaggagatgggtgaaggaaaatttagcaacaggtaattgaagtcctattggatatttcatgtttaaatagatattctatattaaacactaatttaaatgtaataaaggccaaaggcctctgtatgaaattggatttaaactttcttattttagggaataaaacattattgatcaaacagtatctgttctaacctaaaattataggtagggcaggctaagtgaacagcattgagtattttctgaatccctcatgataatttatagccacatactgcttcctttgacttcaggaatgatcagttttcataatggccactgggcctgcttagattgcagtattcattatctgcatctaatttggtagtttccacaatcgtatttgatgaaagaaacttcagtccccattattacctgtgtctttgccaagctgcctagcatacatcagtatgtaatgtaaaagacatatgagcaagaaaaaagtgatttaacttacctcatcaagaatgtgcccctacaggccgggcgcagtggctcacgcctgtaatcccagcattttgggaggccgaggcaggtggatcacctgaggtcaggagtttgagaccagcctggccaacatggtgaaaccccgtctctactaaaaaatacaaaaattagctgggcatggtggcgtgcacctgtaatcctagctactcaggaggctgaggcaggagaatcgcttgaacctgggaggtggtggttgcagtgagccaagatcacaccattgcactccagcctgggtgacagagtgagactctgtctcaagaaggaaaaaaaaaaaaaagaatgtactcatacagatttttgttagtcatcatgtaataagccatttatatcagaaaccttttttcctgccacagaagctttaaattttcccctaagagtacaaagccaagagagtgtggtttatctaaatgtcctgaaatccacttgtcattccttaatttctcctctatgcaattaaagagaaaggggaaatctataacatttcttttgcccaagtgacacaaaaatgattactgcatagaaatcaaatgtaagtttagcttctaaatgaaataatatataggagggatatcagaatgtctagatagagaaagtattttcaaattcttgaatatatggatgctattaaaagctgctttccattgcctggaaagagagcttttttccctcctctattcagtgtttcaaactttggtcatctcaaattattgtcacttttaaaatgttaatgtcattctgagcagaaatagatatattttcagatttttttacactgatgctactccgtaattgcttaggagtattgtccatcatagtattttagaactagaagtaaacacataaatccttataaattacccaatccaactttctcatattgcatgtagagaacctgagacacatatcaaagtctagaatccttaacttctccccattttgtttttttccgcctcatcacaccatgctgcctttccctcatatgatcaccaaccagtagctgagttcaaaaactacatatttcttgggcagtcctctactggtatgtgatgccaacttttatttctttcgaagataattgccttctttgcctagccaagcagccaattttattggagaaaagcaagttatatgttcacaaaatggaaggctttctacctaaatttatttcatctgtggtcctcttattctcttccattgcttttgacatacagtggaaaaacttggccaacgatgtgctctaaatatagtgcttgtgttgggttaacttttccattaatttctcaacatcaattattcaggcccctacagttgtggtattgaggcccctaaaggcttctgcctttcaccaattagtgctgccagttactgaggcttctcccaaaaggtatcagtccagtcttaaagatatttcattgtgaaagaagaaactaaactatcaggcctcttttacaaaatgagagattgaatttaagcttgtcaagcacgtactggaaggtatgaattacactaccatgtgttttgtatcttccctttcaagtgatgatgttaaatgaaggtaagtttttcatccttttttaatttttgttttttataaatcatttcagctttttctggtttatagaggtgtcttatttctaatgcaacagacccccaactttaacagatttgatatggatgcatttattcacaagcaaccccaaaagtccaaaaatgtaataattttgacaaggcccaaagttgagatgctatgaagcttgtgtgtgtgaaaagtcagttatgattgtctggagagaagctgtggtgtgtatgctgtagagtttccacatttcacatgcagtgtactccaaaaagcgggtttgggtcaaccatttcccatctctttttaagaagtgactgctgttggggccaggggacatcatgggaggtggggctgtccagttagctgtgccctgcaccttcagcccaggaaagatttgaacagagcaaaggcttcaagagagggcagaatgtattcggcagaaaagggactcaggtaagcccagcctgggatgagagcagaaaagcattcaagatttgcaggccttgctatggatgcgcttaatcaccatggaggccagcaatacccatctcagcatggctttgatattctctacttcctggcctttaaaaatgacctataatttttcagtttgctttactatattttataaagaaaattctatcttatggttgattgagcattgagacttatgaaggcattaggatagatagctcaggaatgtaaaggttcagaaaaggtctgttttctcagattaacaaatatgatggattccatggctgaccttggtgcttaaaccaggaggtttcaatctagtcctagagttgtgtccctctgaaaggcccaatgccatgtaactaactttaaactggatatatactttgagccttacttaattcacagataagttgacttaactcagtatttttatttcaattaatgaaaacagtcctcttttcaaccccaggttgcttacattttgctggtctccccaagtgaccattggtggagaccaattaatgaaggaatgaaattcactttattgggactgtggtattcaacagagccacacttaaccactttttccaatgaagaatctccagaatgataatgcccaaatatggatggccaagaagaatttgtatctacggtgtgctttatgtgtttttgacactgctgtattctgtgtgatcaagtgatttgcagctggttccaatgtgactgagtgttctcaaagatttctagtaactaagtcaacttaattttcttaagcctggtattactatcagcctcacatttaccactttgattctagttttttaactgttcataacagggcataccgagggttgggatgagagcctacttcctacctcttaaggcactttcctcattattttgccatataatcttgaactgcatgataagctgtttaaatgtccatgacttctcccagagcaactagcaaagtatatgacattttgaatagagattagtggaaaggaaaatgtagagatttaagttcagaggtacaaacctcaataaaacctccttagagcacataccatgagtagagtatatgtaaacgtatatgagaagagagtcgctataatagtcctctctaagtagattagttcattgtctaatggaagtgaacatctttactcctgttatcaccatagtactgaatgaactgtataatgagtttttcaaacaagtatttaaaatagaactttcacgtacaaagcaagggcataaagattttggtttgtgtttctgtaagtgtagtttaccatctaaagctttggtttttaattttaaaaaaagcttcaaggtattgccattccttagcatccttattgattatgggtgatgagtttttaactcttaaaatcatatacgtgtattagtttatcttaactgttgccctaagcaaaagggaaggtatacacctaagggatgtacttattttgcatttttggtcatgggtgggaatggggtgggtgcctacttaaatagtttttaaaaaagaaaaaaatcacaaatatttttctactgttatatatgatcttcctttatactagtttctctctagtaaggcatgccagaagcccaagataccatatcatgaattcttacatattgtaccttttgttggtggttaaatcgcatcagatgcttggcattgctgccataattataaaatgcttgtaaaggatcaaatatcactaaatactttaaattgttttacttaagagtctaatctgggaagttttcaaatcatactattaatgtgtaatctaagctcttcagatgtatccatgaataatcctggaacaatattgcttgtattcctgtcatagaacaggttttgtaatctttaaaagaaatgaaaatttatataataaagtttcaaatcaatgcaaaaaaaaaaaaaa

SEQ ID NO: 592 - DNA, 2649 bp, Homo sapiens
atctctcggcttccgttgagcaccaagcaagatggcagcttccgagacggttaggctacggcttcaatttgattacccgccgccagctaccccgcactgtacggccttctggcttctggtcgacttgaacagatgccgagtcgtcacagatctcattagtctcatccgccagcgcttcggcttcagttctggggccttcctaggcctctacctggagggggggctcttgccccccgccgagagcgcgcgccttgtgagagacaacgactgcctcagagttaaattagaagagagaggagttgctgagaattctgtagtcatcagtaatggtgacattaatttatctcttagaaaagcaaagaagcgggcatttcagttagaggagggtgaagaaactgaaccagattgcaaatattcaaagaagcattggaagagtcgagagaacaataacaataatgagaaggtcttggatctggaaccaaaagctgtcacagatcagactgtcagcaaaaaaaacaagagaaaaaataaagcaacctgtggcacagtgggtgatgataacgaagaggccaaaagaaaatcaccaaagaaaaaggagaaatgtgaatataaaaaaaaggctaagaatcccaagtctccgaaagtacaggcagtgaaagactgggccaatcagagatgtagttctccaaaaggttctgctagaaacagccttgttaaagccaaaaggaaaggtagtgtaagcgtttgctcaaaagagagtcccagttcctcctcggagtctgaatcttgtgatgaatctatcagtgatggtcccagcaaagtcactttggaggccagaaattcctcagagaaattaccaactgagttatcaaaggaagaaccctctaccaaaaatacaactgcagacaaactggctataaaacttggctttagccttacccccagcaagggcaagacctctggaacaacatcttccagttcagactctagtgcagagtcagacgaccaatgcttgatgtcatcgagcaccccggagtgtgctgcgggtttcttaaagacagtaggcctttttgcaggaagaggtcgtccaggcccagggctgtcatcacagactgcaggtgctgctggatggaggcgttctggctcaaatggtggtggacaggctcctggtgcttctcccagtgtgtctctccctgctagtttaggaagaggatggggtagagaagagaaccttttttcttggaagggagctaagggacggggcatgcgggggagaggtcgaggacgagggcatcctgtttcctgtgttgtaaatagaagcactgacaaccagaggcaacagcaattaaatgacgtggtaaaaaattcatctactattatccagaatccagtagagacacccaagaaggactatagtctgttaccactgttagcagctgcccctcaagttggagaaaagattgcatttaagcttttggagctaacatccagttactctcctgatgtctctgactacaaggaaggaagaatattaagccacaatccagagacccagcaagtagatatagaaattctttcatccttacctgccttgagagaacctgggaaatttgatttagtttatcacaatgaaaatggagccgaggtagtggagtacgctgtgacacaggagagcaagatcactgtattttggaaagagttgattgacccaagactgattattgaatctccaagtaacacatcaagtacagaacctgcctgagtatgacctctccaccttatagtttatgaatgtcttgtttgtgaaagtgactataacccaaacttttttttttttttaaagaggatttggaagttgtatggatttttttgttatcttcactttactgcataggaaacaatctacctcatcatttaaaatgacatgggtgtcggttttgtagatctttggtttttttgtcaggtttaatttcagttaacaaaatgtaaaacatgacattccctgcagatattgttgtataccagtatggtttcttctctttctttaaatgtttttggccatcaagtagcagtcgtcagtaggagtttataataccaagaatgtgctgcgtatcttgtctcaataagttttaagtaacatttaaaaatattaaagcatgttatttgacctaattttttagcatttgagttgttccattaaatggagcatcttgtaaatttcaagtattttatacttgcaattgttaagagttaacaggtagttggatttgtcgcagacaatgagttaaggaatcctttcacgtttttcccaactttaaaattaaggattctcaggtccctgtgtagagcagtgaaaataagatgtgcgtatgtgtgtgtatgcctggagaattggtgtttcacttcagtgagaggattggctgtgagcttcagaccaggaaatgtgtcatcttgccaggcacctggctgagtgtgctggagtgaggatcttgaacagaaacttccttttctgttattattcactacgaagctaaaatggccaaatatataccgtgaaaattggtttcatttaacaaaagatcagatccctccttcagctgtacacatttttaaataaaatcatattgaactaaaaaaaaaaaaaaaaaa

SEQ ID NO: 593 - DNA, 4116 bp, Homo sapiens
agccatgcgtctctgagcgccccgagcgcgcccccgccccggaccgtgcccgggccccggcgcccccagcccggcgccgcccatggccgaggcccccccgcgccgcctcggcctgggtcccccgcccggggacgccccccgcgcggagctagtggcgctcacggccgtgcagagcgaacagggcgaggcgggcgggggcggctccccgcgccgcctcggcctcctgggcagccccctgccgccgggcgcgcccctccctgggccgggctccggctcgggctccgcctgcggccagcgctcctcggccgcgcacaagcgctaccgccgcctgcagaactgggtctacaacgtgctggagcggccccgcggctgggccttcgtctaccacgtcttcatatttttgctggtcttcagctgcctggtgctgtctgtgctgtccactatccaggagcaccaggaacttgccaacgagtgtctcctcatcttggaattcgtgatgatcgtggttttcggcttggagtacatcgtccgggtctggtccgccggatgctgctgccgctaccgaggatggcagggtcgcttccgctttgccagaaagcccttctgtgtcatcgacttcatcgtgttcgtggcctcggtggccgtcatcgccgcgggtacccagggcaacatcttcgccacgtccgcgctgcgcagcatgcgcttcctgcagatcctgcgcatggtgcgcatggaccgccgcggcggcacctggaagctgctgggctcagtggtctacgcgcatagcaaggagctgatcaccgcctggtacatcgggttcctggtgctcatcttcgcctccttcctggtctacctggctgagaaggacgccaactccgacttctcctcctacgccgactcgctctggtgggggacgattacattgacaaccatcggctatggtgacaagacaccgcacacatggctgggcagggtcctggctgctggcttcgccttactgggcatctctttctttgccctgcctgccggcatcctaggctccggctttgccctgaaggtccaggagcagcaccggcagaagcacttcgagaagcggaggatgccggcagccaacctcatccaggctgcctggcgcctgtactccaccgatatgagccgggcctacctgacagccacctggtactactatgacagtatcctcccatccttcagagagctggccctcttgtttgagcacgtgcaacgggcccgcaatgggggcctacggcccctggaggtgcggcgggcgccggtacccgacggagcaccctcccgttacccgcccgttgccacctgccaccggccgggcagcacctccttctgccctggggaaagcagccggatgggcatcaaagaccgcatccgcatgggcagctcccagcggcggacgggtccttccaagcagcatctggcacctccaacaatgcccacctccccaagcagcgagcaggtgggtgaggccaccagccccaccaaggtgcaaaagagctggagcttcaatgaccgcacccgcttccgggcatctctgagactcaaaccccgcacctctgctgaggatgccccctcagaggaagtagcagaggagaagagctaccagtgtgagctcacggtggacgacatcatgcctgctgtgaagacagtcatccgctccatcaggattctcaagttcctggtggccaaaaggaaattcaaggagacactgcgaccgtacgacgtgaaggacgtcattgagcagtactcagcaggccacctggacatgctgggccggatcaagagcctgcaaactcgggtggaccaaattgtgggtcgggggcccggggacaggaaggcccgggagaagggcgacaaggggccctccgacgcggaggtggtggatgaaatcagcatgatgggacgcgtggtcaaggtggagaagcaggtgcagtccatcgagcacaagctggacctgctgttgggcttctattcgcgctgcctgcgctctggcacctcggccagcctgggcgccgtgcaagtgccgctgttcgaccccgacatcacctccgactaccacagccctgtggaccacgaggacatctccgtctccgcacagacgctcagcatctcccgctcggtcagcaccaacatggactgagggacttctcagaggcagggcagcacacggccagccccgcggcctggcgctccgactgccctctgaggcctccggactcctctcgtacttgaactcactccctcacggggagagagaccacacgcagtattgagctgcctgagtgggcgtggtacctgctgtgggtgccagcgccccttccccacctcaggagcgtgagatgccaggtcgcacagagggcagcagcagcggccgtcccgcggcctctgggccccccagtgccctgcccactccatcaaggccctatgtggcccacctggcaggggcacagccccgggagtgggagcgggcgctggggccctgggccctgacccagcttccagctatgcaaggtgaggtctctggcccacccttcggacacagcagggaagccctcccgccaagtccccgccccacttgggggtgggccaaggtgcccccacaggtacccacaaagcacaggaccctgccacaaggcaggtggacaccatatatgcaaaccatgttaaatatgcaactttggggacccccatggggtctctctgtccctcccccattgggagctgggcccccagcagtagctggtctcaggctgcttggccaccaccctgtccctattctttggcttatcactccttcccctcccagcatggggcctgtttctcccctgccctctcctaagggcaatgcctgggcctttcttcccatttgcaagtgtcagctcccaggggctccctcctcctgctgggtggccactcccctccttggccctccagacaccactcatagtcagcacaggtttctgtatcctccccaaaactcccagacagtgcttcgtggacgatcgcacaaacatagccttttagtttctccagacaggaagaaagcctctcacacttaaacatgcaatgacgtgacacacttggagacatgagtgcagagccactcagccgctcctgggcctctgcagcagatgccagtggactggccttgcagggtgacgaccactaagaggaagacccccaactccatctgagcaggagaaggagctttgaagtaacccgagagctctccaggccccacccagacctttacccgctccccttcttcaagaagatctcctcctctctggtccaggagccctaacccactgcctctgcctgtccccaagggcccgcctccgtgtctccacagcacaactcgggcccaggcctgacaccactggagagaccccaggcccacttctagccaggcctgtgccttcctagtcactctaactcccagagagaataagaatgcatgtaatagctataccaaccgcgcatccggctttcacatgcactgtctcccctccctccacaccccacttcttcacttcaattggcagcgccacatccaggcgtcagcccccattcactccaggaacactttcttatccccacccctttgctcctcttctgcaaagccaatgcaggtggcaggaaggtgaggggtagtggaccaatggcaaccctctgtgggaacaaggggccgaggccacgctgcctgcatctcgtgctggggacctgcatgcgccagcaccagggcttggactggatcttactcagtccatggtgcccagcctctgccccaacatgccctctgcatgtgaccgtcatgccctggatggagccactcctggctcaccccacctgcactgcactgtccccagagagccacccctccacccactcagagacagctgtggagagggccaggagaatgggattaccctatgaccaaggagacatgggaagaagccctccttccttccacgatcgaggttccgccatcaactcggttctcggatatgcaagtacctcactttgttaacttattaacttattggtttcattaaagttttcaagaggaaaaaaaaaaaaaaaaaa

SEQ ID NO: 594 - DNA, 3561 bp, Homo sapiens
aatcctcccgggagccgaggaggctcgcgcgcgtgcatcccgcaccatcccccggccccgggccctggccggcgtcagaccgagctgccgccgccaccaccgcagcagcagcagtcggggagccaggcccagccagggccgcgggaggcgggggcgcccgggccctggatgtcccgcagcgcggcggccagcggcggaccccggaggcctgagcggcacctgcccccagccccctgtggggccccggggcccccagaaacctgcaggacggagccagacggggcgggcaccatgaacaagttacggcagagcctgcggcggaggaagccagcctacgtgcccgaggcgtcgcgcccgcaccagtggcaggcagacgaggacgcggtgcggaagggcacgtgcagcttcccggtcaggtacctgggtcacgtggaggtagaggagtcccggggaatgcacgtgtgtgaagatgcggtgaagaagctgaaggcgatgggccgaaagtccgtgaagtctgtcctgtgggtgtcagccgatgggctccgagtggtggacgacaaaaccaaggatcttctggtcgaccagaccatcgaaaaggtctccttttgtgctcctgaccgcaacctggacaaggctttctcctatatctgtcgtgacgggactacccgccgctggatctgccactgttttctggcactgaaggactccggcgagaggctgagccacgctgtgggctgtgcttttgccgcctgcctggagcgaaaacagcgacgggagaaggaatgtggggtcacggccgccttcgatgccagccgcaccagcttcgcccgcgagggctccttccgcctgtctgggggtgggcggcctgctgagcgagaggccccggacaagaagaaagcagaggcagcagctgcccccactgtggctcctggccctgcccagcctgggcacgtgtccccgacaccagccaccacatcccctggtgagaagggtgaggcaggcacccctgtggctgcaggcaccactgcggccgccatcccccggcgccatgcacccctggagcagctggttcgccagggctccttccgtgggttcccagcactcagccagaagaactcgcctttcaaacggcagctgagcctacggctgaatgagctgccatccacgctgcagcgccgcactgacttccaggtgaagggcacagtgcctgagatggagcctcctggtgccggcgacagtgacagcatcaacgctctgtgcacacagatcagttcatcttttgccagtgctggagcgccagcaccagggccaccacctgccacaacagggacttctgcctggggtgagccctccgtgccccctgcagctgccttccagcctgggcacaagcggacaccttcagaggctgagcgatggctggaggaggtgtcacaggtggccaaggcccagcagcagcagcagcagcaacagcaacagcagcagcagcagcagcagcaacagcagcaagcagcctcagtggccccagtgcccaccatgcctcctgccctgcagcctttccccgcccccgtggggccctttgacgctgcacctgcccaagtggccgtgttcctgccacccccacacatgcagcccccttttgtgcccgcctacccgggcttgggctacccaccgatgccccgggtgcccgtggtgggcatcacaccctcacagatggtggcaaacgccttctgctcagccgcccagctccagcctcagcctgccactctgcttgggaaagctggggccttcccgccccctgccatacccagtgcccctgggagccaggcccgccctcgccccaatggggccccctggccccctgagccagcgcctgccccagctccagagttggacccctttgaggcccagtgggcggcattagaaggcaaagccactgtagagaaaccctccaaccccttttctggcgacctgcaaaagacattcgagattgaactgtagcccgagccgccccacccactccatcatctccaggtgccccacgcctgggggtggaggcacaacctctcccctaaccctgctccctggggctgcgcccctcaacaccctctcaacacccccctccctcaaccaccccgacaaccactacagaaccaacattgtgacgcccaggttgcaacaggatggaattcagggacggacccagcctggctaagggaaccatttcactgccggacttaggctggcaatgcccccttccccaaccccagacacaggggttggccacaatcccactgaatgcccttggttcacactccatttcccagtttctgttgacccccaccttccagtgttggacaggatggaggggggacacttgcttaggggctctcctgggccccacaccagtgcccaccccaaatctggtcgtctcctccccccatgcacagcacaagctaagggctgccctctgcccacacgctgcgttcactgccaatgctgtactcacctccatcaccctccaactttggggcccatgtcttccttgggccaaggtctcatgggggctagggccaagttgggggcccaggaggcggggagggaggaggaggagaagatgcgcagttacctcatgtcggtgcccgctggggaggggtccgggaagaaggggaaggggtgcctggcgggtacttttctatcttttatttccagattttttttgtatctaaacttgaagatttgtattatacaaggacagccaataaaggaagaatataatggtgcccctcgggaaacgagggtgtgtgtagggcgctggtgaggccctagaacctttcctcctgagtcatggactgaaacagagtcagaaggatgtccctgagtgataacctctgagtcatagcgtggtaacaggtaccactgactcagcacctgccaggcgggtattaaaggagccaaaattaatcaccccatttctattccttacagagttagaatcaaggaataaaaaacaaatattatgaactgctggctgggcacagtggctcacgcctgtaatcccagcactttgggaggtcgaggcaggcagatcacttaaggtcaggagttcgagaccagcctggccgccatggagaaacccagtctctaccaaaaattcaaaaattagccgggcgtggtggcaggcgcctgtaattccaggaggctgaggcacaagaatcgcttgaacccaggcagcagaggttgcagtgacctgaggtcacaccattgcactcctgcctgggcaacagaatgagactctgtctcaaaaaaaaaaaacaaaaaaaaaaaaactacttctaattagctcaatattaatattttaacaagttgggttggtaacagtatatctttgcccatgctggcaaattcttgttttgtcagcattttccataactctggccaaagtgtcacctgatgtggcaacgttttacagtcttgctattgtttcttgagtcctttaatctataagatgtatttttaaaaatatataacatataaattttgtttcgttatagctctttaaaa

SEQ ID NO: 595 - DNA, 5961 bp, Homo sapiens
ccggtcccttggcgacgggtcttgcatgtgacactcttgccctctagtgcctcaccagcttggtagcagtttgatggctaatattaataagatgttacataacatgagagtactgggccaggactggtgttgctaccacttgtaaagtcaaaaagcctgagccgatggtaacgagtggtactgtttccgtttcttttccatctattgcaactttctcaagcattttcagctctgaactttaattccagactgtattttctgtgagtcctgatcaagtgatacaaatgagctgcaatggtgacataaactcttgacagagattggaaaagtagctggaacaccatcttttcttttaactttttatggtgcttctgttggcatagttggggaaagcacctacaacatgagttttatcatgaagcttcacagacactttcaaagaacagtcattctgcttgccactttttgtatggtgagcattatcatttctgcttactacctgtacagtggctacaaacaggaaaatgaactctctgagacggcttcagaagttgactgtggcgacctccaacacctaccatatcaactaatggaagtgaaagcaatgaagctttttgatgcctcaaggacagaccccacagtcctagtatttgtagagagccagtactcatctcttggtcaagacatcattatgattctagaatcaagtagattccagtatcacattgaaattgcccctggaaagggagatctcccagtgcttatagacaaaatgaaaggcaaatacattctcattatttatgagaatattttaaagtatataaatatggattcctggaatcgaagccttctagataaatactgtgtagaatatggtgtgggtgtcattggattccacaaaactagtgagaagagtgtacagagctttcagttaaaaggtttccctttttccatatatggaaatcttgcagtaaaagattgttgtattaatcctcattctccattgattcgtgtgaccaaatcttccaagcttgaaaaaggttctttacctggaactgactggacagtttttcagattaatcattcagcctatcaaccagtaatatttgccaaagtaaagaccccagaaaacctttctccttccatctctaaaggtgctttttatgccactattatacatgacctggggcttcatgatggaattcaaagggttctttttggcaacaacttgaacttttggctgcacaagctcatcttcatagatgccatctccttcttatcagggaagaggctgacattgtccttggacaggtacattcttgtggatattgatgatatatttgtgggaaaagagggaacaagaatgaacaccaatgatgtaaaggccctgcttgatactcagaatcttttgcgtgcacaaatcacaaattttacattcaacctgggattttcagggaaattttaccatacaggaactgaagaggaagatgaaggagatgactgtctgttggggtctgtggatgagttctggtggtttcctcacatgtggagccatatgcagccccacctcttccacaatgagtcatctttggtggagcagatgattctcaacaaaaaatttgccttagagcacggcattccaacggacatgggctacgctgtggcccctcaccattcgggcgtctaccctgtacatgttcagctttatgaggcctggaagaaggtctggaatattaaaatcaccagcactgaagaatatccacatctgaagccagctagataccggaggggttttatccacaaaaacatcatggttctcccaagacaaacctgtgggcttttcactcacaccattttctacaaagaatatccagggggtcctaaagagctggataagagtatccaaggaggagaacttttcttcactgtcgtcctcaaccctatcagcattttcatgacccatttgtccaactatgggaatgaccgactgggattatatacatttgttaatctggccaactttgtgaagagctggaccaacctgcgacttcagactctgcctccagtacaactggcccacaagtattttgagctgtttcctgatcagaaagaccctctctggcagaatccttgcgatgacaaacgccacagagacatttggtctaaagaaaaaacttgtgatcgcttaccaaaattcttggtaataggaccccagaaaactggtaccactgctttgtatttgttcctggttatgcatccttccatccttagtaactcccccagcccaaaaacctttgaggaggtacagttctttaatagaaataactaccacagggggattgattggtatatggatttcttcccagtcccatctaatgtcactaccgactttttgtttgagaagagtgccaattacttccactcagaggaagcccctaaaagagctgcttctctggttcccaaagccaagattatcaccattctcattgacccttcagaccgagcatactcctggtaccagcatcagcgatcacatgaagaccctgcagctctgaagtttagcttctacgaagtgatctcagcagggccccgtgcaccctcggagctcagagccttgcagaagagatgtttggtcccggggtggtatgccagccacatcgagagatggcttgtttatttccccccatttcagttgctaattattgatgggcaacaactaagaactgatcctgctacagtgatggatgaagtacagaagtttctaggagtcttgcctcattataattactcagaagctttaacgtttgattctcataaaggtttctggtgtcagttactggaagaaggtaaaacaaaatgccttggaaagagcaaaggaagaaaataccctccaatggattctgatagcaggacatttctgtcaagctactatcgagatcacaacgtggaactctcaaagctgctgcacaaactgggtcagcctctgccatcctggctgagacaggagctgcagaaagtaagatagcactgagagaaaacttgagacttcatcgtccatgtagaacacaccttttccaaagcttccagaagctaccaaaaggcagttgaaaaatatacctcttcaaatgagaaaaaagaacagtttcttccatgtgctggcacgtggatgattagaaaaaaagaaaaagtatgtgttacaagccttgaggcctgtggcctttctcttaacccatatctgagcctgtgggattattgtagactactgtgcactcatgtggaagtcaattgcaaccaacataaatatcaaacacaaatgcagaactgttccatttcatagtaatatttacacttttatatatcaactaagattgtgtctctgtaggtttttagaccactgtttgcctgtacgatgttttcttattattttattctataaagtgtcctatgaaacaagaagcaaaataaacatcacaatgtagcataaaatgtcaaaagcataacacccatgaaaaatgcttgccaaaatttaaatccacttaagtatttagaaataattgtaaattataatttgtgctagatcagagtggaaaagttatatatgagtgttatctgcaccaaaaaaaaataagtgctatagcaaaagtgattttttcatatacatagtctagtgaatatatgtaaaaattactaactcttccatcacaacgtaattgttatactgaaatatatactgtaaagctgttggatggtaaatagaaacacatcaagtacaccaaaacagtaaataacaatgtaaagtgtactgactgaatcctctaaaagggagaaattgtaggggtctaaaaacatatcatcgagaattctatgtccacttgctgtaagctgtgaatctatcccagtagtcctcactagttctacagaaatgcatgcctagagtctgaggtatgtgtcatctccagaaacaggttgacttttaaatgtgaatagctatttttaatgctccccaaaacaaaacctattaaactaaaactaaaaacagtttccctagatgatgtggttaggctatttacatttaggttattaaaaaattgcattttcccagatagttcaaaataaaattatgtaatgtagtagagatttataacaaaaaacaaattaatatattatttgtaatctaatgtttgcaatgatacttttgatataaggcaaagaaacataagcagagcagaggcccatttttgaaaatatttcacccatcactctggtggaagtaacagatcataggtacaattaaggattagctactaaattaaatgcaggaagtacaaagatgagcaagtcatgctcttgaaatatatttacatttcaattgtaaataatatatatggttaataaagtttccaaaaaagaaaagaatacatcatacttattttcctgttaatatttacttaatttttttttttgagagggggacagagtctcactatgtcacccaggctggagtgcaatggtgtgatctcagctcactgcaacctccgcctcctgggttcaagtgattctcctgcctcagcctcctgaggagctgggattacagccatgcaccaccacgcccgggtaatttttgtatttttagtagtgacagggtttcaccatgttgactaggctgatcttgaactcctgacctcatgatccacccaccttggcctctcaaagtgctgagattacaagcgtgagccaccatgccctgactacttaatttttaaatgtactgtacatatacataaaatttaagtagtaaattaattccctgctatgattataagcctttataaaatattatcaaaggtatgattagaaacaaatgggaggaaaacccatagtaaaaatattttcattgtcattttaatgggtaaaactatcaattactaattagaaaatgaattgtgagatccacttactataaatttttaactgtacattataattacttttttaaagtttcatgtacctaaagcatatgctaatttttaaatatactattagcagaaaaaattggaaaaatcaccaatttttaagactcttgactctaaaagcaaaatcaaagtgatttggacaaatatgggaaacacagtcttcatgcttactgctgtctcttttatagcagcagatgccagacatgctaggaaaattactatagtcttccatctccaccaacttaagaaaactggcttaggaaggttaaacatgagaataggcctcagcagttatatacagtgtcatgttttcatttggcaacaacatttattctaataaaaaaagaaaagaaaaactgatacatttatgctttaatggtaagatgtacatttgaactgctaagcaaagctgctaatggcctattttgtttaggtaaatcgagttgactgaacacttcatccttttaaatagatgtcaaaaacatactccgtgtttgtataaagacaggagaaaaaggaagagatcttaccaaaatttattcattcacaagtacatgtattacgctagctagagcagcaaacctgtgaaaggatttttgaccactcaatgtgtcttgaagacagcatcaaattctagaggacatgcatactttccacattatatactccaactggttaatatgctaatctgaaagtaacataaatacatatgagagaataatgagagataatctgatttaaaactagctttgtatagaattccctttttcattgtttaaaatatgaaacttcctcaggaagaaatgaaatggttatttcaatgtttatagctgtaatattcttgtcattcacattgaatgaaaattactggaaacatttttttctctgagttttttaaaataaaaaacctagatataattctgatagtagcatggtacctcatatgtacaacaataaactgataggaaaatgaaaaaaaaaaaaaaaa

SEQ ID NO: 596 - DNA, 2338 bp, Homo sapiens
gctccgcgcttctgcttccggcggcgctggtggtggcgcgcggcgcggcgcggcgatggcggcgggtggcagcgatccgcgggctggcgacgtagaggaggacgcctcacagctcatctttcctaaagagtttgaaacagctgagacacttctaaattcagaagttcatatgcttctggaacatcgaaagcagcagaatgagagtgcagaggacgaacaggagctctcagaagtcttcatgaaaacattaaactacacagcccgtttcagtcgtttcaaaaacagagagaccattgccagtgttcgtagcttgctactccagaaaaagcttcataagtttgagttggcctgtttggccaacctttgcccagagactgctgaggagtccaaggctctaatcccaagcttggagggacggtttgaagatgaggagctgcagcagattcttgatgatatccagacaaagcgcagctttcagtattaatctccaaacatcactgctgctcggagaaaccacatccccaggcataacaccaccttcccactgtctggggctgacttgcacagaaattctgttgaagacagttgagaattcctttggagaaaacagcccagcttggcgtggggttaggttgctgtttcaaataactcacaggcccaggtgacatggaatcttggagcagccttgtgcagtggcagccagtggcttcctgaacgtgcctctgcgaagtgtgagatgaggggtcacataaccacactgttgactacctcattcctggtttttggcctccacatcatcttttttcttaatatttcatgttttaatttcagggtgtttatactttttgaaactagaccagaagatagtagactttatagagaaagaccagttttacctagatactaaaggaagaattaaaccgctgttagtttgaaatgctttttttttttttttttaaatggagatagggtcttaactcttgtccaggctggaggagtgcagtcgtacagtcatggctcactgaagtcttgaccccgctgcctcagcctcccaaataactggggccacaggtgtgcaccacaactctcagctaatttttaaaattttttatagaggtggggttttactatgctgtccagactggtcttaaactcctgggctcaagtgatccccctgccttggcctcccaaactggtgagattacaggcatgagccaccacaactggcctgaaattcttaaaggatgggagtgtcgatgacagcaccttggcatcgttgtgcctaacctgggagacggaagaagcacgccatgggaagtgtttacacttggggacaagtgctaagtattgtggagcccatagccccttgagatagatggctactttgcctttcttcttgaactgtcttgcagaatgtggatttggggtaagtggtcttgaaggattcatttagtcaccctcaaattaagatttttacttcatctttcttgggcctgcacctccaagataacaaagaagaagcaatggtcgtgccaaagaggtccacaaccaggtgtgcactgttcactgcagcccatttgctgtatgaactgtggttgttgtgtgcccaatgacaaggctactaagaaattcatcatttgaaacgtagaggccgcagcagtcagcgatgtttctgaaatgagcatccttgacgcctgtgtacttcccaggctggatgtgaagctacattaccatgtgagttgtgccattcacagcacagtggtgaggaattgagctcatgaagcaggcaaggaccgaacacctccaccccaacgtagacctgcaggtgctgccccatgacctccaccaaagcccatataaggagcggagttgttaaggactgaagaaaaacttctctggagaaaaataaaattgcaattctacttaaaaaaatttttttttttttttacttcataggccaggcttgaagttctgaacactttgaagtctccaattatgagagatccagtctaagcctctggcctgctaattagcaataagtgctttatttggaaggagggagtcatccactcttgagccactgcagtgaagtcacttgatctcagtctgggggaaaacacttcaatagctaaacattctagctttgatttttctgaagggaatacacttgttttcaattttggggtttttctttggggcacttgcttgactctgtatgaacttgtgatccaaggaaaaaggagaaagaacagtgttggcttttaaaatcaggatggttttatgtttgctacgaaataaggcaagaataaaaaattcttatttttaaaaaaaaaaaaaa

SEQ ID NO: 597 - DNA, 1749 bp, Homo sapiens
gcggtcttatataagccagatccgcaggggagtccgcagaagggttaaacaggtctttgggcttcggcgacctcgcccgcggcagaaaccggtaagaagacagtgggctgcgcgtctcattttcagccttgcccggactctcccaaagccggcgcccagtagtggctccagagcccacaggtggcccccggcagtctctggggcgcatggagcggcgttaatagggctggcggcgcaggccagtagccgctccaacatgaacctcgtgggcagctacgcacaccatcaccaccatcaccacccgcaccctgcgcaccccatgctccacgaacccttcctcttcggtccggcctcgcgctgtcatcaggaaaggccctacttccagagctggctgctgagcccggctgacgctgccccggacttccctgcgggcgggccgccgcccgcggccgctgcagccgccaccgcctatggtcctgacgccaggcctgggcagagccccgggcggctggaggcgcttggcggccgtcttggccggcggaaaggctcaggacccaagaaggagcggagacgcactgagagcattaacagcgcattcgcggagttgcgcgagtgcatccccaacgtgccggccgacaccaagctctccaagatcaagactctgcgcctagccaccagctacatcgcctacctgatggacgtgctggccaaggatgcacagtctggcgatcccgaggccttcaaggctgaactcaagaaggcggatggcggccgtgagagcaagcggaaaagggagctgcagcagcacgaaggttttcctcctgccctgggcccagtcgagaagaggattaaaggacgcaccggctggccgcagcaagtctgggcgctggagttaaaccagtgagccgaggcccgcgccgaggacctggccaggccagccactcctgaagccccgggaggagaggaaggcagcggcgaacgccaggctctgggctccggcgactggtgctacgcatcccgcggagcttctgctgagcgccggcaggtcgtcggctgcaaccacacacttggatcgcacgtgcaatgtcctttgattttttttaatacattaagagaaagagaaatatatatatatccacccccagcccaaccgagggcggcccttggcggcaacatgcaagaaggagggactgtcgaacccaagggctcaaagacgcactcttccacccttttggagcgaatttagaacctcagccctatctccatttccctatctggctctttctctcttgtccctccatatgatccgccccgacgccgtcttctctaattaaaatgcaataaggaatcaattcttttctgcctgagaaagagaaccagacgcaggaagatgaaaggctgccctttgttcttcgaatcgtggtggttttattttatttttctttttgtcgctgcacttcctgtttagttccaagggaaacactttctctctttctctgtctctctcttttcttccttcttttccttcctttttgtttctatctaaataaaagctttccctgtgttggaaagtttttatgtatttaaactacctaccatgcctgttgtgctcaggtgtttgttcatcctgccatccccaacccttttctacctcaagtctgtgtgaccactcacagcccccctcccttcgccaaagcagtgtctatgctcttgattaataaaacattttctgaaatcaaaaaaaaaaaa

SEQ ID NO: 598 - DNA, 5954 bp, Homo sapiens
cttcgggggcgagcgcgcgtgtgtgtgagtgcgcgccggccagcgcgccttctgcggcaggcggacagatcctcggcgcggcagggccggggcaagctggacgcagcatgatgcgcgcagtgtgggaggcgctggcggcgctggcggcggtggcgtgcctggtgggcgcggtgcgcggcgggcccgggctcagcatgttcgcgggccaggcggcgcagcccgatccctgctcggacgagaacggccacccgcgccgctgcatcccggactttgtcaatgcggccttcggcaaggacgtgcgcgtgtccagcacctgcggccggcccccggcgcgctactgcgtggtgagcgagcgcggcgaggagcggctgcgctcgtgccacctctgcaacgcgtccgaccccaagaaggcgcacccgcccgccttcctcaccgacctcaacaacccgcacaacctgacgtgctggcagtccgagaactacctgcagttcccgcacaacgtcacgctcacactgtccctcggcaagaagttcgaagtgacctacgtgagcctgcagttctgctcgccgcggcccgagtccatggccatctacaagtccatggactacgggcgcacgtgggtgcccttccagttctactccacgcagtgccgcaagatgtacaaccggccgcaccgcgcgcccatcaccaagcagaacgagcaggaggccgtgtgcaccgactcgcacaccgacatgcgcccgctctcgggcggcctcatcgccttcagcacgctggacgggcggccctcggcgcacgacttcgacaactcgcccgtgctgcaggactgggtcacggccacagacatccgcgtggccttcagccgcctgcacacgttcggcgacgagaacgaggacgactcggagctggcgcgcgactcgtacttctacgcggtgtccgacctgcaggtgggcggccggtgcaagtgcaacggccacgcggcccgctgcgtgcgcgaccgcgacgacagcctggtgtgcgactgcaggcacaacacggccggcccggagtgcgaccgctgcaagcccttccactacgaccggccctggcagcgcgccacagcccgcgaagccaacgagtgcgtggcctgtaactgcaacctgcatgcccggcgctgccgcttcaacatggagctctacaagctttcggggcgcaagagcggaggtgtctgcctcaactgtcgccacaacaccgccggccgccactgccattactgcaaggagggctactaccgcgacatgggcaagcccatcacccaccggaaggcctgcaaagcctgtgattgccaccctgtgggtgctgctggcaaaacctgcaaccaaaccaccggccagtgtccctgcaaggacggcgtgacgggtatcacctgcaaccgctgcgccaaaggctaccagcagagccgctctcccatcgccccctgcataaagatccctgtagcgccgccgacgactgcagccagcagcgtggaggagcctgaagactgcgattcctactgcaaggcctccaaggggaagctgaagattaacatgaaaaagtactgcaagaaggactatgccgtccagatccacatcctgaaggcggacaaggcgggggactggtggaagttcacggtgaacatcatctccgtgtataagcagggcacgagccgcatccgccgcggtgaccagagcctgtggatccgctcgcgggacatcgcctgcaagtgtcccaaaatcaagcccctcaagaagtacctgctgctgggcaacgcggaggactctccggaccagagcggcatcgtggccgataaaagcagcctggtgatccagtggcgggacacgtgggcgcggcggctgcgcaagttccagcagcgtgagaagaagggcaagtgcaagaaggcctagcgccgaggcagcgggcgggcgggcgggcgggcgccagggcggggccgagcgagagcgggcgccttggcccggccgccgcggacttggcccgcgagggctttcccaggtggggggagggagggggcggggccgcacggcgcggggggcgggaccctcggcggcccctccccctacccccaccctgcgcgctctgggcgggagccgcgtgcacgcggggcggggtgcgccgccggccgggccctggagaaatgacgagacgtagctacctcacggggctccttccagagcagagacgcgcttccctgggcctgggcgcggccgccgtggaggggctgggggcagcctgccctggggcccgggggcgggcgcagaatcgcacaactggggccccaggcgcggggcgtggatggcgcggagacgtggacgggaggagaactgtgaattctcaagcccgtagtgtgggcggggcgcggagcacccaccaaaccaccacccgacacgcagccgacgggatccccccctttctccccggccccttctagcagttccccgcgggccacctggctgtcacagcctggactcctccatctgaaggggcctggcagcatttggggagtggacagctcctgtccagccagcatgccccaggcggcctctgtctccactgctacctgctgagtgggtcctactgggtgggggcttggggtcggtgagtggttcacctgtggagagaggagaggaagcccctgctgctgcctgtctctgcccctgcccctgcccctgcccagcgtggggctggcccatccggaaggcagtgggcccagggacacccctgagaagcccaagccgggtggtcaccgcctcatgctggagctgcctgttggaggaggcatcgcaaacgcaaaacctcccagagagtttccttttggaaacttggaaccagccctttttatgacgttttccagggggagggggaggggcactggctgggtttacggcagtgacactatttatgtaaatgacatcagctcccgcaaggcccctcagcaatgtcaacagctggaaagggcctgaacgggcttggagtctgcaggctgcgaaggcacttgggcctggcttggggccgggggcttgtttgagctgggatggggtttgctggctcagtgaagtaccagagtgcctgagccatgggtgggcaggggcacaggaatgaccaggttcctgggggccaaggaggccatgctggcttctccaagggaaggcacagaggctgccggcctgccccctacagctgtcttgggtctggcctgggccacaccttgaccgtgcctttccagacggtctttgtggagtctgcccgtgccctccactgtgccccagccctccttccaaaatctcctagagacacggtcctcaagcaggcagccccttttgttctgacctcctcacacagggtccattcctgtgccctggggcctcctggctccctgccttcctgggctctctgcactgcccgggcctctggcccacatcctcacacccggcgcactgaattaagaggcctggctcccctcacagtcaggaaattggtttcactttcccggccagagtttggctgctcaaaagggtcataccaagtatgaagctcggcccccggtggtctggcttccctccgccttccccacatttacccgcatcacggctgccatttattgagcacctgctgtgtgccaggcactttacccacatgctcccagtgtgtactcatgacaaccctgtgggacagggactcattatcaccagcaaggagactggagtacacgtgcccaaggtcatgctgcaaattggtggcaggactggggctcaaactccagagcccgactttctgaccaggggccacgctggccctcactgcactccagctctgcagcctacccgcccaatccctgtgcaggctgggagggtgctcttgggggagtggccaccgagcccctggccctggttactgcctcttgaggacactggcatctgggctggagaacaggagcccggggtggggtagggcatggggacaatcacatcttcagaggaggcagcaaagtggtgcgggatgcagggacggacttgccagatggcagctccaggttccaggaaggcaggccttggatgctccgaagaggtggtagaaaggtgtttttagaaaggtgttttggctgcctcagggtggttggagagactccaggagagactggcagaggtgcctcaggggcagggagcagacagacctgccctgggaaggggcatttggcttccctgaatccagcccaaggctagaagacagggcccctctccaagctgtcagcgcccctcggatgcccagtgtggtgtgctgggcgccatcagcatcacaaggcactacgctgctggggcggttgtcctatttctgtctatgccagtgtggtttcttcaccctgcccagaagggctgtggcagccccacgatatcccaccctgggtctgggtctcacgggtgtcctgtgaggggcttgcatttgtggtggtctctgaggccacctcagcaacggagctggcgacacgccaagcaacaaggcatcttgcggaaaattcagccagtgtcctgcccctcccttcggctcagcaccccgcagggcacaggctgtccgcccggtggtctggcccttggggaatgcgtcagggtgaccagatccaccatgctagcagccaggtcactgttgggattgcacggtcgtcacgagctgcctttcctatccacacacccagccaggacccagcccaccactcccgactgcagccccggcctctgcggtgagcaccatccttgggaaagcacccctcctccactccggtgccccactccaaggagcagagggaaatgggaattgaggtgtcccggtttgtacagttaggaagggatgtaaaacggaactagattttgattttgaagagtgtattaaccagaattgtgctatgtaggtgtttgtttgaagaaaaacataccagattagtctttgtttttgaaacagcttccccagttgtcctttttcttaccagctgggtggtctggtgcccctgacagctgagtgcctgctttacggacacgcagtaatgccgaagatttgcgggggaggacatagggctgtccccgggattcacctgctggctgtggtctctgcccactgcttctgtccttggaaagcagggcaggaggcagcatccccaggggcctctatgtgggagggagggacacctggggtcacaacccagggagggagggtcacagcccagggaggctgggagctgctccaaggccctggaactctgcctcagtcgcggcatgctggagaggggtacggacttactttcttggagttgtcccaggttggaatgagactgaactcaagaagagaccctaagggactggggaatggttcctgccttcaggaaagtgaaagacgcttaggctgtcaacacttaaaggaagtccccttgaagcccagagtggacagactagacccattgatggggccactggccatggtccgtggacaagacattcctgtgggccatggcacaccgggggggatcaaaatgtgtacttgtggggtctcgccccttgccaaaagccaaaccagtcccactcctgtcattggacgtttcttcccattccctcctcccaaatgcacttcccctcctccctctgccccctcctgtgttttggatttctgttcactcagaattgtaaatgtttagttgtgaccatgacgtattgtttgggtcaatgtccctttccaatgcatactaatatattatggttattatatatgaatatatttaatgacatggaaaaagttgtggattttctttctttccttttttttgggggggggtggggggttggttagagttgtaatggacccagatggaacttgtaatgtgggccccacatgatagaactaaattcagatatcattaaataaactcttgtacacta

SEQ ID NO: 599 - DNA, 16142 bp, Homo sapiens
gcccccgccgcccccgggccctgatggactgaatgaaggctgcctacaccgcctatcgatgcctcaccaaagacctagaaggctgcgccatgaacccggagctgacaatggaaagtctgggcactttgcacgggccggccggcggcggcagtggcgggggcggcggcgggggcggcgggggcggcggcgggggcccgggccatgagcaggagctgctggccagccccagcccccaccacgcgggccgcggcgccgctggctcgctgcggggccctccgccgcctccaaccgcgcaccaggagctgggcacggcggcagcggcggcagcggcggcgtcgcgctcggccatggtcaccagcatggcctcgatcctggacggcggcgactaccggcccgagctctccatcccgctgcaccacgccatgagcatgtcctgcgactcgtctccgcctggcatgggcatgagcaacacctacaccacgctgacaccgctccagccgctgccacccatctccaccgtgtctgacaagttccaccaccctcacccgcaccaccatccgcaccaccaccaccaccaccaccaccagcgcctgtccggcaacgtcagcggcagcttcaccctcatgcgcgacgagcgcgggctcccggccatgaacaacctctacagtccctacaaggagatgcccggcatgagccagagcctgtccccgctggccgccacgccgctgggcaacgggctaggcggcctccacaacgcgcagcagagtctgcccaactacggtccgccgggccacgacaaaatgctcagccccaacttcgacgcgcaccacactgccatgctgacccgcggtgagcaacacctgtcccgcggcctgggcaccccacctgcggccatgatgtcgcacctgaacggcctgcaccacccgggccacactcagtctcacgggccggtgctggcacccagtcgcgagcggccaccctcgtcctcatcgggctcgcaggtggccacgtcgggccagctggaagaaatcaacaccaaagaggtggcccagcgcatcacagcggagctgaagcgctacagtatcccccaggcgatctttgcgcagagggtgctgtgccggtctcaggggactctctccgacctgctccggaatccaaaaccgtggagtaaactcaaatctggcagggagaccttccgcaggatgtggaagtggcttcaggagcccgagttccagcgcatgtccgccttacgcctggcagcgtgcaaacgcaaagagcaagaaccaaacaaagacaggaacaattcccagaagaagtcccgcctggtgttcactgacctccaacgccgaacactcttcgccatcttcaaggagaacaaacgcccgtcaaaggagatgcagatcaccatttcccagcagctgggcctggagctcacaaccgtcagcaacttcttcatgaacgcccggcgccgcagcctggagaagtggcaagacgatctgagcacagggggctcctcgtccacctccagcacgtgtaccaaagcatgatggaaggactctcacttgggcacaagtcacctccaaatgaggacaacagataccaaaagaaaacaaaggaaaaagacaccggattcctagctggggcccttcactggtgatttgaaagcacaattctcttgcaaagaaacttatattctagctgtaatcataggccaggtgttcttcttttgtttttaatggctatggagtccaagtgcaagctgaaaaattaatctcttagaaccagacactgttctctgagcatgctaagcatcccagaaacccaaatggggccttcctggagcgagttaattccagtatggtgtcaaccaagctcgggattgcttaaaatatcatccatcccacttcaggtcctgtcagcttcttgcagtcagagttcctatgagtaacaataggagtttggcctatgtaaggactctgagtttaggcttccaagatacaacaataagagaagaatctagcaacgagaatgacctcatttgctttccacatgcttagcctcattataccatgttatgtccaagttcacagccacaacatcagaatggtaattactgagcacaagttttaaatatggacgttaaaaaaaaaaatccaaggacctgtttttccaacccagacatcttttcattgaatgatttagaaagctttaagttgatccagcttacaattttttttttctttacctcctggaaatctcatatggtcttggatccgtcaaaaaaaccagtcagttcacttgcgctcaaagtatcaagcacaacaaagataaacagaagtgaggaaggttctgggttcactacatctggattttcaagacacctattgtgaagtcattagggaattgatgagaatatggcttcaagcacattttgcagtttgctacaaattctgttgtacataatgcagacgcacactcaggaggccaatttaactgttaacagtgcatggagcgaatgcagcattttaaaagatctaggtttttttaggtcattaatgtgtccttggttgatcagtcatctggtccctcctactgtgtgttatgaccaccacgtaatccattctcgctctttctgatttggggtttttcctcatccatcccattagtagggatgttttctgtgttttctagcaagaaaaaaaaatcaatcaatcaaacctgcatacatgttactcatgactgtcatctagtcctaaatctcttctgttgttgaatcatccttgcaaaacagctgaatacatctggagaaaacacagcacaccaaagaagcagaatactgcaaaccaaagacatttatgacttgtcattttctagcctaaaaatactgtgattacttttagaaatcagaaaacctctgcaactccgaatggcattcagctcttgcatttggcgcatcatcgggctgagcggaccagctacaccaaggacattagccaagccacccagaggggtggctttgccacaccagttgtcaccttcccatagcaagtggaagagcgcccacagaactctgggagattgcaaaggtcacaatgtgcatatttaccagtgaatggccccgggtggggccacgtgggggtgttcaaagcaagccaaacgctgcaatcattctttacagacacttgagactgacttttttatgaattacttagtcgaaaccaaagaaactttttctgcacctacttctgcaacaaacaaaactgtcccattaaaatgaataaataaatccgtaaatcaatggaaatcaccaccaataagaaggaagcacgccagaaaataaacgaaaacaaaaacagggagacacactgtgttcaaacagacctcttgggacattttttggaagcagattttaaagaaagggttgagacaaagatagaaataaggaagagcctcagtggctgctgcttcatttgacaactcacacggtaatcttaaagctgaagattgtctttaatttgtgcctatgcagtttttcaaaagaacacggaacagagcaacagaaacctcaacagctacaataccaaagatgaggatttctcacaccttttgtttcagttcattatctcctcttgcctggctaaaatactaatagcgccattgaactgtataaaggtaatcaattatgtttctctgagcaacaaaaggaaagggccatttatttgattttattgtttcatttcaattttgtcttatggttttttgccccaacatggaatctctcaaaagtttccatggactccaagtttaagatgttgggatattgaacagttctctctgctcagcagagggtagggaataacattatcacttgaatgttctttgcttaacccttagacttggttccttctatgttcagagtctcatcatcaggggaaggaaagggagtgagggtcagggataggggtcttggtgatgcatcctctcccgagccacagaaccaaagagtttatagaggaatttacagcctcgttttcatgtgattgctacatcctaacagggcttcatttgggggtggggggaaacatgtaaaaataattgccagtttctacttttctattagctttttaaaaatcagctgtaaagttgcatttctaaagaaagatatatataatatataaaatacatatatagatcaacttgacattggtgataaccaaaattattgctgtccaaattcatgtcttgttttggtccagtgcttcatttgctaagtattcggttcagaatttttctcatttctcatgccattccagagttaatttgccactgtggatgatttgaagtattcagatctctatggaagtttctgggacaggtttaaagtcaagatcaagcattttagcatttaacctgttgataaatggatccatggtgtacatgagttttatttgtattcggagtcatctctattctatccctcagcctcgattaaggtggtgagtgaagtgcatccaacagactcggcccagaactgggtcctgacagtggggtgctcatcttctgtaactgttgggaaggctcggtggtccattttcaccagttaaagaatatgaggccagcccagaaatctgttctccaggagctgccctgtcccatctgggtgtgccagaccccctcagtgagcaggtccaccaaagggacttctcacaggggaagcccaactcctgttgcaatgggttgatagatttcctcagggtggtaattaccaattcgtattttgacaagcctatgtgcaaccacagctggcactggggtgggcagtggtgttgggtgggatgggggagagtgtctcaatcctgaagagaaaatataaagcaggttttggggagacttctggagtcctgcccctagagagccccattgttgttctttgtgccccctcctcattccccctatgtgggtctccctatgcaggagctgtgagagaatgtgactctccacaatttttataattcatccttcctaggagattgttcattggctcttcccttgtgtccctttgtcccttgctcatactccatgtttcctttgtcaaaggactaagaaaagagcatatttcagcagaggagtgttcccatgtgggttgatttcaacttgggtatttctaaaagagtccttgtgacatgtgtccagtggaaatggttgctcttttccagactggattgaggaatggagcctgtttgatttggttagtgattctttgacatactaatctcagcgtttgggtctccagcatcctctgaagatgtctagactagtagaggctgcctttgtgacctgacattacaacattggtcaaaccagtcctctgataatcagaagaacatgtcataattgtttaaaaaaaaaaaaaaggcaagaatttctctccaaggagctttaataaatgtctcattccagataatgtcataccagagaaaagtgcttgcttttagaaaattatttacatacatatataaatatatatgtgtatctatacagttatgtatcaaaattttaagccctgcagaatttcaatttgttagaaatctaacagaaaaaaatttctatattgaaaggtaatagaatttaacccagtgagtttactcaaggatttttaaatttaagttaataatttcagagaaaataaccatttgggtgtggttatagtttagtatccattacctcaatccaaggaaaattccaggcattcctcaaccatcaggaaaaggtacagtgtgaaggaacagttctcagccaaatttcacattcttgaggcaacagaaatcaaaacactcagagccattgagtggaaaaacaatttactttattcctttacacaaataggcttgcattgtttttgttttaatgtgattttggtactagggatataattatttcattccaggaaataataaaaaaaaacagacagagccaatacatttctttttttaaaggaaacagcaacaacaataaaaactcagcaccaatatttaaaagcttttccaaaatgtaaaagaagtgtttagcttgcaccatgcataaaggtgcaggctagttgaaccaggaagcatggcacttcctctggagaaatccagaaagagttgcttctaagctcccttttccccctgcaggctcttggcaattgtaggctttagcaaatccagaataattttcaattcaagctaaaataaaatcaacatttggaatgtaaatctgatacacacacacttttctaagtcaaacaacatatttcaaaaccaaaaataaataccttttagataatcagttattttctttgtctatactgggcacccacctactagtgccagtaaattcaagttgaacagatttttaaaatcactattatctgggtatgggggaaacttccccacttttgaaaatgttggtagaattataggaatgtctgtttgattatcattaccaaagtgtcatgacagtatgcctttgtagtgaactcggattttcaggagtttgaatagttggatattttaaaatctaagaagaaaaggcctgtttccaatgttgttgaagaataatgaactctattaaaaagtggagaaaaagataatacatgtggtcaaggttgaccacaaggcccaggcacaactaccttggcgataatcttctagattcgtaacaggttagagctgactttttgtttttgttgttgctgatgctgtgtgattcagacttctcagcctaaccaggaagagtaagtggaaatggtagatgaagaaggggtagagctggtgtatctataactttctgatatttgtctgccaaacttgatatattagtaatttttttatctttagctaagatcaagtcacccctgaaacaacaggagattctagttttaaaataaggccacaaaaatccttacggaatgaagaatggcaccccagttggttgtataagtctcataagataatgatgttgattttaaatatggatgtctcaatgcctgttttctatcaatgatttgtttgtttccaaggtcggggagggaaagaggggagggtttatctgttttagaaagtctcagaatacttataaaatacagaagtagttattaaaatatataggacctcacataggtagatacagaacttaccattgaggctgatgggctgttgtgtgaatcacacaggaccttaaatgaggctcattattctcacacaccaaaatgactctgacagcctgaagcagttattgctagagcccaagctttccttggaggttttggagttaggttgattggaagtaaccagctaataccttttctagtggagaaaaagacattgctaccagcttgttcatcccatagaagtcttccactctgctccatttttagcagcaagcatttcatgtagcataaaccttggcagataagtgtgcctaaggtttatacagtctgtccgcttggatgtatacaaatttagatacatattttaacatgtgttctcatagatgactttataacaacacacattacctataggtgtctagactgtgtacatacaagtgtgtacagacaagcttcatacgtatatactgtaatccgttacaacaaataaattttaaatcatcgtttaacatgtatgtggtacttctacagtgtacattgttttcattatttattgtaacattgaaaaccacagtgcagggaaaacaaaagtatcccagcatcttcatcctgtacacttggaattaatttcatttgggcatatccaagataaactcaactttcaagaaatcttgtatattatttaatcatctgtgttaggatgacacctatgattgatgacttcggttgaatagctttattctggatttttcataactaaagctaaatccaaagacctgaaaaaggacaaaaagaaaaaaaaaaaaagaaaaaacaaagaaaaagaagaaaaaataataaagtcaagcgcaaactgatggggagacagtgggctctggtttccaggattgagacaatggtactgcggtcttggggagactgcgttagctagtggggagtggtgatttttttcatgcttgtcacatctaaatggtctttaacatgagaaagttttagaggttataatttcctgctttgtttttatttagactatcaaatgaagttatacatgttgtcagtcaaaaaatgaagacaccctctgccccaccccacagaatgctttttatcttgtctctttgggttatgacccaacaagctaagtaccattaatgtaattaacttatttaaattagttcctagtacataaatgtataggatttgggtaattatttaatcatccttccttagtttgattctactccttgtacttatttatcaaaacctagaccaatggtgcatcagagatgcaaaattctacttggaatactcttgaagtttagtttgctttataaagcagtgaaattctgttacagacagggaagaaatacaggttacaaaaagagaatttgggatattcttccctcttaaattaacttttaaaatagtctaagtaacaatttttaaattatttaacttaagttcgcagccccacctggtaccaggcgaacttcacctcttaattattgtggccctcggagccttcatattgtaacttatttatttaacttattcagcatctgtgaaaggtgcactgtatagtttatatttttaatttaaaacaacagagagcactgcagtttgtttgctgtcagaacaacagagcaaattttgtggacaagcaatgactattcagcctgaacctgtgcattcagaaaacataagctgagaccctgcttcaccagcctggatttcggggcttctatacagaaactggaaaaataaattttaaaaaaatcgtaaacaaaaagagagaaacccttacactagctgcttccaagaatgaactctgtgtgtatgtaaagcaacaaaacaaaaaaggaaaaaaacaaaaagcagaaaaaagaaaaaaaaaatgaaaaactttctatttctagtgagaaccaaagaaggctacctcactgactttttccatttgtaattttaatcgtgttgatgacaccaaagataccaaagatttctttctctgtgcggtctgcattttgcttgtgctcttttataatttgaacgattttctctgacatatggtatgtacagccacagctcagataccccaaagaaataattatctatgcgacggcggctgctaatttggaaagggatattttctgtgtttctcttatatgtttgctgtctgctcgacatgttcaagatgcgagttcagatgctgctgtaattggattccttaaattctgattacaaattgaggaaggaaactggttggaaatggccttcagtcctagccatggcctctatccccgctgggacctgtcacagtaaagactgccaattactgaaccacagaagctctgaccattgagtagttgagctggaagagaccttaggaatcatttagtccaagccccggtggcccagaggaatgaaatagttatccaaatcaaataactcttgagagtgaaagcccacacatgcctcctggttcctgccccagtgctccgcttattgtacagtgctacctctgcatgagagcggtcccacattgacaaataggatggtggcaatcctttagcaatgagcagggactggggtttatctcttaacattttcagctgtaaaattagtcacaagcattttcagtgtcccattagtacatagtcacatatggtcggttgcttcgtgaaggtggcctgtcttgaaatactagggctcatacgggatttttgccctaggaaaaacatgttgatcccaatgatgtgatcacttttgaacctttccattacaaagcattgtatagataactttttaattcagtaggaggagaaagttcattcttggcctgttggctttgattattatgggtactttaaagtcagtatttatcaagaaagggaacttgaccaccattggcacatgtgacatttaagctcttcagccttttcctttttagttgtaggtgtttacatttcatttctaagccaactctgtatttatgagagaagtttaagccttacatcatttgatactaaagggttatttgtggtaaatgaaaaatgaccccaaaattacagaggaatatgccagtttaagaaatggctacttaaagttgcttctctctttccttcttactcatgaaattaattggtcttcttcaagtttctttagattccattaaatgattaaatcactattaagagccattcatcaacgtgatttgtgtgttagccaatgaatctgtctcagcttttgaccaaatgggttttagacaaatgcaaagatctgcctctagtccatatggctctttttgagtgctagtattttgcatttcacataatgtagttattttgagcttttaaagagagcatttagacaaagaagcaaagagaggaagggaccaatcaactcatcagttccatgcatcaacaaagcatagctagtagaggaatataaatgacagattgacaaactgtaggaaacactgttactctctttctgaagttttcaagcaccatcctatgtgaaagttccctcctgtccaaacaagctcaaggcccatcttctccctatacaaggcaaacctgtaaggccttccttccaaagagtacattgctttggttttcttcctaaattcctattggaattagaactctcagaatccctgggagacagagcaaagatgacttaattcattgagcagcagagctccctataagtgaacatcaccttccccatctttcctactgccacacccatacgagagaggatctagaaagagcgatggcagcctgaacacagaaaacatccccacttggcagacctctcctcagcaatccccccagcctcatgcttcacttgcaaagtgtgacataaccacgggacgagtgccttgcttgaaccaaagcaacgatttagccagtctggacctctctgtgctttttttaattcttcctgtgaatacctcagcttcaactgggcctccatacagtcagttggtgggcttattgtactgtggtgctttgcaatgcaaccctgcaaagaacaagatttgtactaataccaaaggttctttctctatgtctcctcctctgcctccctcgttcttcccttttttctagttcttcacggttccaaagctttactatgaacctgggcatgttggcaatgcagaccgcgcaattccttaccgaattttctcagatatacctcatagacaatagtgtttagagtaatgttattatagcgtatgtaataaattattcactgtttcttttggtaactgtgatttaaaaaaagaaaaaagaaaaaaaagctttatacgttttaggttgtgcttttgtaatagatgaaaaaaggtgcgcttaaaaagaaaatgtatgtttttttccccctttggattttatttatgctggattggggaaagttgcagaatgagcccaaagtttacagtttcatattttgctgaagaaacaatctgtgttcatttgctctgttgaaaagaataattattttctacatttgtgccacttggtctgaacaattaattgttccgtgttaacagtgtagtattatgattagcaactgccaatcagtgctataattttatgcatgaggctaaaaatttagcagtgtgatgcattgtggtcttaatagcaacatttttcattttgaactagatcttcccctttggttcaatggactttatttatgcatgggcgcctattgtttgttagcagttgtggaacagttgtgtatacattaaactgtgaaaatgtacacagttcagcctcagacggtggtaatattggttttattgggagatgtgtcacctcgaaaataccctttacatctgttgggatctgaaaatgagtcacattgaattgggttccagctttataatgagaaacgttattcctaatttttgagttagccaatttgcattccacaaattgggatcctcataacccaaatatatcaccgtatgtgagagggatttgaaagcgagtattgaaaaactcacctttgcatatttaatttccaccaaaaggagttattttggctttatgctcatgaacttagacctaactggccatgtatatgtagatgcaaattcatctagctgtggccctctttgatctctgcttgggaatggctatttttgactatgcgtggtttcttctcgtattttgtgatcaggtcagctcccagtagaaactcaaatggcatcaatattactaactcttctctgcccacttctcttttgtccactctcctagacattcccaccaactgttccagtgatttgggcaaaaatacgcagccatttcccaaaacttcacatgtgcagctatcatggctgtccctccctagacttggaggtgactctcacttaatttttacctgcccaacaatgttccatctaccatctaaaaggtaatataagaagaagttttgaaacccactttaggaaaaccatcttctttaaatccttcaattatctgaggcctctatatgtcaaaactatttttcagttgcaggggattgggcaaacttgttctttcttatacttgggttcaaagacccattctccagtttcatatttcccaaaccaaaatgcttgacataaagccaaatcaactgccaagcacactttattttgcataggagtatgcagcctagggaaccttggttgaaaagcagcagtctgctatgcaaaatattggaaatcactgacagtgtagcattcatattatctgtcaatgagggtatattgggaacgtgctctcgtgaataataaaaagcaacatatttttatttggccttataaattaggttgtggtaatgtaaactttgatatatagtctttttatttttctcttattaatctgccaaagatgggaacagatacaagaatttttcaaattggcttttgtaagacaattgatgattgtaatagtgtttaatcttccagaaagctttatatgttgttccacaataaaattgatatttgtttcagcaaagttttcctgacactcacaaacccacaaactgttcctcttaatgcagatattgtagaatctacaaagttcaaatccatttttgatccaaagaaagtagaggagtatttgagacatgagtgtacccagccctttttttaatcacaggcaatgcatgggtctggctggttacactttgccaagaagacttgtcttatgaaacccaaggtatattttgttatgccattttatgtccttttcttttaacattgtggaaagtggtatgttgaatcaagtgtaagctgagttttccagacaactgaagtagctacatcatgaatgttattttgttattaaagggtttttactcagtgctttgtgccaatggatgtccttttccttggagacacataactacaaaattacctcagcttggcctggttttctctcctgccctcttggggaaacatgggcctggcctgggaaaaggcaggtcatgggctggaaggtaggttttggtactaggaagaaatctctgtatctgtcagctttaaagagaactgggccaaaaatctctaacctcactctctctggactccaacacttccctgcaatcctttggtcttgagcatgtgccagcatgaaggcagactccagttcatacatgaaaggcaagaaaaagaaaatagtaaccttgaatcttctgtgggccaccaggcactcacctttccccaccttgcacactatccagtcaaggctattgcagcccatctggtggctttacatgggacattaccaaaggcttcttcctccatcctggggttgcaaaggatccaggtcccctccatccagtggggctcttccacatcagaagtccccctcccaccatcctctgcatcctgtttagctatcccatctataccttttggagatgattatttagaaaacaaagaaaggtatggaatggggtttcctattgtttgctaggttatattttagcaattctcaattctttgatctggaaaaatacaagagggaaaaggagaccccactatctccctgtgctttgctcccatctcagggggcaggggcagtgcacattgcctatgctgttgatctgtcttgggcgacaggctgaatcacagctattgccccagccaaaaacatggcccatcaatgcctactttatctctgcttgaaaatcctattcaaaaagttgtagagtttgaggtttttatccccccatatcctttgctttggtccagtttggcctttagcataagagtcagctttatctctaggaaagttttttcagattatgacaaggaacctgccacctgggaagaaaagagtccgaagactagcaatcggataggtagtcataccattaacagatacttccttgaaggtagaatattatttcctttctttacagttttgtgttacacaagtccaagtggtgccagcaaacttcttaccgtgaaatgttgtaaaacacctggcatactgaaatttctgaaacaaaaacacaagctccacattgataacttgataaataaccactaaagtttagatgcagggactgagatgatacaggcaaaatcttggtgttggtttctcttttaattcgtatcttcgatcacctaacctttctcaatccaagagcagttcagtcttttctccccaagtctaggatgccaaagagcatcataggaaaagataattagggattgaccagcatttcaattagttctcttcttcatctttgcatttctcaaaagtgttctcctggaccagagggaaagagctggtccattttttttcattctttctattcaaatttttccacccagacaatactttattaacacagatactgtagatccttccttggtcagtgaattattacaagaggagctatccttccaccaaagtgagtgaaaacaagttccagtatcttttcttccatccagttttgttctcagaatccaagtcagtcctgggtcttttctcactttagaccctggcctcagatgtgtttattcttgctatttaaaaatacctttaaatttcacatgctggcctgcagaacttgcatcctttgttctatactgttgactgcttgatggtattgaaaggtgactataatgagggaagaaaggaggaggtaaagagagaagaatttgtcccagatctgtttaaagtttcaaaatttaaaaagggacccattaaattatgggaaaatggctatagagtgtgagcctccgttgaccatatgctcaaagaccgtactctgccacctgccttccaggtagctattctagaaactcagtcctttgtggaaacccaactaccttttaaaagtctctttccagattccaaaaggacaagagatcagagagtcacatatacgcctcttgttttattttcttgctttcacgggtattattgccaagaaaatcgtagggaaaaactttaaacttttcttttcagttgatccctttgacatcacctctcatgtttaaaatcaggaaaacacacccctaaaatttgcactctcttccgttttgaaaaagaaaacccacacacaaatgcacactattaccgtctttcaccctgcgctatatttccaaagtgtattataatccagatattgccccatctcaaacatgttaagtcagactgtgctgaaagactttccagggacggtcaacagggtatatgttcagtggctgccctgaaatcctggtggggatgaggatcacgcttcatcatcaaggggatgcccatcccctgataagctcccagtccttttggaagatttctttgaatgttaattgcattttcagttttgctcatttcccaccccaatgttttgtctgcaacatcgcttacactggattctttctatttttattcctatcattaaatggtagtgctgtaaattctgcaattaatgttaaataaactgctttaattcattgaaaaaaaaaaaaaaaaaaaaa

SEQ ID NO: 600 - DNA, 6487 bp, Homo sapiens
gcagagggcgccttgctccgggtgcgaccgcggctccctggaggcctgggcggcgggccccgcgagcgcgccgccacctcgggagcagtgttggccaaggaccccgacgccctacgttgatctttaaataaagcaaaaatttatccaaagaagggctttcatcaagaaattaaagagagaaattacaagccatagagaaactgggcatttctatactagagaaaccacctaaaacaactgtatggagtaagatgaaaggtatgaatatgcctggaagaaattttacctagtgtgacatttttgctcatctttttgtcacaaaaggctgctaaggaagagagaatacagttttctagagaataagagtgcagtgtaaaaatggaaaccacaatttcagaaattcatgtagaaaacaaggatgagaagagatcagcagaaggtagtcctggggctgaaaggcagaaggaaaaggcatccatgctttgcttcaagagaagaaagaaagcagccaaagcactgaagcccaaagctggctctgaagctgctgatgtggcaaggaagtgtccacaagaagcaggagcttctgatcagccagagcccacacggggggcctgggcctcactcaaacgtcttgtaacacgcaggaaaaggtcagagtcttcaaagcagcaaaagccattggagggtgaaatgcaacctgcaataaatgctgaggatgctgatctttctaagaaaaaggcaaaatctagacttaagattccctgcataaaattcccaagagggccaaaaaggagtaatcattccaaaattatagaagactcagactgcagcatcaaagtccaggaagaagctgaaattttggatatacaaacacagaccccattgaatgatcaggcaacaaaggctaagtcaacccaggatctaagtgaaggcatctcacggaaagatggtgatgaggtctgtgaatcaaatgtgagcaatagcacaacttctggagagaaagtgatttcagtagaacttggattagataatgggcattctgctattcaaacgggaactctaatccttgaagaaattgaaacgatcaaggaaaaacaagatgttcaaccccagcaagcaagcccacttgaaacttcagaaacagaccatcagcagccagtactttctgatgttcctcctttacctgcaattccagatcaacaaattgtggaagaagccagtaacagtaccctagaaagtgcaccaaatggaaaagactatgaaagtacagagattgtagctgaagaaactaagccaaaagatactgaattgagccaagaatcagattttaaagaaaatgggatcactgaagagaaatccaaatcagaagaaagcaaaagaatggagccaattgctattattattacagacactgaaatcagtgaatttgatgttacaaaatctaaaaatgtccctaagcaattcttaatttcagctgaaaatgagcaagtaggggtttttgctaatgataatggttttgaggatagaacttcagaacaatatgaaacactcttaattgaaacagcctcttctctagtcaagaatgctattcagttgtcaatagaacagctggttaatgaaatggcctctgatgataataaaataaacaatcttctacagtgacttactctccagagtcacggcagaaaaaacaagcttaatgaagaattcttttatacatttgtggcatttcttactcagtaacaaatgagagatttatcatctctagaacttaaaaggtacaattccagcgcagaagtgctaaagattaagtcaagtttataaaactctaccactgaaatgcagtcacttctggattggaggaagtcagcacagattgcagtgtaaaatgacataacatacagggagttgctaaaatggcatatggagattggagtgctttgggggaggaaggtgtatttattgagcacttatggtatgccataagctttttaatgacctctgatataacaaagtctggtttccttttgataattcagctctgtgtataggctaacatcacattaagtttttaaaaacttattttttacagtgcacatatatgtttaaaatggtgaataaggtgagctacttttgtgaatgtgatttgtaattgttacattcctaagcagcaggcttaactcaaaaaatacattgcattttcccaatttcagcagatagtgtgcagaatatgcatattgatattaaacgtgagtggtttcctagtcttaagtctcttataagcgctatttggccaggggcagtggctcacgcctataatcccagcactttgggaggccaaggcgggtggatcagctaaggtcaggagttcgagaccagcctggccaatgtggtgaaaccccatctctactgaaaatacaaaaattagctgggcgtggtggtgcacgcctgtaatcccagctacttgggaggctgaggcaggagaattgcttgaacccgagaggtggaggttgcagggagccaagattgcaccactgcactccagtctgggcaacagagcgagactccttctcaaaaaaaaaaaaaaaaaaaaagagaaccattcacaaatccttcaatcaggcaaattgttactaagtgcaaaagtgtagaaacagggagagtgggtttttcccccgcttttctttctgcctcaacagatctgtatatatccatttctgcatggatttatctgtgaaaagttaaaaaatgaaacagcaaaaacaaaacaaggggaatattattcttcatccaggagaagggaaaattcccaagtaaattatcacagataatataggattcatcttgcagaattacttctttaagagccatattcatcaacttctctccaaagaggggagagtagattcaaagccagcctggtagtaatggtcctggaaaatcctaataatctagtgcaaatatttattctcggccaaaaatgagccatgaatgtgggtgaatagaaaagtgaaaagttattgctaaagcacattataatttaaatgtcagtattccttcatgtctgtgtgttgagaccagtaaaaagcattttacatgaatattgaaagttaactttttcatcactattttcttttcttttttttttttttttgagatggagtctcactctgtcgcccaggctggagtgcagtggcgcgatcttggctcactgcaagctccacctcctgggttcacaccattcttctgcctcagcctcccaagtagctgggactacaggcgcccactacaacgctcggctaattttttgtatttttagtagagatggggtttcaccgtgttagccaggatggtcttgatctcctgacctcatgatcctcccgcctcggcctcctaaagtgctgggattacaggcatgagccaccgcacccggccttcatcactattttcaatccagatatactttacaaaaatgagaagggcttatttgcatttttatttacatattgaaagggaagcatctgatctcatcaatgattgccatattttttgaaaaagtaatcctatttcaatctttccttgtgtgaaatggccataataccagagtgcacttccctacctcacaggttaggattcaaagtgtgtattcccccattgtgtaaattgagtgattgtgttactacttgaaacagatgaagtaataaagatgaagtatgagatgtaaggtatttgttcaagagctccacttggaggaaataatgcacattagatgattttaaatgatctgggtgaattcttgcattgtgtatggattgcatatagaaagtatttgctactttgtcctacagaatcatcttcatttctttctgtaaatacatattgagacctctaacaaaagaaactaatctgacttggaaattgaaccaaatcatggatattattagcaagattctttgctgaagtgcaaaaatatttcccccagattttcctaccttcatgcttataatccggggaggagggtggaaatcctgagcaagatgaaaagtgtcattcaaaacacatgacccaagaagtcaatttcttttaattgtacaacttttaaacattaaaaacaaaaaagacgagtcatcttctctgaaaacactctttaactcactatatgtggtgctaatggacttggacagctaccagctatcatatttaaaagtgaaccattttaaaaacctgactaaggttggtgcattttacagtgtattgaagaatcctgccctcatttactgcaaggatgcctccaagccaatacacttgcattgtaaatgtttagtaatctcatgaacaagcaaaaagtatagtacttagcagttattggaaatattttgggggatttttaaaaaaacagataaatggtaaatatgtgcaatgaattttttggttaagaaagtaaaattttatctaatactaggtttttacttttttcactgtggtttgatatatatttttggttagaatgtactgattgtttttatgataagatgtatattttacttgcattcattcttaagaggtttctgtttttctattgagaatatctgttgaattaagtaggatttcagttagaaaaaggaattccgaaattaactggtctcaatctgattatatgtgctacatggccaaatcctattacagtgaattctaaggtgattcaaattgttttattgttatagaaatatgcagaaatcagatggcttcagagtcataaaatatttttcttgtaatagtatttaagcaatttgaccttatatgcaaacgttaagtgaatataaataagttctgtttcaattcatgtccatttaacaacattaaaataattattaggaacaccacatgaattttctttacatttgctgtggtataaattctgcttttaatgaatgtttatttatttattagccaaaattcagtttctctttgaacccagaattttgcaaagctgggggttggggagggggattattagctacttgttaactttttcagcatattatcattcctcttttaagactcaagtattattcactttgcttcttacaacccagagaatgtgaaaattctcctctattttatgtagcactattcacttaacattttttcaaagcactttataggatataaaaatagtacccggtaacatttaagtaaaggtagcagaaaacaaaagaactttcaaacagaaattatgttccctgccacctcctccacctcaaagaataataagcatgtggcataaatggagttgttcagaaaagctgtctgcataattttccttcaaggtaatgtatttgacagcatgaagtttgtgatgatcttacttggtctactactcagcggagtcttagaatctcttttatttacttctgagagattgttatttcaccagtatatgtgaacaggcttgctaaaggcattaaagatatggatcatggaggcaccaaatttggcttctgtatgcaatccagcattaacttcatccatacatttctaacttcatccataaatttctaacttcaagttaccttattttttatagttaagaatgtttttcgaggtttacaacagaatttaaaaaataattgttaggctttagaatcccactgtttgaaaagatccttttaatgtcaactttattgaaatatgtagtctactttctaatttcatctgataatatagcaggatttgatttttctgcctgccatttgtgcatttaaaaaaaaatcctcatttaagatttagagttctttaggttcaaattcctatgatgttttattgggtaacatgaactctcttatacataattcaaaatttcaatccatggtatattttatggtacattttgaaaagaaaatttgtaatgctccttagttacaaaaattagaaggaagctacataaaattcaggtgtcctaattaaattcaatttgattcaacacacgtattaggcataactcatacctaacactatttgataagggagacaggctccctgccatccaagaactcaacctagggagcagtgacaacagaaaccgggttgggttaaggcaaagagccatggataatgctgcaacatgagtggcacagaggggagtacacagagagagcaattaatttggtgtggggaaggtggtgatctgaatacagcagcagtttgaaagtgttccgtttttaaataaacagtatgcttattttgatttgtgactaggtgtagaaaaaagcctgcatagtgttacatatttatagtagttctttgtaaaaatgttaagtggatgagctattatgaaagtaaaagtttcattttttctcattaaaattagtactaaattactatggatcagatgataatattaaatagtactctgtagaaaaaaggtttcaagttgaattaatttatgtactgattattaatacagaataaatgttatattgactca

SEQ ID NO: 601 - DNA, 4491 bp, Homo sapiens
agcggtgcgagtgtggagcgcgcaccccgggcgaggctgacagatcgcccgggtgggtgcaagatggcgcaagcggcgctccccctgcgccccccgcgctgctgagcaggcatgcggccccagtcccccaccgcctgggctcggccccggccggagccccagccccggccccggcgccggccccgcgggacgctgtgagccgcgagaggcccgggagccgcgcgtcgccgagccgagctgaccgagagccccatggctgtgcagcgcgccgcgtctccgcgccgcccgcccgccccgctctggccccggctcctgctgccgctgctgttgctgctgctgcccgcgccgagcgagggtcttggccactctgctgaactggcatttgctgtggagccaagtgatgatgttgccgtccccgggcagcctatagtgctggactgcagggtggaggggacccctccagtgcgaatcacctggaggaagaatggggtagagctgccagagagtacccactccaccttgctggccaatgggtccttgatgatccgtcacttcaggctggagccgggaggcagcccttcggatgaaggtgactatgagtgtgtggcccagaaccgctttgggctggtggtcagccggaaggctcgcatccaagctgcaaccatgtcggacttccacgtgcatccccaggccaccgtgggtgaggagggtggtgtggcccgcttccagtgccaaatccatgggcttcccaaacccctgatcacttgggagaagaacagagtcccaattgacacggacaatgagaggtacacattgctgcccaagggggtcctgcagatcacaggacttcgagctgaggacggtggcatcttccactgtgtggcctcaaacatcgccagtatccggatcagccacggggccaggctcactgtgtcaggctcgggctctggggcctacaaggagccagccatcctcgtggggcctgagaacctcaccctgacagtgcaccagaccgcggtgcttgagtgtgtcgccacgggcaacccgcgccccattgtgtcctggagccgcctggatggtcgccctatcggggtggagggcatccaggtgctgggcacaggaaacctcatcatctcagacgtgacggtccagcactctggcgtctacgtctgtgcagccaacagacctggcacccgggtgaggagaacggcacagggccggctggtggtgcaagccccagctgagtttgtgcagcatccccagtccatctccaggccagctgggaccacagccatgttcacctgccaagcccagggtgagccaccgcctcatgtcacgtggctgaaaaatggacaggtgctggggccaggaggccacgtcaggctcaagaataacaacagcacactgaccatttctggaatcggtcctgaggatgaagccatttatcagtgtgtggccgagaacagtgcgggctcatcacaggccagtgccaggctgaccgtactgtgggctgaggggctccccgggcctccccgcaatgtgcgggcagtctctgtgtcttccactgaggtgcgtgtgtcctggagtgagccgctggccaacaccaaggagatcatcggctacgtcctgcacatcaggaaggctgctgacccaccggagctggagtatcaggaggcagtcagcaagagcacctttcagcacctggtcagcgacctggagccctccacagcctacagtttctacatcaaggcctacacaccaaggggggccagctcagcctctgtgcccaccctagctagcaccctgggtgaagcccctgccccacccccactgtcagtgcgagtcctgggcagctcctccttgcagctgctgtgggagccttggccccggctggcccagcacgagggcggcttcaagctgttttaccgcccagcaagcaagacctccttcaccggccccatcctgctgcctggaaccgtctcctcctacaacctcagccagctcgaccccactgcagtgtatgaggtgaagctgctcgcctacaaccagcatggagatggcaatgccacagtccgctttgtgtctttgaggggagcatctgagaggacagccttgagcccaccatgtgactgccggaaggaggaggccgccaaccagacgtccaccacaggcatcgtcatcggcatccacatcggggtcacttgcatcatcttctgtgtcctcttcctcctgttcggccaaaggggcagggtcctcctgtgtaaagatgtggaaaaccagctgtcccctccacagggtccccggagccagagggaccctggcattctagccctaaatggggcgagacggggacagcggggccagctgggccgagacgagaaacgtgtggatatgaaggagctggagcagctgttccccccggccagcgcagcagggcagccggaccccagacccacacaggatcctgcagcccccgctccgtgtgaggagacccagctctccgtgctgccacttcaggggtgcggcctgatggaggggaagacgacggaggcgaagaccacagaggccacggctccctgcgccggcctggcggctgccccaccacccccagatggaggccctggcctcctcagtgaaggccaggcttccaggcctgcagcggcccgggttacccagccagctcactcggaacagtagccagtgtctggcaggctccagagggtggacggagcggggcccattctcaggtcaaaagcaagatttctactgtcatgtgggatttggatggtcctgggggctccccagcatttctatcctgactgcctcttgggttgtcaaaacccaaggcagccttgacagggaccccccggccctaacacccatcaggagttggagcagttcctgcaggagcctgttccttccctgggctgacgcccccttgcctctgcctggtacccacatgacttggaactgaactaacatttttctttaaaaagcaaaacttaaaaaaaaaaaaaaagaggagagagatagaggaaggtgaattagactccaaaagatgaccctgctgtagctgggccctgacactgtcaccctccaccgactttgttttctcaggatggatttttgctgttttggctctcagcacctacctcagccggaatgaatgtcctggggggcagtggggcggtggcctcagcccccttaccccacagagcccgaatgcactcctacctcaagtccccttgctggggaccccctctcccttcccacactgttgtccagagtaaaaaaaaaaaaaaaaaaaaaagcacttccccgtttccaggtgtgaaagaaaaaaaaaagcacttccccatttccagatgtgaaagaaaatgtctacctcaaggctcgctggctctgtgggctgtgttgtcactggacctgcctccccgcccctcctgcccacagcccacctacctctcctgcagaggagaggccagaggttgggccaccaaggggaactcttgtggcctacagaaatagaaatggattgggcagagaaaaaatgtgaaagcagccaaaaatgagaggaaatttgttccttgaagtataaattgtccaaacgagccacctcccagcacaccgcctgtccccgtcttgtctgtccactcccattttgagccagcccatccttgatggggatgcccatgaggaacctgggcttgggagggtggcatcagctggccgcctgcctcctgtcctgcaggcccggcccctggaatgtaccatgtgtgggatgggtgtgtgggagggtgagggggtgtgggtgtcccctgcagaggcgccccagcctcaggcacccagccagcctgatccacccctcgacaggggagcatccactgtcagcagccatggccggaagctatttttatacaaggtgtgttaagggttatgttcttgtgactttttgttactcttttctgttgtgttgttctttgaactacttagttaaagaagaagaaaagaaaaccaaggaaacaaatacctatttttggttatactcagaaacatttttttaaatagcagaagaaaaactttttttaaagaaaaaagataagtgtattccttaagaatgagaccataaatatccctgacccccaatcctctagggacacctccaccctgaactttagttaattagctgaagaagatagaatttgtggtgttttcctagaaaactagagctgtgtccgcgtggacttggggaagggtagtcccttcccttctcccaaatgatgtgtggatgcccagggctccacaaagctccaaggcagtgccccctctgttcccaaagcagcttctctcgggagcctccctctcccttgggaagggtgcggctggggcaggagggggctggggggccacctggccttacttgggttttgtcacactctgctcattttgactgaataaaagtcctgttgccaaagtgaaaaaaaaaaaaaa

SEQ ID NO: 602 - DNA, 4563 bp, Homo sapiens
gaaccggaagtggagcctgggagccttgacgttaggaacgaagtctaacctggatctggagccgggagataatctgaatgctggctggggcagaaaattactaagatcctgtggaagtgtgaggattattaaactgatcactgtctgataaggtgagatcaaattgggaatgctttcataatgaacgtcaaccagtcagttccacctgtgccaccatttgggcagccccagcccatctacccagggtatcatcagtccagctatggtgggcaatcagggtccacagcccccgccattccctatggagcctacaatggcccagtaccaggctatcagcaaacacctccccaaggtatgtcaagagccccaccttcctcgggggcacctccagcctcaacagcacaggctccttgtggccaggctgcatatggccagtttggccaaggagatgtacagaatgggccaagctccactgttcagatgcaaaggctgcctgggtctcagccatttgggtccccattggcccctgtgggcaaccagccacctgtgcttcagccctatggccctcccccgacaagtgcacaggtggctacgcagctgtctggaatgcagatcagcggtgctgtggccccagcccctccttcttcagggctgggctttggcccaccaacatcgctggcttcagcctcaggaagtttccctaactctggtctgtatggctcctatcctcagggccaggctcctccccttagccaggcccaaggtcatcctgggatccagactccccagcgatctgccccatcacaggcctccagcttcacacccccagcttcagggggtcctcggctgccttcgatgactggtccactcctgcctggacagagttttggagggccctcagtgagccagcccaaccatgtgtcttcacctcctcaagctctgccccctggcacccagatgactgggcccctgggaccactgccacctatgcactccccgcagcagccaggctatcagccccaacaaaatggttccttcggaccagcccggggccctcagtctaattatggaggcccctacccagcagcacccacctttggcagtcagcctgggcctcctcagccactgcctcctaagcgcctggaccctgatgccatcccaagccctattcaggtcattgaagatgacaggaacaaccggggtacagagccatttgttactggagtacggggccaggtgccacccttagtcactaccaacttcctggtgaaagaccaagggaatgcaagtccccgatacatccgatgtacatcctataatatcccttgcacatctgacatggctaagcaggctcaggtgcccctggcagcagtcatcaaaccgctggcaaggctgcccccagaggaggcttcaccgtatgttgtggaccatggggaatctggccctttgcgctgcaaccgctgcaaagcatacatgtgtcccttcatgcagttcattgaaggagggaggcgtttccagtgctgtttttgcagctgtatcaatgatgttcccccccagtattttcagcacctggatcataccggcaaacgtgtggatgcttatgaccgccctgagctatccctgggctcttatgaattcttggccactgtagattactgcaagaacaataagttccccagccctcctgcctttatcttcatgattgacgtctcctacaatgccatcaggactggtcttgttaggctcctctgtgaggagctcaagtcactgttagactttctacctagggagggtggggcagaagagtcagcaatccgcgttggctttgtcacctacaataaggtgctccacttctataatgtgaagagctcattggcccagccacagatgatggttgtgtctgatgtggctgacatgtttgtgccactgctggatggcttcctggtcaacgtcaatgagtctcgggcagttatcaccagcttattggatcagattccagaaatgtttgcagacacaagggaaacagagacagtatttgtaccagttatccaggctggaatggaggctctgaaggctgctgagtgtgcagggaagctctttctattccatacatccctgcccattgcagaggccccagggaaactgaagaacagagatgacaggaagctgatcaatacagacaaggagaagactctgttccagcctcagacaggtgcctatcagaccctggccaaagagtgtgtggcccaaggctgctgtgtagatctctttctcttccctaaccagtatgtggatgtggccacactctctgttgtgccccagctcactggtggctctgtctacaaatatgcttcctttcaggtggagaacgaccaggagcggttcctgagtgacctgcgtcgtgatgtccagaaggttgttggctttgatgctgtgatgcgggtccggacaagcactggtatccgtgctgtagatttctttggagctttctacatgagcaacacgacagatgtggagctggctgggctagatggggacaaaacagtgactgtggagttcaagcatgacgatcggctcaatgaagagagcggagctctcctgcagtgtgccctgctttacaccagctgtgcagggcagcgtcggctccgcatccataatctggccctgaactgctgcacccagctggctgatctatatcgaaactgtgagactgacacgctcatcaactacatggccaagtttgcatatcggggagtcctgaatagccctgtgaaggctgttcgtgacacgctcatcacccagtgtgcccagatcctggcctgttacagaaagaactgtgctagcccctcctctgcaggacagttgatccttcctgagtgcatgaagctactcccagtttacctgaactgtgtgttgaagagtgatgtcctgcagcctggagctgaagtcactactgatgaccgtgcctatgtccgacagctagttacctccatggatgtgactgagaccaatgtcttcttctaccctcggctcttacctttgacaaagtctcccgttgagagtactaccgaaccaccagcagttcgagcctctgaagagcgtctaagcaatggggatatatatttactggagaatgggctcaacctcttcctctgggtgggagcaagcgtccaacagggtgttgtccagagccttttcagcgtctcctccttcagtcagatcaccagtggtttgagtgttctgccagttctggataatccactgtccaagaaggttcgaggcctcattgatagcttacgggcacagagatcccggtacatgaagcttaccgtggtgaaacaggaagacaagatggagatgctgttcaagcacttcctggtggaagacaagagtctgagtgggggagcatcttatgtggactttctctgtcatatgcacaaggagattcggcagctactgagctaaagcaagtgggtaaatggcatagggcccaggctagcttccagaaagcaccccaggatgtcagagaaattgggacagtaacatatcttatgtaagctgacctcagtctctctggggggagggggagatataaggagacaccttctttctgggctcaagtatcctgccactctgtcatgtcctgctgatggaaggtgcccctgttccctcattctaccctctttttcctgctaatcctgtcataatgaatgtagcttctcagttcactgtatatgattcggtattgggggtttggaggcacccagaccctggcaatattatgtgtccctttggaccagtctcccaagaggagaggggcaggcaggaaagagtggggatcctaaggttactacagggggctcagtgtcatccacaacttcctatattagggataaaacatataggtgcacaagagctggggtatagcccataggtggtggagagaaaagtggtcagtccttcttgggcctggaggttagcagtcaagtttctctgctttcactgctcgctcgctctctcctgcaatgattgatgatcactccgtggatagagaggcacactgtcagaggtgaccggagaactgagttgcaaaatatattaagatctggtagaggtaccagcttcctttccagctggagaggccccaacactggatggttctgtagggagcctagggagcctggtcatcaacttgcaatacctcacagagccagttcacatcccactctgagctcccacgagaaacactgcttctccaggcccggggttgttggggagagaggcagaggcagctggagcgccgttctctcctgctgggacaccgcttgggctttggtattgactgagtggctgacagttatcttccaaccccaactggcttgggggcaggacaagggctaggcttgatggtggccaggcttgcctgctccccacctgggatgcccctgctctggacctctcatttctcttcattggtttatttttcaatgcatctttaatttgtaaagaaataaaataaattaagatgtaaccattagcctcatcaaaaaaaaaaaaaaaaaa

SEQ ID NO: 603 - DNA, 5942 bp, Homo sapiens
aaaaggcggcaaggagccgagaggctgcttcggagtgtgaggaggacagccggaccgagccaacgccggggactttgttccctccgcggaggggactcggcaactcgcagcggcagggtctggggccggcgcctgggagggatctgcgccccccactcactccctagctgtgttcccgccgccgccccggctagtctccggcgctggcgcctatggtcggcctccgacagcgctccggagggaccgggggagctcccaggcgcccgggactggagactgatgcatgagggggctacggaggcgcaggagcggtggtgatggtctgggaagcggagctgaagtgccctgggctttggtgaggcgtgacagtttatcatgaccgtgttcaggcaggaaaacgtggatgattactacgacaccggcgaggaacttggcagtggacagtttgcggttgtgaagaaatgccgtgagaaaagcaccggcctccagtatgccgccaaattcatcaagaaaaggaggactaagtccagccggcggggtgtgagccgcgaggacatcgagcgggaggtcagcatcctgaaggagatccagcaccccaatgtcatcaccctgcacgaggtctatgagaacaagacggacgtcatcctgatcttggaactcgttgcaggtggcgagctgtttgacttcttagctgaaaaggaatctttaactgaagaggaagcaactgaatttctcaaacaaattcttaatggtgtttactacctgcactcccttcaaatcgcccactttgatcttaagcctgagaacataatgcttttggatagaaatgtccccaaacctcggatcaagatcattgactttgggttggcccataaaattgactttggaaatgaatttaaaaacatatttgggactccagagtttgtcgctcctgagatagtcaactatgaacctcttggtcttgaggcagatatgtggagtatcggggtaataacctatatcctcctaagtggggcctccccatttcttggagacactaagcaagaaacgttagcaaatgtatccgctgtcaactacgaatttgaggatgaatacttcagtaataccagtgccctagccaaagatttcataagaagacttctggtcaaggatccaaagaagagaatgacaattcaagatagtttgcagcatccctggatcaagcctaaagatacacaacaggcacttagtagaaaagcatcagcagtaaacatggagaaattcaagaagtttgcagcccggaaaaaatggaaacaatccgttcgcttgatatcactgtgccaaagattatccaggtcattcctgtccagaagtaacatgagtgttgccagaagcgatgatactctggatgaggaagactcctttgtgatgaaagccatcatccatgccatcaacgatgacaatgtcccaggcctgcagcaccttctgggctcattatccaactatgatgttaaccaacccaacaagcacgggacacctccattactcattgctgctggctgtgggaatattcaaatactacagttgctcattaaaagaggctcgagaatcgatgtccaggataagggcgggtccaatgccgtctactgggctgctcggcatggccacgtcgataccttgaaatttctcagtgagaacaaatgccctttggatgtgaaagacaagtctggagagatggccctccacgtggcagctcgctatggccatgctgacgtggctcagttactgtgcagcttcggctcaaatcccaatatccaggacaaggaagaagaaacccccctgcactgtgctgcttggcacggctattactctgtggccaaagccctttgtgaagccggctgtaacgtgaacatcaagaaccgagaaggagagacgcccctcctgacagcctctgccaggggctaccacgacatcgtggagtgtctggccgaacatggagccgaccttaatgcttgcgacaaggacggacacattgcccttcatctggctgtaagacggtgtcagatggaggtaatcaagactctcctcagccaagggtgtttcgtcgattatcaagacaggcacggcaatactcccctccatgtggcatgtaaagatggcaacatgcctatcgtggtggccctctgtgaagcaaactgcaatttggacatctccaacaagtatgggcgaacgcctctgcaccttgcggccaacaacggaatcctagacgtggtccggtatctctgtctgatgggagccagcgttgaggcgctgaccacggacggaaagacggcagaagatcttgctagatcggaacagcacgagcacgtagcaggtctccttgcaagacttcgaaaggatacgcaccgaggactcttcatccagcagctccgacccacacagaacctgcagccaagaattaagctcaagctgtttggccactcgggatccgggaaaaccacccttgtagaatctctcaagtgtgggctgctgaggagctttttcagaaggcgtcggcccagactgtcttccaccaactccagcaggttcccaccttcacccctggcttctaagcccacagtctcagtgagcatcaacaacctgtacccaggctgcgagaacgtgagtgtgaggagccgcagcatgatgttcgagccgggtcttaccaaagggatgctggaggtgtttgtggccccgacccaccacccgcactgctcggccgatgaccagtccaccaaggccatcgacatccagaacgcttatttgaatggagttggcgatttcagcgtgtgggagttctctggaaatcctgtgtatttctgctgttatgactattttgctgcaaatgatcccacgtcaatccatgttgttgtctttagtctagaagagccctatgagatccagctgaaccaagtgattttctggctcagtttcctgaagtcccttgtcccagttgaagaacccatagccttcggtggcaagctgaagaacccactccaagttgtcctggtggccacccacgctgacatcatgaatgttcctcgaccggctggaggcgagtttggatatgacaaagacacatcgttgctgaaagagattaggaacaggtttggaaatgatcttcacatttcaaataagctgtttgttctggatgctggggcttctgggtcaaaggacatgaaggtacttcgaaatcatctgcaagaaatacgaagccagattgtttcggtctgtcctcccatgactcacctgtgtgagaaaatcatctccacgctgccttcctggaggaagctcaatggacccaaccagctgatgtcgctgcagcagtttgtgtacgacgtgcaggaccagctgaaccccctggccagcgaggaggacctcaggcgcattgctcagcagctccacagcacaggcgagatcaacatcatgcaaagtgaaacagttcaggacgtgctgctcctggacccccgctggctctgcacaaacgtcctggggaagttgctgtccgtggagaccccacgggcgctgcaccactaccggggccgctacaccgtggaggacatccagcgcctggtgcccgacagcgacgtggaggagctgctgcagatcctcgatgccatggacatctgcgcccgggacctgagcagcgggaccatggtggacgtcccagccctgatcaagacagacaacctgcaccgctcctgggctgatgaggaggacgaggtgatggtgtatggtggcgtgcgcatcgtgcccgtggaacacctcacccccttcccatgtggcatctttcacaaggtccaggtgaacctgtgccggtggatccaccagcaaagcacagagggcgacgcggacatccgcctgtgggtgaatggctgcaagctggccaaccgtggggccgagctgctggtgctgctggtcaaccacggccagggcattgaggtccaggtccgcggcctggagacggagaagatcaagtgctgcctgctgctggactcggtgtgcagcaccattgagaacgtcatggccaccacgctgccagggctcctgaccgtgaagcattacctgagcccccagcagctgcgggagcaccatgagcccgtcatgatctaccagccacgggacttcttccgggcacagactctgaaggaaacctcactgaccaacaccatgggggggtacaaggaaagcttcagcagcatcatgtgcttcgggtgtcacgacgtctactcacaggccagcctcggcatggacatccatgcatcagacctgaacctcctcactcggaggaaactgagtcgcctgctggacccgcccgaccccctggggaaggactggtgccttctcgccatgaacttaggcctccctgacctcgtggcaaagtacaacaccagtaacggggctcccaaggatttcctccccagccccctccacgccctgctgcgggaatggaccacctaccctgagagcacagtgggcaccctcatgtccaaactgagggagctgggtcgccgggatgccgcagactttttgctgaaggcatcctctgtgttcaaaatcaacctggatggcaatggccaggaggcctatgcctcgagctgcaacagcggcacctcttacaattccattagctctgttgtatcccggtgagggcagcctctggcttgggcagggtctgtttggactgcagaagcaagggggtgatgtagcccatccttccctttggagatgctgagggtgtttcttcctgcacccacagccagggggatgccactcctccctccggcttgacctgtttctctgccgctacctccctccccgtctcattccgttgtctgtggatggtcattgcagtttaagagcagaacagatcttttactttggccgcttgaaaagctagtgtacctcctctcagtgttttggactccatctctcatcctccagtaccttgcttcttactgataattttgctggaattcctaacttttcaatgacattttttttaactactatattgattgtcctttaaaaaagaaaagtgcatatttatccaaaatgtgtatttcttatacgcttttctttgttataccatttcctcagcttatctcttttatatttgtaggagaaactcccatgtatggaatcccactgtatgatttataaacagacaatatgtgagtgccttttgcagaagagggtgtgtttgaaatcatcggagtcagccaggagctgtcaccaaggaaacgctacctctctgtcccttgctgtatgctgatcatcgccagaggtgcttcaccctgagttttgttttgtattgttttctgacagtttttctgttttgtttggcaaggaaaggggagaagggaatcctcctccagggtgattttatgatcagtgttgttgctctaggaagacatttttccgtttgcttttgttccaatgtcaatgtgaacgtccacatgaaacctacacactgtcatgcttcatcattccctctcatctcaggtagaaggttgacacagttgtagggttacagagacctatgtaagaattcagaagacccctgactcatcatttgtggcagtcccttataattggtgcatagcagatggtttccacatttagatcctggtttcataacttcctgtacttgaagtctaaaagcagaaaataaaggaagcaagttttcttccatgattttaaattgtgatcgagttttaaattgataggagggaacatgtcctaattcttctgtcctgagaagcatgtaatgttaatgttatatcatatgtatatatatatatgcactatgtatatacatatatattaatactggtatttttacttaatctataaaatgtcgttaaaaagttgtttgtttttttctttttttataaataaactgttgctcgttgcattaaaaa

SEQ ID NO: 604 - DNA, 8777 bp, Homo sapiens
gcggggccgcgcccggcacggccatgtggacccccacggaggaggagaaatacggcgtagtgatatgcagctttcgaggatctgtccctcaagggttggtcttagaaataggagaaacagtccagattcttgaaaaatgtgaaggttggtacagaggagtttcaacaaagaagccaaatgtgaaggggatctttcctgcaaattacattcacttgaaaaaggcaattgtcagtaatagggggcagtatgaaactgtggttccacttgaagattctattgtgactgaggttacagcaactctacaagaatgggcaagtttgtggaaacagttgtatgtgaaacacaaagtagatcttttctacaaactacgccatgtgatgaatgaacttattgacctgcgaaggcagctactgtctggtcacctgactcaggatcaggtgcgggaggttaagcggcacatcaccgtgcgcctggactggggtaatgaacatttgggcctggacctggtgcctcggaaggactttgaagtagtggactcggaccagattagtgtctcagatctctataagatgcatttatctagccggcagagtgtacagcaaagcacatcccaggtagatacaatgcgcccacgtcatggggaaacatgtcggatgccagtgccacatcacttcttcctcagcctgaagagtttcacttacaatactattggggaagataccgatgtcttcttttccttatatgacatgagggaaggcaagcagatcagtgagcggtttctggtaagactgaacaagaatggtgggccgaggaacccagagaagatagaacgaatgtgtgccctttttacagatctgagcagcaaagatatgaagagagatttgtatatcgttgcccatgtgatccgaataggccggatgctcctgaacgactcaaagaaaggtcctcctcacctgcactacaggcgaccatatggctgtgcggtcctaagcatcttggatgtcctacagtcactcacagaagtaaaggaagaaaaggattttgttcttaaggtttacacgtgcaacaacgagagtgagtggtcccagatccacgagaacatcatccgaaagtccagtgccaagtactctgcccccagcgccagccatggtcttatcatttctctgcagcttcttcgtggagacatggaacagattcggagagaaaatcccatgatatttaataggggattggcaattacaagaaaattgggatttcctgatgtcattatgccaggtgatatccgcaatgacctgtacctaaccctggagaagggggatttcgagagaggaggaaagagtgtacaaaagaatattgaagtgaccatgtatgtgctttatgcagatggagaaatcttgaaggattgcatcagcttgggttcaggagagccaaataggagttcctaccactcctttgtcctctaccacagtaatagtcctcgctggggagaaattatcaaattgcctatccccattgaccggttccggggctcccacctgcgctttgagttcagacattgttccacaaaggacaaaggggaaaagaaactctttggctttgcattctcaaccctgatgcgtgatgatggcaccaccctctcagatgatattcacgagctttatgtgtacaagtgtgatgagaatagcacgtttaataaccatgctctgtacctgggcctgccctgctgcaaagaggactacaatggctgccctaatattccttctagcctcatcttccagcgcagcaccaaagagtctttcttcatctccactcagctctcctctaccaaactcacccagaatgtggacctcctagctctgctgaagtggaaagccttccccgaccggatcatggatgtactagggcggctgcggcatgtcagtggggaggaaattgttaagtttctgcaggacatcttagatacactctttgtgattttggatgataatacagagaagtacggcctgttggtttttcagtctctggtgttcatcatcaacctgctccgagacatcaagtattttcactttcgacctgtgatggacacgtatatccagaagcactttgctggagctctggcatacaaggagctcatccgctgtttgaagtggtatatggactgctcagcagaactgattcgacaggaccacattcaagaagctatgcgggccttggagtaccttttcaagttcattgtacagtcacggatcctgtactcacgagccacttgtggaatggaagaggaacaattcagatccagtatccaagaacttttccagtccatccggtttgtgctcagtctggacagccgaaactcagaaacactcctttttactcaggctgcactcctcaattctttcccaaccatctttgatgagcttctgcaaatgttcaccgtgcaagaggtggcagagtttgtgagagggacactggggagcatgcccagcactgtgcacattgggcagtcaatggacgtggtcaagctgcagtccattgccaggacagtggatagccgcctgttttctttctcagaatcccgccgcatcctgcttcctgtggttctccatcacattcaccttcacctgaggcagcagaaagagctgctaatttgctcagggattcttggcagcatcttctccatcgtcaagaccagctctctggaggcagatgtcatggaggaagtagagatgatggtggagagcctcctggacgtgctcttgcagactctgctcaccatcatgagcaaatcgcacgctcaggaggcggtaagagggcagcggtgcccgcagtgcacagccgagatcactggcgagtatgtgtcctgccttctctcactgctccgccagatgtgtgacacccatttccagcacctcctggacaacttccagagcaaagatgaactcaaggaatttctgctgaagattttttgcgtgttccggaacctgatgaagatgagtgtcttccctcgggactggatggtaatgagactgctcacaagcaatattatagtcactactgtccagtacctgtcctctgcactgcacaagaatttcacagagactgactttgactttaaggtgtggaattcttactttagcctggcagttctattcataaatcagccaagccttcagctagaaattatcacctcagccaaaaggaagaagattctagataagtatggggacatgcgtgtaatgatggcctatgaactgttcagcatgtggcagaatttgggtgaacataagatccactttattccgggaatgattggtccttttctgggtgtgacactggtcccacagccagaagtacggaatatcatgattcccatctttcatgacatgatggactgggagcagagaaaaaatggcaacttcaaacaggtggaggccgagttgattgacaagctggacagcatggtgtcagaagggaaaggtgacgagagctacagggagctcttcagcctactaacccagctgtttgggccctaccccagcctgctggagaaggttgaacaagaaacatggcgcgagaccggcatttcctttgtgacctcagtcacccgcctcatggaacgtcttcttgactacagggactgcatgaaaggagaggaaacagagaataagaagataggctgcactgttaacctgatgaatttttacaaatctgagattaacaaggaagaaatgtatatccgctacatccataagctttgtgacatgcacttgcaggccgaaaactacacagaggccgcatttaccctgctcctttactgtgagctgctgcagtgggaggaccggccactacgggaattcctccactacccatcgcagacagagtggcagcggaaggagggactgtgccggaagatcattcactacttcaacaaaggcaagagctgggagtttgggatcccactgtgcagggagctggcgtgtcagtacgagagcctctatgattaccagagcctcagctggattcggaaaatggaggccagctactatgacaacattatggagcagcaacgcctggagcctgagttctttcgggtcggcttctatggcaggaagtttcctttctttcttcggaacaaagaatacgtgtgccgtggccatgactacgagaggctggaggccttccagcagaggatgctcagtgagtttccgcaggctgtcgccatgcagcaccccaaccatcctgatgacgccatcctacagtgcgatgcccagtacttgcagatctatgcagtgacgcccattccagattatgtggatgttctgcagatggatagggtaccagatcgagtcaagagcttctatcgcgtcaacaatgtgaggaagttccggtatgacaggccttttcacaaaggccccaaggacaaggagaatgaattcaagagcctgtggattgaacgtaccacactgaccctgacccacagcttgcctggcatctctcggtggtttgaagtggagaggagggaactggtggaggtgagccctctggagaatgccatccaagtggttgagaataagaaccaggagctacgctccctgatcagccagtatcaacacaagcaggtgcatggcaacattaacctgctaagcatgtgcctgaatggtgtcattgatgcagctgtcaatggaggcattgcacgctatcaggaggccttctttgataaagattacatcaacaagcacccaggagatgctgagaagatcacccagctcaaggagcttatgcaggagcaggttcatgtccttggagttgggctagcagttcatgagaagtttgtgcacccagaaatgcggcctctgcataagaagctaattgatcagttccagatgatgcgggccagtctctaccatgagtttccaggtttggataagctaagtcctgcatgttcaggcaccagcaccccacggggaaatgttctggcatcccatagccccatgagtccggagagcatcaagatgacccaccggcacagccccatgaacttgatgggcacaggccgccattcatcatcctctctctcctcacatgcgtctagtgaagcaggaaacatggtgatgctgggtgacggctccatgggtgatgctcctgaggacctgtaccaccacatgcagctcgcgtatcccaaccccaggtaccaaggctcagtcaccaacgtctctgttctgtcctcgtcccaggcaagcccttcttcctccagcctgagttccactcactcagcaccatcccagatgattacctctgccccttccagtgcccgaggctctccctctctgccagataagtaccgccatgcccgtgaaatgatgttgttgctgcccacataccgggaccgcccaagcagtgccatgtatccagcagccatcctggagaacggacagccgccgaatttccagcgagccctgttccagcaagtggtcggagcctgcaaaccctgcagtgatcccaatctgtctgtggctgaaaaaggtcattactccctacactttgacgccttccaccaccctctgggtgatacccccccagccctccctgcccggaccctgcgcaagtctcctctccaccctatcccagcctcccccacaagcccccagtcaggtctggacggcagcaactctacgctgtccggcagtgccagcagcggcgtgtcctccttgagtgagagtaactttgggcactcctcggaggccccacctcgcactgacaccatggactccatgccaagtcaggcctggaatgctgacgaagatcttgagccaccctacctccctgtccactacagcctctctgagtctgccgtcctggactccatcaaggcccagccatgccgaagccactcagccccagggtgcgtcatccctcaggaccccatggacccgcctgcgctgccgcccaagccctaccacccccgcctgccggccctggagcacgatgagggggtgctgctgcgtgaagagactgagaggcctcgaggcctgcaccgcaaggctccattgcctcctgggagcgctaaggaggagcaggcccgcatggcctgggagcacggccgaggggagcagtgaggggcaacgaggcggctgggatgccgccctcagtaagcagcttgccaatcactccaggtctgaaaagcaagtcccccagccccaccccagggagccagagaggcttgcactcaggagagaaccacccccaagtctccgttctactgccgtgaactcatgtgttgccatgtacagaggccacagcagcatgaagggttgtggcttccctttttatttttttacatttccatttctatgggttttcctttctttcctttatgcagtagatgctttcttcctcctgcagttctggaccatgtggagctacatggagaaattgcacagacagaatcactttgccacactgcagggcccaggagtgggagcccaggccctccctccagggtagagatgcaccgaatggaaattgcactaaggacctcttcctttgctgtatggacagaagagttcatggttgcattcagggattgcaaggaccatatagacatgtcacaggtggaaaaagggccacaagccgttttgcacaaatgcctgcccacctgcccctcttccatccaggagtgtgctactgaggggctggctggaccaacctgctggctcaggcatgtgactggcctaactgcatgcccagggcactgccagggttcaatgggccagccgtctcctactccaccttggatttttctctccatcacatcatttctgaccatttgctcccttccattcttgaaacacctcatgccccacaggagccccagtggtgactggatctgcaagggttatctcccgccctctggggtttgagtggaggtatggagccagagaggctatcctagctaccttcctcctagggggagctggtccccttcctatgtggtagagagactggtgtaagagtgtggggtgtggcaggcgccggaaatcctcaaagctttcagaagcatccagaatgcctaccatcagctcctgaatcagggattttcagcactacctctgagccatggggttggctgcccagccaggcttccaggccctgaggacatgtggtcaggttcagcaggctcctgggtaaagagggtgggagggggcttctccttttggaagcagatagccatgcaggtagaattgtcatctcccaagtggccacatacagcaacccactccaggccatggggaccaccactcagggttcggggctggcaggagggtagtttctccagtctccccagtctgttggtgtctttataggaaactataaagcagagcagtggtgtctttagaggaaactcattcaagtcagggcactgattttcctctcagtttattatttggggggatagggtcaggtgggtatagtagtactttaccagggtgcttttaagttactttaaaaaaagcctacaaaatattttttttcttttatttgctcgagttcacattaatgatggtcacaaggctgccttgttgggcaggcgtattgcccccagttcctcttctgctggcctgtatgacctccacagccaggccctgggcccaagccccttgtcccttctccactgcccctctttccagacagtaaaggccatggtcagtgtgtttttctcttgtaaacaaaccccagcttgtttaacagaaatgctaataacctactgggaaagatggaggtctaaattacctccagggtttttctgggggtttatcaccagtgtgggtcccttctgataccaccaggttcactccaggcagagtggggcggaaggctgctgaggatatgggtcagttacagcagccctcacctcaaagggctggcctgcttctcagcctacattcatttgcaagcttcaatctctggaccatctggtgttcacaggtgttagagggttaggggttaggggctagttttggatttgattcataggtaggagggcttagattttaaggcacttctgaaagtcaatccctggacaaggcagtcatcacataagaacagctaccttctccacttggtggcacaagaggtagggaggggagtatgggttcatttggcttcgcattatgcaaggtgaaaccgtttgttttccctctccattttccctaactaaatgaaaaggacacattctgaaatcccttttgttggagaataagtcagtctgaggggaaatgggaggccagagatgagaaccctttgaaaagattgtaaaatactgattttcattctttcaagcttatttgtaaatacctatttgaatgctgtgtatttgtacaggaatttgagcaaaaaatgtatagagtgtgatgtccaattggtattcagcactataaatgtgtttttaacctcccgcattctgtgcttatttaaaacaaggaaacttctaaccatttcttttgtgtattcatgtttaaagaaaaaaagtgatttaaaaatgatcttacctgtaccagaaaagcaaagttaaaggaaacaaaatttgtaccattgtcccaagaggtattttactgtatatattgtggtagcatgttcaaaatccaacaagtaatgtgaattttagatgtaaatatctgccacttgattttttttccccctttccccacttccttgactgctgtgatgtgaattaaagataaatacgtgatactgaaaaaaaaaaaaaaaaaaaaaaa

SEQ ID NO: 605 - DNA, 6807 bp, Homo sapiens
ggcggccgctcccatgggtgtcgctgggccgcgccatgcctaagggggcgccgcgatgggccaaggggacgagagcgagcgcatcgtgatcaacgtgggcggcacgcgccaccagacgtaccgctcgaccctgcgcacgctgcccggcacgcggctcgcctggctggcggagcccgacgcccacagccacttcgactatgacccgcgtgctgacgagttcttcttcgaccgccaccccggcgtcttcgcgcacatcctgaactactaccgcacgggcaagctgcactgcccagccgacgtgtgcgggccgctctacgaggaggagctggccttctggggcatcgacgagaccgacgtggagccctgctgctggatgacgtaccgccagcaccgcgacgccgaggaggctctggacagcttcggcggcgctcctctggacaacagcgccgacgacgcggacgccgacggccctggcgactcgggcgacggcgaggacgagctggagatgaccaagcgcctggcgctcagtgactccccggatggccggcctggcggcttttggcgccgctggcagccgcgcatctgggcgctcttcgaggacccgtactcgtcccgctacgcgcggtatgtggccttcgcttccctcttcttcatcctggtctccatcaccaccttctgcctggagacccacgagcgcttcaaccccatcgtgaacaagacggagatcgagaacgttcgcaatggcacgcaagtgcgctactaccgggaggccgagacggaggccttccttacctacatcgagggcgtctgtgtggtctggttcaccttcgagttcctcatgcgtgtcatcttctgccccaacaaggtagagttcatcaagaactcgctcaacatcattgactttgtggccatcctgcccttctacctggaggtggggctgagcggcctgtcctccaaggcagccaaggacgtgctgggcttcctgcgcgtcgtccgcttcgtgcgcatcttgcgcatctttaagctgacccgccactttgtgggcctgcgggtcctgggccacacgctccgagccagcaccaacgagttcctgctgctcatcatcttcctggccttgggcgtgctgatcttcgccaccatgatctactacgccgagaggataggggcacagcccaatgaccccagcgccagtgagcacacgcactttaagaacatccccatcggcttctggtgggccgtggtcaccatgacgaccctgggctatggagacatgtacccgcagacgtggtccggcatgctggtgggggctctgtgtgcgctggcgggcgtgctcaccatcgccatgcccgtgcccgtcatcgtgaacaatttcgggatgtattactccttagccatggctaagcagaaactaccaaagaaaaaaaagaagcatattccgcggccaccgcagctgggatctcccaattattgtaaatctgtcgtaaactctccacaccacagtactcagagtgacacatgtccgctggcccaggaagaaattttagaaattaacagagcaggtaggaaacctcttagaggcatgtcgatctgacctttcacctctgccccctgtagcgatgattccagatccagtcagactgcttccttagttccgtgggtgaccccggaccccgcactcagtctggaggtgtggagcctgggggcccagggagatgctgggcggccaaattcagcaggcaagagcctgctagaggaacctcactggtgcccctgggtaaggaggttgacgcggttggtctcgtgatgttctgaagagacaacgcggcccgccaggttgctgaggactaacttagcaggagccaggggggctctgcttggtggggcaggagtccggtgtgagtctctgactcaggctactgacccggtgttgggacagagtgggggcgggtgtgatttggaaacgctagacagcctttgatctggtccttaccatggctcccttcaggctgtgtagatggcagagatggtgcatgggatctgggcaggagggtcccttgcaaaggcaggtgcaagggttctcacccccggcagagcctgtctccatagctgagtagaattcctgccctgatttcgggctgcccagctcgaggtccttcccaggagacgcctgtagccctccgtgacaagcttacttaccccatagcatgctgaaccaactcatcttctaccaccactctagagtttagcctttatctttaggaacctgttgaagtgactctagctttcacgttgtctgtttgggttgatggtcgagtgggagtttccggtgacccgatggaagcggctgccgagcaaaagactagagggggccaccaccctgggcagcttagatgaaagcgctacagaccagcaacagcctcccaccgagggttctccccgtttccagcggtagggactgcagcagcaatatagacatcccaaccagtgtacaaccactttcccgtgaattcactgggggccgggaggggggaggggggcatgaaacaatactagtcaccgtgggatatattctaatattccatggctagtggtttgttatgggactatctcagttttatgagaacctgcacatagcacataaagttgatcatggggctctggtccgaagatataaagcccatagtctacctctacccatggaataccatcgacttattctgtggacacagggatttcaaaggaacagatgacccagagaagaatgacagcactgagtaagaaggagtgccaggtgagcaggaggttgacgtgacaggtggcatttagtctatgaaggacctccccatgcccaggtctggcaggaggctgctggctagctcagccccaggtggggaagtttccccctggtttgggtggcctcccccagtggatgattgattttcttccctgctatcgcgctctctgacccaccaccccatcccaatcctcttctggctttaccccacagctatgctggcccgagcactaccctcaaggcccatttctttgcccatgggggtttcccggtcctttcaccctgccgcatacccttcccttcctgggatttctgtaggtgcctgagaggaacatggccaggggtctccgaggctgaaacagctccgagctctctgctttggattagctagttacttgatttcaggagctaccaacagggctctgggcctctaggaggaacgcgtgggctggcccaggccccagcttccatgtgggcctggcaagaagagctcagcctgagtggcatcactgtggcactacctggcccttcccctgcatcctccccgacactggatctttcaggagtgttgccccaagcacaggtgccctgggccagccagtcaagaatccccagtgctctccaggcaggcccagattcctctgtactcttggacaatgacagtattatcctgtgcggagtccccctgccccccagggagtgcagatgtgtttgttcagacatgcacaccagctaatcccaggacacaaaacctgtaaaacccatgcactcctgtgggattgcccctgagctccacagtctctccccagccctgcttttgagagccactttgccctggtcccaggtttcaggggcccagacagttctggcttggacagtctctgtggctgaggaagtatttggggccctcacaagcttgccctctggagcttggatgcctggatccctcctgcctcccccgtcaccaactgtgctcccaagcccttcccaagcactcacttcccggtggtgttggtgctgtcctgatatcctgacccccgaggctccagcctcatccctcaccagaacacttctccctccaaaagctggcgtgtgagaccccggctatccgccaccaagaggagttgcggtctttaggggcgttgtccccacctctgcaccccagagttcttcccattcaccttttttcctgcttgcagccatgcacctagatgggcatagggttggggtgagtttgtgggagagtgagggggaggccaggggcaaggaaggtaaatgtggtggccccacaggaattgtgagagatgagatgcagccccccaaggcctttccagtctcactgtacccccaaggcagtctagtggcctcgccaaaacctgagcttctccaattccacttttaaaaccagagttaggggctgtgtgtggcacgctgggttctgagggcatccctcccgcccccccaggccagcccccagtggtgccagcagcacctgcccctcacctccacctcttggtctcgtctgaagcctcagtctgtgtgtctgtcccagggacaatctggtctcctcctgtgtgctgtggctggcatggcctcagtgtctgagggcttgtcctgggaggggtatcaagaatccaattctcacctggttgtaggacctcttgggggatgctaggagggcgccctggcacagccagggattgcctagggctgaggggcccaggagaagctacttctctcccagaaaggggctccctcctgcatctgcagtcggatgcccagaccgcccactctggacagcccacaatgcctcctccgtcctgccatgcccattcgcatgtgtcttgtccatctccgctcctgtgatgtgggtcagtcctttgtggtgccgcgtccagggctgcagggtcccacgtcagtgagcagtgggtggccggtggagggggtggtggtggccgggctcccttcctgcccatggcacctagaacagcagtgaggtctcagagaagcccccgcctgggctccctgggagctaaccttgcagcctctgggttatctttggcaaaggggtctaaagtcccctatccccagcccctctacttcccctgctgggcagcagtggctgcccagtgagtggtgctatccatggaggggggagggagctgggcagcgctgactaggcggcgggtggggctaagagagtttctgcagggacccagctgcagggtcagcagcctgtgggccctgagtggggtctttgttgtcctcaggtgggctgtgggggaagtagcggagaaatgaagtgacgccaggggccaggcatgggtgttcttttccgtgttgttcacattttctctctttctctctctctccactaatcatgtttctctctctctcctcgttttgttgcatgacttgtgccggttctcgtgattgttccctgctcgtgtctcacagactgtccccatttagcctgagacttttttcctgagtccccagctgggcagatccctcagggctaaacccaaggaaatgcccagcaacccccaacccaccccagccccgcgtgcgcccctccggtgcccgcagctggtgtgaacagtaagtactttggcggtgcctggagaccagggcagaaaagccagctgtgctgactgagggcccagcctcgggttctccttgctccaaagtttaaaaaaaaatgaccctctcgcagatgctcatctcagcccatttcaagcctggaaaccatctctgagacgctgcccatgctgccatttcatcactgcaggcctgtgggtctagtgggggcctgggggccctgggctgggggaggcagggcccccagcctctggaaagcaggtgggaatggaggctcctagccactatctcatccaaaggatggggcaggggcgggggctcacacctttgaccctattcatgggttccccagatttatacagttggcccctcgttggtttctctttcttcaagccacccctctggagttggggagggagaatgccccagtttctgaaagcatcttaaaccatagatagacgaacagcccaggggcctgggccccttcacagagcaagacttaagcttccccacccaatcattagtccctcctcaaaggttagggttgagagaagcagtaggccctaggggtgtcccgggaatcccccaggagggaaaggtgccaggctatcatccctccagggatccctgatggatgttccttgtcccctgcccaaaaccatcccgaactttgggccctttagtgattgtgagagctgggagcccccagggcctgggggcttgtggacagaaccagtgggcgggggcccagcattcagagccagagaagggtctcaggcggcaccatctccacagaggcagaggcagagagaaggcacccccctctgacccacccctccccaggcaagaactgcaggctgtggacacctcccctggcagaggatggccaacagagactcagcaagtcctcactcccctcccagaaggagacgctgcctgggaggacccactgttctccccttgaggaaaatccatgcagggtgctatgggcctcaacccccacatcgtcatccgcgtcctctccatactgtttccctcccctctcccaacaccctcctccctcagcccggagacccttggatggaagactgggccagccagagtgggaggcaggaccagcgtgtctgcgagcacacgtgtgtgcctgcagacatgccccaagaccccagagacgccccggccccagtcacatggtgtcagagttaccttggcaactggcctttttggttcagagtaaattgggaagtgaagcccctgggatttgtcgagaaacgcactgtacgtgaaatgctttgccatcttgtacgaaagactttttttttaagttccaaaattatgatgggatttttttggatttgctttacgaataaatctgattggtccatttctcttttgaaaaaaaaaaaaaaaaa

SEQ ID NO: 606 - DNA, 1059 bp, Homo sapiens
cgcgctcacagcggcccgcgggccgggcgtcatgggcggcctcttctggcgctccgcgctgcgggggctgcgctgcggcccgcgggccccgggcccgagcctgctagtgcgccacggctcgggagggccctcctggacccgggagcggaccctggtggcggtgaagcccgatggcgtgcaacggcggctcgttggggacgtgatccagcgctttgagaggcggggcttcacgctggtggggatgaagatgctgcaggcaccagagagcgtccttgccgagcactaccaggacctgcggaggaagcccttctaccctgccctcatccgctacatgagctctgggcctgtggtggccatggtctgggaagggtacaatgtcgtccgcgcctcgagggccatgattggacacaccgactcggctgaggctgccccaggaaccataaggggtgacttcagcgtccacatcagcaggaatgtcatccacgccagcgactccgtggagggggcccagcgggagatccagctgtggttccagagcagtgagctggtgagctgggcagacgggggccagcacagcagcatccacccagcctgaggctcaagctgcccttaccaccccatcccccacgcaggaccaactacctccgtcagcaagaacccaagcccacatccaaacctgcctgtcccaaaccacttacttccctgttcacctctgccccaccccagcccagaggagtttgagccaccaacttcagtgcctttctgtaccccaagccagcacaagattggaccaatcctttttgcaccaaagtgccggacaacctttgtggtgggggggggtcttcacattatcataacctctcctctaaaggggaggcattaaaattcactgtgcccagcacatgggtggtacactaattatgacttcccccagctctgaggtagaaatgacgcctttatgcaagttgtaaggagttgaacagtaaagaggaagttttgcacacccaaaaaaaaaaaaaaaaaaaaaaaaaaaaaaaaaaaaaaaaaaaaaaaaaaaaa

SEQ ID NO: 607 - DNA, 2843 bp, Homo sapiens
ctcgcatttgcccccgaggacaattactatattgagatggagttaccagggctgaagtagaaaagtcagagcaaaaccacgcctgtgtcttcctcctgcctcagggacgaacaccttccttccaggtccgtggcaaatatctccaaaagccctgccgcctgccaacaccccttcaagttcccagttccacggaggcggaagcaaagcccccggaaaggccggtttgtccgccctgtgttgtttaaaggggatagacgaccttggagcgccccgccccctcccgccaaggaaggaccccattggctctccccggaggcttcactctcattggtcagcgagtgaatgccgacctgcagactggggcctaagtttcttttagtttccggtgtctctgcaatggcggctctagactccctgtcgctcttcactagcctcggcctgagcgagcagaaggcccgcgagacgctcaagaactcggctctgagcgcgcagctgcgcgaggccgctactcaggctcagcagaccctgggttccaccattgacaaagctaccgggatcctgttatatggcttggcctcccgactcagggatacccggcgtctctccttccttgtaagctacatagccagtaagaagatccacactgagccccagctaagcgctgcccttgagtatgtgcggagtcaccccttggaccccatcgacactgtggacttcgagcgggaatgtggcgtgggtgtcattgtgaccccagagcagattgaggaggctgtggaggctgctattaacaggcaccggccccagctcctggtggaacgttaccatttcaacatggggctgctgatgggagaggctcgggctgtgctgaagtgggcagatggcaaaatgatcaagaatgaagtggacatgcaggtcctccaccttctgggccccaagttggaggctgatctggagaagaagttcaaggtggcaaaagctcggctagaagaaacagaccggaggacggcaaaggatgtggtggagaatggcgagactgctgaccagaccctgtctctgatggagcagctccggggggaggcccttaagttccacaagcctggtgagaactacaagaccccaggctatgtggtcactccacacaccatgaatctactaaagcagcacctggagattactggtgggcaggtacgtacccggttcccgccagaacccaatggaatcctgcatattggacatgccaaagccatcaatttcaactttggctatgccaaggccaacaatggcatctgttttctgcgttttgatgacaccaaccctgagaaggaggaagcaaagttcttcacggccatctgtgacatggtagcctggctaggctacacaccttacaaagtcacatatgcgtctgactattttgaccagctatatgcgtgggctgtggagctcatccgcaggggtctggcttatgtgtgccaccagcgaggagaggagctcaaaggccataatactctgccttcaccctggagagaccgtcccatggaggagtcactgctgctctttgaggcaatgcgcaagggcaagttttcagagggcgaggccacactacggatgaagctggtgatggaggatggcaagatggaccctgtagcctatcgagtcaagtatacaccacaccaccgcacaggggacaaatggtgcatctatcccacctacgactacacacactgcctctgtgactccatcgagcacatcactcactcactctgcaccaaggaattccaggcccgacgctcttcctacttctggctttgcaatgcactggacgtctattgccctgtgcagtgggagtatggccgcctcaacctgcactatgctgttgtctctaagaggaagatcctccagcttgtagcaactggtgctgtgcgggactgggatgacccacggctctttacactcacggccctgcgacggcggggcttcccacctgaggccatcaacaacttctgtgcccgggtgggagtgactgtggcacaaaccacaatggagccacatcttctagaagcctgtgtgcgtgatgtgctgaatgacacagccccacgagccatggctgtgctggagtcactacgggtcatcatcaccaactttcctgctgccaagtccttggacatccaggtgcccaacttcccagctgatgagaccaaaggcttccatcaggttccctttgcacccattgtcttcattgagaggactgacttcaaggaggagccagagccaggatttaagcgcctggcttggggccagcctgtgggcctgaggcatacaggctacgtcattgagctgcagcatgttgtcaagggccccagtggttgtgtagagagtctggaggtgacctgcagacgggcagatgctggagagaagccaaaggcctttattcactgggtgtcacagcctttgatgtgtgaggttcgcctctatgagcgactattccagcacaagaaccctgaagatcctactgaggtgcctggtggatttttaagtgacctgaacctggcatcactacacgtggtggatgcagcattagtggactgctctgtggccctggcaaaacccttcgacaagttccagtttgagcgtcttggatatttctccgtggatccagacagccatcagggaaagcttgtctttaaccgaactgtcacactgaaggaagacccaggaaaggtgtgagctggaagcactgaacctacctcatcctcctggagggtgtggctaccctcgccaccccaaattccatgtcaataaagaacagctaaattctcctagaaaaaaaaaaaaaaaaaaaaaaa

SEQ ID NO: 608 - DNA, 5473 bp, Homo sapiens
ggcaggacgaggtggcaccaaattcccttcggccaatgacgagccggagtttacagaagcctcattagcatttccccagaggcaggggcaggggcagaggccgggtggtgtggtgtcggtgtcggcagcatccccggcgccctgctgcggtcgccgcgagcctcggcctctgtctcctccccctcccgcccttacctccacgcgggaccgcccgcgccagtcaactcctcgcactttgcccctgcttggcagcggataaaagggggctgaggaaataccggacacggtcacccgttgccagctctagcctttaaattcccggctcggggacctccacgcaccgcggctagcgccgacaaccagctagcgtgcaaggcgccgcggctcagcgcgtaccggcgggcttcgaaaccgcagtcctccggcgaccccgaactccgctccggagcctcagccccctggaaagtgatcccggcatccgagagccaagatgccggcccacttgctgcaggacgatatctctagctcctataccaccaccaccaccattacagcgcctccctccagggtcctgcagaatggaggagataagttggagacgatgcccctctacttggaagacgacattcgccctgatataaaagatgatatatatgaccccacctacaaggataaggaaggcccaagccccaaggttgaatatgtctggagaaacatcatccttatgtctctgctacacttgggagccctgtatgggatcactttgattcctacctgcaagttctacacctggctttggggggtattctactattttgtcagtgccctgggcataacagcaggagctcatcgtctgtggagccaccgctcttacaaagctcggctgcccctacggctctttctgatcattgccaacacaatggcattccagaatgatgtctatgaatgggctcgtgaccaccgtgcccaccacaagttttcagaaacacatgctgatcctcataattcccgacgtggctttttcttctctcacgtgggttggctgcttgtgcgcaaacacccagctgtcaaagagaaggggagtacgctagacttgtctgacctagaagctgagaaactggtgatgttccagaggaggtactacaaacctggcttgctgatgatgtgcttcatcctgcccacgcttgtgccctggtatttctggggtgaaacttttcaaaacagtgtgttcgttgccactttcttgcgatatgctgtggtgcttaatgccacctggctggtgaacagtgctgcccacctcttcggatatcgtccttatgacaagaacattagcccccgggagaatatcctggtttcacttggagctgtgggtgagggcttccacaactaccaccactcctttccctatgactactctgccagtgagtaccgctggcacatcaacttcaccacattcttcattgattgcatggccgccctcggtctggcctatgaccggaagaaagtctccaaggccgccatcttggccaggattaaaagaaccggagatggaaactacaagagtggctgagtttggggtccctcaggttcctttttcaaaaaccagccaggcagaggttttaatgtctgtttattaactactgaataatgctaccaggatgctaaagatgatgatgttaacccattccagtacagtattcttttaaaattcaaaagtattgaaagccaacaactctgcctttatgatgctaagctgatattatttcttctcttatcctctctctcttctaggcccattgtcctccttttcactttattgctatcgccctcctttcccttattgcctcccaggcaagcagctggtcagtctttgctcagtgtccagcttccaaagcctagacaacctttctgtagcctaaaacgaatggtctttgctccagataactctctttccttgagctgttgtgagctttgaagtaggtggcttgagctagagataaaacagaatcttctgggtagtcccctgttgattatcttcagcccaggcttttgctagatggaatggaaaagcaacttcatttgacacaaagcttctaaagcaggtaaattgtcgggggagagagttagcatgtatgaatgtaaggatgagggaagcgaagcaagaggaacctctcgccatgatcagacatacagctgcctacctaatgaggacttcaagccccaccacatagcatgcttcctttctctcctggctcggggtaaaaagtggctgcggtgtttggcaatgctaattcaatgccgcaacatatagttgaggccgaggataaagaaaagacattttaagtttgtagtaaaagtggtctctgctggggaagggttttcttttctttttttctttaataacaaggagatttcttagttcatatatcaagaagtcttgaagttgggtgtttccagaattggtaaaaacagcagctcatagaattttgagtattccatgagctgctcattacagttctttcctctttctgctctgccatcttcaggatattggttcttcccctcatagtaataagatggctgtggcatttccaaacatccaaaaaaagggaaggatttaaggaggtgaagtcgggtcaaaaataaaatatatatacatatatacattgcttagaacgttaaactattagagtatttcccttccaaagagggatgtttggaaaaaactctgaaggagaggaggaattagttgggatgccaatttcctctccactgctggacatgagatggagaggctgagggacaggatctataggcagcttctaagagcgaacttcacataggaagggatctgagaacacgttgccaggggcttgagaaggttactgagtgagttattgggagtcttaataaaataaactagatattaggtccattcattaattagttccagtttctccttgaaatgagtaaaaactagaaggcttctctccacagtgttgtgccccttcactcatttttttttgaggagaagggggtctctgttaacatctagcctaaagtatacaactgcctggggggcagggttaggaatctcttcactaccctgattcttgattcctggctctaccctgtctgtcccttttctttgaccagatctttctcttccctgaacgttttcttctttccctggacaggcagcctcctttgtgtgtattcagaggcagtgatgacttgctgtccaggcagctccctcctgcacacagaatgctcagggtcactgaaccactgcttctcttttgaaagtagagctagctgccactttcacgtggcctccgcagtgtctccacctacacccctgtgctcccctgccacactgatggctcaagacaaggctggcaaaccctcccagaaacatctctggcccagaaagcctctctctccctccctctctcatgaggcacagccaagccaagcgctcatgttgagccagtgggccagccacagagcaaaagagggtttattttcagtcccctctctctgggtcagaaccagagggcatgctgaatgccccctgcttacttggtgagggtgccccgcctgagtcagtgctctcagctggcagtgcaatgcttgtagaagtaggaggaaacagttctcactgggaagaagcaagggcaagaacccaagtgcctcacctcgaaaggaggccctgttccctggagtcagggtgaactgcaaagctttggctgagacctgggatttgagataccacaaaccctgctgaacacagtgtctgttcagcaaactaaccagcattccctacagcctagggcagacaatagtatagaagtctggaaaaaaacaaaaacagaatttgagaaccttggaccactcctgtccctgtagctcagtcatcaaagcagaagtctggctttgctctattaagattggaaatgtacactaccaaacactcagtccactgttgagccccagtgctggaagggaggaaggcctttcttctgtgttaattgcgtagaggctacaggggttagcctggactaaaggcatccttgtcttttgagctattcacctcagtagaaaaggatctaagggaagatcactgtagtttagttctgttgacctgtgcacctaccccttggaaatgtctgctggtatttctaattccacaggtcatcagatgcctgcttgataatatataaacaataaaaacaactttcacttcttcctattgtaatcgtgtgccatggatctgatctgtaccatgaccctacataaggctggatggcacctcaggctgagggccccaatgtatgtgtggctgtgggtgtgggtgggagtgtgtctgctgagtaaggaacacgattttcaagattctaaagctcaattcaagtgacacattaatgataaactcagatctgatcaagagtccggatttctaacagtccttgctttggggggtgtgctgacaacttagctcaggtgccttacatcttttctaatcacagtgttgcatatgagcctgccctcactccctctgcagaatccctttgcacctgagaccctactgaagtggctggtagaaaaaggggcctgagtggaggattatcagtatcacgatttgcaggattcccttctgggcttcattctggaaacttttgttagggctgcttttcttaagtgcccacatttgatggagggtggaaataatttgaatgtatttgatttataagttttttttttttttttgggttaaaagatggttgtagcatttaaaatggaaaattttctccttggtttgctagtatcttgggtgtattctctgtaagtgtagctcaaataggtcatcatgaaaggttaaaaaagcgaggtggccatgttatgctggtggttaaggccagggcctctccaaccactgtgccactgacttgctgtgtgaccctgggcaagtcacttaactataaggtgcctcagttttccttctgttaaaatggggataataatactgacctacctcaaagggcagttttgaggcatgactaatgctttttagaaagcattttgggatccttcagcacaggaattctcaagacctgagtattttttataataggaatgtccaccatgaacttgatacgtccgtgtgtcccagatgctgtcattagtctatatggttctccaagaaactgaatgaatccattggagaagcggtggataactagccagacaaaatttgagaatacataaacaacgcattgccacggaaacatacagaggatgccttttctgtgattgggtgggattttttccctttttatgtgggatatagtagttacttgtgacaagaataattttggaataatttctattaatatcaactctgaagctaattgtactaatctgagattgtgtttgttcataataaaagtgaagtgaatctgattgcaaaaaa

SEQ ID NO: 609 - DNA, 4177 bp, Homo sapiens
ggggctccgcgggcctggagcacggccgggtctaatatgcccggagccgaggcgcgatgaaggagaagtccaagaatgcggccaagaccaggagggagaaggaaaatggcgagttttacgagcttgccaagctgctcccgctgccgtcggccatcacttcgcagctggacaaagcgtccatcatccgcctcaccacgagctacctgaagatgcgcgccgtcttccccgaaggtttaggagacgcgtggggacagccgagccgcgccgggcccctggacggcgtcgccaaggagctgggatcgcacttgctgcagactttggatggatttgtttttgtggtagcatctgatggcaaaatcatgtatatatccgagaccgcttctgtccatttaggcttatcccaggtggagctcacgggcaacagtatttatgaatacatccatccttctgaccacgatgagatgaccgctgtcctcacggcccaccagccgctgcaccaccacctgctccaagagtatgagatagagaggtcgttctttcttcgaatgaaatgtgtcttggcgaaaaggaacgcgggcctgacctgcagcggatacaaggtcatccactgcagtggctacttgaagatcaggcagtatatgctggacatgtccctgtacgactcctgctaccagattgtggggctggtggccgtgggccagtcgctgccacccagtgccatcaccgagatcaagctgtacagtaacatgttcatgttcagggccagccttgacctgaagctgatattcctggattccagggtgaccgaggtgacggggtacgagccgcaggacctgatcgagaagaccctataccatcacgtgcacggctgcgacgtgttccacctccgctacgcacaccacctcctgttggtgaagggccaggtcaccaccaagtactaccggctgctgtccaagcggggcggctgggtgtgggtgcagagctacgccaccgtggtgcacaacagccgctcgtcccggccccactgcatcgtgagtgtcaattatgtactcacggagattgaatacaaggaacttcagctgtccctggagcaggtgtccactgccaagtcccaggactcctggaggaccgccttgtctacctcacaagaaactaggaaattagtgaaacccaaaaataccaagatgaagacaaagctgagaacaaacccttaccccccacagcaatacagctcgttccaaatggacaaactggaatgcggccagctcggaaactggagagccagtccccctgcaagcgctgctgctcctccagaactgcagccccactcagaaagcagtgaccttctgtacacgccatcctacagcctgcccttctcctaccattacggacacttccctctggactctcacgtcttcagcagcaaaaagccaatgttgccggccaagttcgggcagccccaaggatccccttgtgaggtggcacgctttttcctgagcacactgccagccagcggtgaatgccagtggcattatgccaaccccctagtgcctagcagctcgtctccagctaaaaatcctccagagccaccggcgaacactgctaggcacagcctggtgccaagctacgaagcgcccgccgccgccgtgcgcaggttcggcgaggacaccgcgcccccgagcttcccgagctgcggccactaccgcgaggagcccgcgctgggcccggccaaagccgcccgccaggccgcccgggacggggcgcggctggcgctggcccgcgcggcacccgagtgctgcgcgcccccgacccccgaggccccgggcgcgccggcgcagctgcccttcgtgctgctcaactaccaccgcgtgctggcccggcgcggaccgctggggggcgccgcacccgccgcctccggcctggcctgcgctcccggcggccccgaggcggcgaccggcgcgctgcggctccggcacccgagccccgccgccacctccccgcccggcgcgcccctgccgcactacctgggcgcctcggtcatcatcaccaacgggaggtgacccgctggccgcccgcgccaggagcctggacccggcctcccggggctgcggcgccaccgagcccggcaaatgcgcacgacctacattaatttatgcagagacagctgtttgaattggaccccgccgccgacttgcggatttccaccgcggaggccccgcgcgccggtgccgagggccgaggagcgcccgggtccgggcaggtgaccgcccgcctctgtcctgcgagggccggtgcgacccagttgctgggggcttggtttcctcaccttgaaatcgggcttcacgcgtcttgccttgtccccaacgttccacaacagtcccgctgggggattgaagcggtttcactccgcaaatatcctccactttcaggagggaaaacccaccctaccacagtccgctcttccaagtggacggcagacctgggaggggacgcctgtgtcacgagcccttttagatgcttaggtgaaggcagaagtgatgattgtaagtcccatgaatacacaactccactgtctttaaaagtcattcaagagtctcattatttttgtttttatttaaccctttcttcaatacaaaaagccaacaaaccaagactaagggggtgaccatgcaattccattttgtgtctgtgaacataggtgtgcttcccaaatacattaacaagctcttacttccccctaacccctatgaactcttgataacaccaagagtagcaccttcagaatatattgaataggcattaaatgcaaaaatatatatgtagccagacagtttatgagaatgaccctgtcaagcttcattattacgtggcaaaatccctctggcccacacagatctgtaattcactaggctcgtgtttgctacaaatagtgctaataaagttaaattgcacgtgcaatacggaacactgtcaatggactgcaccttgtgaaggaaaaacatgcttaagggggtgtaatgaaaatgatgtagacattttaagcattttctacacagcgagaaaacttcgtaagaacatgttacgtgtgcaacaggtaaacagaaatcctttcataaagcaccagcagtgtttaaaaaatgagcttccattaatttttactttttatgggttttgcttaaagatctcaacatggaaaaatcctgtcatggctctgaactgcacaatgcattgaaccgccgtccttcaattttcttcacactatcaacactgcagcattttgctgctttatcaaaatggtttattttaggaaactttttccacctttctgaatggaaagaggttttcacaaatgttttaaactcatcgttctaaaatcaagtgcacctacaccaactgctctcaaaatgtgaactgacttttttttttttttttttgccaaccctgtgtcacttagtgaggacctgacacaatccctacagggtgtctgtcagtgggcctcatggtaagagtcacaatttgcaaatttaggaccgtgggtcatgcagcgaaggggctggatggtaggaagggatgtgcccgcctctccacgcactcagctatacctcattcacagctccttgtgagtgtgtgcacaggaaataagccgagggtattatttttttatgttcatgagtcttgtaattaaaccgtgattcttgaaaggtgtaggtttgattactaggagataccaccgacatttttcaataaagtactgcaaaatgcttttgtgtctaccttgttattaacttttggggctgtatttagtaaaaataaatcaaggctatcggagcagttcaataacaaaggttactgttgagaaaaaagaccctatcatagatttacaagtgacaacgtggacaggcgtaacagagtgtgtatgtacttgaaaatgtgtactagtgaaaacgtccttgtctaaacaaacttcgttttcataacctagaacatgaaggaagattcttacacgagctggcttcaggacggccagggctgagtgtgaagtcagcagagctgttactgtggcaacctaatattgtgacctccatcttgaagagtctgcacatttaagctggggatagcgtttcttgacttctgtgaggctccggcaggggaagaggaagcattttaatacatatgc

SEQ ID NO: 610 - DNA, 9068 bp, Homo sapiens
cggcgcgcgcgcggggcgggggcgcgcggaggggggggctgccccggggcggcccccccaggtcggggcgcggcgggcggcggcggcgggcgcgcgtcccgtccaggtccggagtaaccgccgccgccgccgccaaagctcgccaacatggcggacctggaggctgtgctggccgatgtcagttacctgatggccatggagaagagcaaggcgaccccggccgcccgcgccagcaagaggatcgtcctgccggagcccagtatccggagtgtgatgcagaagtaccttgcagagagaaatgaaataacctttgacaagattttcaatcagaaaattggtttcttgctatttaaagatttttgtttgaatgaaattaatgaagctgtacctcaggtgaagttttatgaagagataaaggaatatgaaaaacttgataatgaggaagaccgcctttgcagaagtcgacaaatttatgatgcctacatcatgaaggaacttctttcctgttcacatcctttctcaaagcaagctgtagaacacgtacaaagtcatttatccaagaaacaagtgacatcaactctttttcagccatacatagaagaaatttgtgaaagccttcgaggtgacatttttcaaaaatttatggaaagtgacaagttcactagattttgtcagtggaaaaacgttgaattaaatatccatttgaccatgaatgagttcagtgtgcataggattattggacgaggaggattcggggaagtttatggttgcaggaaagcagacactggaaaaatgtatgcaatgaaatgcttagataagaagaggatcaaaatgaaacaaggagaaacattagccttaaatgaaagaatcatgttgtctcttgtcagcacaggagactgtcctttcattgtatgtatgacctatgccttccataccccagataaactctgcttcatcctggatctgatgaacgggggcgatttgcactaccacctttcacaacacggtgtgttctctgagaaggagatgcggttttatgccactgaaatcattctgggtctggaacacatgcacaatcggtttgttgtctacagagatttgaagccagcaaatattctcttggatgaacatggacacgcaagaatatcagatcttggtcttgcctgcgatttttccaaaaagaagcctcatgcgagtgttggcacccatgggtacatggctcccgaggtgctgcagaaggggacggcctatgacagcagtgccgactggttctccctgggctgcatgcttttcaaacttctgagaggtcacagccctttcagacaacataaaaccaaagacaagcatgaaattgaccgaatgacactcaccgtgaatgtggaacttccagacaccttctctcctgaactgaagtcccttttggagggcttgcttcagcgagacgttagcaagcggctgggctgtcacggaggcggctcacaggaagtaaaagagcacagctttttcaaaggtgttgactggcagcatgtctacttacaaaagtacccaccacccttgattcctccccggggagaagtcaatgctgctgatgcctttgatattggctcatttgatgaagaggataccaaagggattaagctacttgattgcgaccaagaactctacaagaacttccctttggtcatctctgaacgctggcagcaagaagtaacggaaacagtttatgaagcagtaaatgcagacacagataaaatcgaggccaggaagagagctaaaaataagcaacttggccacgaagaagattacgctctggggaaggactgtattatgcacgggtacatgctgaaactgggaaacccatttctgactcagtggcagcgtcgctatttttacctctttccaaatagacttgaatggagaggagagggagagtcccggcaaaatttactgacaatggaacagattctctctgtggaagaaactcaaattaaagacaaaaaatgcattttgttcagaataaaaggagggaaacaatttgtcttgcaatgtgagagtgatccagagtttgtgcagtggaagaaagagttgaacgaaaccttcaaggaggcccagcggctattgcgtcgtgccccgaagttcctcaacaaacctcggtcaggtactgtggagctcccaaagccatccctctgtcacagaaacagcaacggcctctagcacccagaaacagggagggtcctcgaggaggacacaccagggtctcagccttttggggtgaacgaggatgaggcatctgatctattcgctaccgggactcctccaggctcccgagaggagtcgggacccttcggcttggggtcagctcagctccctgccttgtcacatttgtctgcattagaaactactgaagaaataaaagttctttttctttgctacacactttggtacctatgaacctagaacttgaagtgactcctacttatcacgtaaatttttatgtctgatatcaaacacatcttagactccccagaatggaatttaaagatgttcagtgttgggtaacagattgccctaagcattgccacatattctgtctagtcactgctgattttctatgtctttgctccatactgctgggggatgggagagccacagtgtgtttcttttgtgcacttcgcaactgacttcttgtcctggggttaaaagttgaagatattttctgatgatattaaaagttgaagatatttctgcacttgggccctcctctgggagccgcacccacatgactgccctgcctctgaccagtctgttccggggccccctcagccaggtgggaatgacggacacgtactatccaagtgtatgggattaactaatcattgaaggcattcatccgtccatcattggaaagatttacagtgattctgaaggacaggccgtggagttttaggtttcaggggcaagagcagttttcaaaagtctttgagtccagtgtgcacgagtcgacaagcagtacctggcatgcaggagcactcatgggtgagtccgtctcaggtctcgacaattagcagttgtgtgacagtcattctggttccttctgcctgaccctgggagacatatcagtaatggatgtacaaaagcaggtctgttttatgtcttagtataatttcagatgaattgtattgaaaaaatgctgaggaatgaatgtgtcaaaatgggttaactgtgtatattgactttcatgtcgtcatgcatctgtcatgaatgaatgatactttgcactgggctgtacgacagtgaggaccttagggcatgaagcctttttcctggtcccagcagcatctgccctgtgaagtttgttttctcccactgcctccaggccccactgatacccccaaatagatgctgggttatgagaaccagcgaaatcccccatgtcatcagtcttaaaaaaaaaattttacaaatccacgtatttgtcccattcttggagtagttttagtgtatgtctttacattaactactaacagtataaataacttgacatcgtaattgtctgcatcctgtccttgatatttttagcagttccaaatctttgtttttgtatttgtttgctgtgttcatgggcaaagtaagtactttttaatgcagttattttgagagtttggaagataattaccaaaagggtccattatttcataagagttactttgcaaaaaaaaaaatgtgggtttttttttttgtctatctcaactactagttggggtttaaattaacatacattttctactatctgttatttccagtgtgggaggagggatgtactacttacatgcattctccttatttaaaaaggaagaatagtattcaaattctgttgaaacacacacacacacacacacacacacacacacacactccagaagcagaaaagccattgttcttaaagagtgaatgtcttcccagccctggttaattatagctgtgactgatgccgttcccgtctgcatctcaagctcataggttctcagcatgtgcagttgaggatgcgctgggcctcatgcctgttctagatctccaggataaagggcctgctgttgactccaccagggtctgggcttagcgtctaatatctcgtacctagggcgtgagctgcacaaacgtgttcagaaagattattcaactttcccatacttgttctaaaattgagctgatccgcatctctttcaaaaactagaatttctgctctaagaatagaacataaggctccactcccttttagaaaagatatatgaattggaaaatgctctgaaagtccttttgcttcaaacaaaagtgtaaacttttacacttccccaactcacatttgatttgtaatgatatggttgagaagtacatctagatgtcatttattaaaagtgctttgtaagactagattgagctgtttctgagggcggtcaccagttgtgttggggtctggtttgagtgccttctgccaaaatgttgtgatggaggtgtttctgcgaccagacacaggataccgctgtgtctgcacccggttgcctgcatggccagaggaaaagtcagttggattaaacatcatggtatacttggctgttgtttttttttaattttttaattttttgggatagggcctcgctctgtcacccaggctggagaacagtgggatgatcatggctcactgcagccttgaattcctaggttcaagcaatcctcccacgtcagcctcctgagtagctaggactacaggtgcatgccacctttcctggctaatttattttttgggtagagatggggtcttgaactcttaggctcaagtgatcctccttccttggcctcccaaaatgctggaattagagatgtaagccaccatgcccagccatagtacttggatgttttagaaggttttccaagtattacataattcctagatgttcacccttattacactccaactattaaaaaggtcaaaattcagcctattttttttcattattttagattcctgtggttgggatattttaacattgatgagaaaaataattgaggttgatatttttacaaaatcatgcggtaataagtcttgatttcatgattcaaaagaatcaataaagcctaaaaataatagattactttaagctgctatgtaagatatatatggaataaattaaaaacctttgtgaattcaggtttattatttttaacctaaaacattctctttggttcattcatcccctcatgtcatgggggctcattggttttccttctttgtcatatttaagtatgatttttcaacaaaacttctagaagtcagcttattatgtcaccattcatgcaaagtgctcatgcctctgattggtccattcactgacgtgacaatttcaggtcctatgtttaaaaagaaggggctggccgggcacgatggctcacgcctataatcccagcactttgggaggccgagaggggcggttcacgaggtcaggagattgagaccatcctggttagcagagtgaaaccccgtctctactaaaaatacaaataaaaattagccgggcgtggtggcgggcgcctgtagtcccagctacttgggaggctgaggcaggagaatggcatgaacccgggaggcagagcttgcagtgagccgagattgcgccactgcactccagcctgggcgacagagcgagactctgtctcaaaaaaaaaaaggaggggggctaaatatccagtgagatgcactgaggaaaggaagcattttgctgaagacagcagcagcaacaaacaatggtctgtttgttgcaaacaagatgtagcttgatttctggtctgacatatgccatatacagatattagaaacgactgtttgaaggccacactggtcatctacaaagtaatgtttaccaattgacgacagggatttaactagattaaaaagatcaaagtgtggtttttctctgctttttaaaatttcactcggaatttgtagctgggccaattcaacacattttacttttcagtggaattgatttttctaatgtttcagaattttaacatatcaagaagaaaacaacgttctcaaagtctggcctctttagcatgatgtaaacctatagaaatgctttgaaatgtgctggtgtaagataagagttatcttgtatgatttaatcatatgcagtgttgtctcagttacgttcagggaaatgtttctgtgtcattcagagatgcttgatgaattaacacctcccaccctgagtgaggggttgacttgttgggagatgatttgggcttcactgggatctgtgacaggtgggggctgggctgggtgtcacaaagagaatagtggtagaaatcgggcgaaggaagaaagaagttactggtaaaaatcattacaccataaagcaccaaggaaataactgagttaaaataggtgaagtttcttttttcccccctgtaacaggagagttttccttatgataattattctgagacttggtcactttgtttttgaatgtggagctgctgaactcattcagaagccatttgctgcctatcaggactttctgaagaagttcttttgcctctgcctaccctctggcaccctcccatggaggcacaggggacccagagctaaagcattaccaggccatctccaaaacaccccgtgtgtgtgtgtgtgtgtgtgtgtgtgtgtgtgtgtgtgtgtgtgcactttgcagcccccgaggtggagaggcagtgtctggatcactgtgaatgcattgccccattggtcagttggggacactgttacaaatccactgaagtcctggtaaaactgtcaagagtaacaggcctcttctgttctaccctgctcacttccacggtgagttaccagcctgggcaacacagcaagaccccatctctacaaaaaaaatttttttaagtaattaaccgtttaaattttttcctaaagatttaacatgatttttccctcctatgtaaagtttactggagagacttgaattacttaaattcatgttaatatgatttttttttaatccaggtcacattttaacaaagtttattatgaaacaaatgaaatttgaactctaaaatggtactccttggcttcctcaagtcacaatgaactttatattttctttgtccttaaggactaagatagttgttttatttcagccgaatcacagagataaccactcctgcaggcccccacagctggcccaaaggggctgtctttctgacctggctgtgttagcactgattgagaaacgcaggctcccaaattttaaattgcctttattaaaaacacaaactacagaaaatgggttaagagtatacgcatttcatcaaacacatataggggaaaaaatccttcaatttagagttaaataactcagctttgtatagtagagttagcgctccagtatctaacaatctcagaatcatctctgaaaactggtaactatgcttccatttttaattttgtcctaaatatcagatgtctttgatgtaagggtagggaatggagaaatattttcaattgtgtatttgtattacaaagaacttgaaatttactttcttagttgattatattaaatgatgtatatattatatgtggtttataagctcaacactggccatttttttagttttattgttaaatggtatttttctatgtttaattataatagatctggctttttctggatagcataaagatcactgaactatatatatataagaaacaagagttctattttagcacaaaggcattttatattatttattgaatccataagtttgttttcgtcaaaaacattccatattatttctgctcctttttatttgtatagtttgttatttaaagaaatggcagtccttcctgttcttaatacaataaaattgaaataatgcacctagtaatgtggccgacatctcttctcaccaccatggactgttttcaacaacagttgatcttctggtctgtgctgagaggcgcatgcatgtctttcgtcacgtcgggcagcacacctgctgtgaaatactgctttcatctacctcttcagaaggcttcttgcttgttgacaagtaccgcaaaggctttattctggactggctatctcataaaaggatttctgtaagactttgcagtgtcattccctcagaacctaggtttgtttctaaagccacggtattgtccaggagcccctgtgtgtggggcaggtagctatccctcccatgtcattagtaatcctttaggatttaaggtacaactggacagcatcattccttccccttattgtgccaaatccccaccatcagccttgccattgccttaagatttgattattgcacccaattacctaaccactaaacagaaaggccaccttcactctttgaaaaaggcaagctgtgcttagaaacactgcttttaagagtagcacatttgagtgtgactttttccccccttcactatttcaaaatggttttgaaatggggtcttaaaggtaagcgccctcatacatgactgaaactttgtgagaggtcttatatttgaatggacccttaatgatttatgtgaaatagaatgaagtcctgtctctgtgagagaacgtgcctcctcactcatttgtctctgtctgttttcatagccatcaatatagtaacatatttactatattcttgaatacccttgaagaaagaaatccgttttctattgtgcattgctatacgaagtgaagccagtaaactagatactgtaaatctagatattgtacctagacaaaatatcattggttctatctctttttgtatctgttgtgccagggaaggtttataatcccttctcagtatacactcactagtgcacgtctgaaatagtatcccacgggagatgctgctccacgtctgaggtcacctgccctgtgtggggcacaccaccgtcagcaccaccgtttttacagttactttggagctgctagactggttttctgtgttggtaaattgcctatataaatctgaataaaaaggatctgtacaaaaaaaaaaaaaaa

SEQ ID NO: 611 - DNA, 4372 bp, Homo sapiens
acagctggctgcctcacccgcaggctgcagggagaccttccccagcctgcagccccaggcccgccccgcgtcacatgagccccagggctcccaccccctccccagggcagaggacacccagttggtggccgggagggcctcggctttccagggacagaggcccaactccaggacgccccagctggcccagcccctcctctttccctcaaggctgcaggaggtcgggaaaggcagtcctggtagaggcctgtcctgggctccaggttggcccctgagggtggccctcctcatgccggcttcaagactgagggacagggcagccagttcagcctcgggatccacctgtggctccatgtcccagacgcaccctgtgctggagagcggcctcctggcatctgccggctgctccgcaccccggggtcccaggaagggcggcccagccccagtggacaggaaagctaaggcctcagcgatgccggactccccagcggaggtgaagacgcagccccggtccacaccccccagcatgccgcccccaccgcctgccgcatcccagggggccacacgccccccctccttcacgccacacacacatcgagaggacgggcctgcgacgctgccccacggccgttttcatggctgcttaaaatggtctatggtctgtctcttgatgaacggcagcagccactcaccaacagccatcaatggtgcaccgtgcacacccaacggcttcagcaatggcccggccacctcgtccacagcctccttgtccacacagcacctgcccccagcctgcggggcccggcagctcagcaagctcaagcgcttcctcaccacactgcagcagtttggcagcgacatctccccagagattggggagcgcgtgcgcacactggtgctgggcctggtgaactcgacattgacgatcgaggagtttcattccaagcttcaggaggccaccaacttccctctgcggccgtttgtcattcccttcctgaaggcaaacctgcccttgctgcagcgggagctcctgcactgtgcacgcctggccaagcagacgcccgcccagtacttggcccagcatgagcagctcctgctggacgccagcgcctcctcccccatcgactcctcagagctgctactggaagtcaacgagaacggcaagaggaggacgcccgacaggaccaaagagaacgggtcagaccgcgacccgctgcaccccgagcacctcagcaaacggccatgcaccctgaaccctgcccagcgctacagccccagcaacgggccaccgcagcccacaccgccgccgcactaccgcctggaggacatagccatggcccaccacttccgagatgcctaccgccacccagacccccgggagctacgagagcgccatcggccgcttgtggtgcctgggtcccggcaggaagaagtgatcgaccacaagctcacagagcgtgagtgggcagaagagtggaagcacctcaacaacctcctgaactgcatcatggacatggtggagaagacgcggcgctcgctcacggtgctgcgcaggtgccaggaggccgaccgcgaggagctcaaccactgggcgcggcgctacagcgacgccgaggacacaaagaagggccccgctcccgccgcggcccggccccgcagcagctccgccggtcccgaagggcctcagctagacgtgcctcgcgagttcctgccgaggaccctcaccggctacgtgcctgaggacatctggaggaaggctgaagaggccgtgaatgaggtgaagcggcaggccatgtcggagctgcagaaagccgtgtcggacgcggagcgcaaagcgcacgagctcatcaccacggagcgtgccaagatggagcgggccctggccgaggcgaagcggcaggcctccgaggacgccctgacggtcatcaaccagcaggaggactccagcgagagctgctggaactgcgggcggaaagccagtgagacgtgcagcggctgcaacgcggcacgctactgcgggtccttctgccagcatcgggactgggagaagcatcaccacgtgtgtggccagagcctgcagggccccacagccgtggtggccgacccggtgcctggaccgcccgaagccgcccacagcctgggcccctccctgcctgtgggtgctgccagccccagcgaagccggctctgcggggccttctcgccccggctcccccagcccacctggcccactggacaccgtgccccgctgaccccactggcccctggcctgccggacacagcaccgtgccaaccccacccagctccaggcccaccggatgctgtgcctggcctccgatgcctggcctgccagacactgcgccccgcctgacctgggggagccgaccaattagtcactgctgctactgcccctctccgaaagaagacacagaaccaacaaaaccgcattcagtgcacctgcctcagctacctaatgattccgcgcggagacctcctgacaacgtctcttcaagcatcctcagaagcctcgactgagctttagacagcagagcagatgccgcaggcgcggcggctctgcccacctctcttttcctctctgtctgtctctccccctctgtcttctctatcctctctctctctatgactatcacacactttctcttcaatgaaaaaatcgaattggtggcttatattttcagcaaagaattttggggggttttgtgtgttggcaaaagagctactcagaaatggacaaagaaaacgggggggttctccccctcctgattaaaaagggagaaagaaaactgcgattttatagctggagatctgaacccagctgtgcccctcccccaggggcgtgaggctgatcagcgaagacgggaggaaagatttcgatttctgactcaagatgcatttttggtttcagatttttttttcctgtaatgttaaactctttggctttaagtaaaaatccaaaaagtttttttaaaaaagcaaaggaagcatacttgtgaactaccttgctagctagccagccaaggataccggacacacctctgctccaaaggaaatccaaaaaagcaaacacaagaaatcaaaatccaaaatttgtttgtcactgccaaagtatttttttcactgtttcacttgctcttgggtttgtttggatgtgggtctttttctcttctgttctgattttgtttgtgggtgtcgggatatttgggtgcagagggtttgtgcccagttagaagcgacttttgttctcttctgcgtaggcgttggtgcgtccgccgcgtgtgcgtggtccgtgtgccgttgctccggcctgcgtctccatatgtgtaggaaaggacacgccgtctgtcctcacgccccctgtgacttttcatatttccgttttccacttgtggaaaaaaagtgctaaagttttcttcccagagagagcataattccgaaacaaaactgtgacaatcttttgggttgattctcgactgcttttcgagcatgcggagccagcaggcctccctgaaacactgcttctcggccagcccgtcctcctctacctctctcctctccgcgccctccgacctctctcggccccctcaccccagctccgacctctctcagccccatcgccccaactccaacctctcggccccatcgccccaccgcagctactcccctttcttccaaacttttgcagaaaaaacaaaaaaactacaaacaaaagcagccctctgcctcctccccagggaagaccctgaccgtgtacatagccctggtgctcctgcccagccacccctcagatgcgttcgcctctggccctggggtgtgtctcggtgacgttttctatcagacgtgctccctcccatcctccagccctgcccaccctccctccactcctctcaactgcctcagcgatttcaagaaggaaataaagggataaagaaattcatgcttgcaccgagtacaaggacagacagcaggcacggcccgcagcctggcatctgtgcgtgtggcgtggcccgtggcttggcatctgtgtgcgtggtgtggcccgtggcctggcatctgtgtgcgtggcgtggcccgtggcctggcatctgtgtgtgtggcgtggcccgtggcctggcatctgtgcgcgtggcgtggcccgtggcctggcatctgtgtgcgtggctatcaggagttctaggaactcagtgcaatacgggagtgacccagctactgaaccagccacgaacagcccgccagaggcctgaagctgagcgtgtacgttaatgtgaatgtatatagtctttgcagaggtccaaatgatattcatgatggtaataaacgagatgtttgccaaataaaaaacagaaaccgcagga

SEQ ID NO: 612 - DNA, 11241 bp, Homo sapiens
tccgcccggatagccggcggcggcggcggcggcggcggcggcggcggccgggagaggcccctccttcacgccctgcttctctccctcgctcgcagtcgagccgagccggcggacccgcctgggctccgaccctgcccaggccatggccggcaacgtgaagaagagctctggggccgggggcggcagcggctccgggggctcgggttcgggtggcctgattgggctcatgaaggacgccttccagccgcaccaccaccaccaccaccacctcagcccccacccgccggggacggtggacaagaagatggtggagaagtgctggaagctcatggacaaggtggtgcggttgtgtcagaacccaaagctggcgctaaagaatagcccaccttatatcttagacctgctaccagatacctaccagcatctccgtactatcttgtcaagatatgaggggaagatggagacacttggagaaaatgagtattttagggtgtttatggagaatttgatgaagaaaactaagcaaaccataagcctcttcaaggagggaaaagaaagaatgtatgaggagaattctcagcctaggcgaaacctaaccaaactgtccctcatcttcagccacatgctggcagaactaaaaggaatctttccaagtggactctttcagggagacacatttcggattactaaagcagatgctgcggaattttggagaaaagcttttggggaaaagacaatagtcccttggaagagctttcgacaggctctacatgaagtgcatcccatcagttctgggctggaggccatggctctgaaatccactattgatctgacctgcaatgattatatttcggtttttgaatttgacatctttacccgactctttcagccctggtcctctttgctcaggaattggaacagccttgctgtaactcatcctggctacatggcttttttgacgtatgacgaagtgaaagctcggctccagaaattcattcacaaacctggcagttatatcttccggctgagctgtactcgtctgggtcagtgggctattgggtatgttactgctgatgggaacattctccagacaatccctcacaataaacctctcttccaagcactgattgatggcttcagggaaggcttctatttgtttcctgatggacgaaatcagaatcctgatctgactggcttatgtgaaccaactccccaagaccatatcaaagtgacccaggaacaatatgaattatactgtgagatgggctccacattccaactatgtaaaatatgtgctgaaaatgataaggatgtaaagattgagccctgtggacacctcatgtgcacatcctgtcttacatcctggcaggaatcagaaggtcagggctgtcctttctgccgatgtgaaattaaaggtactgaacccatcgtggtagatccgtttgatcctagagggagtggcagcctgttgaggcaaggagcagagggagctccctccccaaattatgatgatgatgatgatgaacgagctgatgatactctcttcatgatgaaggaattggctggtgccaaggtggaacggccgccttctccattctccatggccccacaagcttcccttcccccggtgccaccacgacttgaccttctgccgcagcgagtatgtgttccctcaagtgcttctgctcttggaactgcttctaaggctgcttctggctcccttcataaagacaaaccattgccagtacctcccacacttcgagatcttccaccaccaccgcctccagaccggccatattctgttggagcagaatcccgacctcaaagacgccccttgccttgtacaccaggcgactgtccctccagagacaaactgccccctgtcccctctagccgccttggagactcatggctgccccggccaatccccaaagtaccagtatctgccccaagttccagtgatccctggacaggaagagaattaaccaaccggcactcacttccattttcattgccctcacaaatggagcccagaccagatgtgcctaggctcggaagcacgttcagtctggatacctccatgagtatgaatagcagcccattagtaggtccagagtgtgaccaccccaaaatcaaaccttcctcatctgccaatgccatttattctctggctgccagacctcttcctgtgccaaaactgccacctggggagcaatgtgagggtgaagaggacacagagtacatgactccctcttccaggcctctacggcctttggatacatcccagagttcacgagcatgtgattgcgaccagcagattgatagctgtacgtatgaagcaatgtataatattcagtcccaggcgccatctatcaccgagagcagcacctttggtgaagggaatttggccgcagcccatgccaacactggtcccgaggagtcagaaaatgaggatgatgggtatgatgtcccaaagccacctgtgccggccgtgctggcccgccgaactctctcagatatctctaatgccagctcctcctttggctggttgtctctggatggtgatcctacaacaaatgtcactgaaggttcccaagttcccgagaggcctccaaaaccattcccgcggagaatcaactctgaacggaaagctggcagctgtcagcaaggtagtggtcctgccgcctctgctgccaccgcctcacctcagctctccagtgagatcgagaacctcatgagtcaggggtactcctaccaggacatccagaaagctttggtcattgcccagaacaacatcgagatggccaaaaacatcctccgggaatttgtttccatttcttctcctgcccatgtagctacctagcacaccatctccctgctgcaggtttagaggaccagtgagttgggagttattactcaagtggcacctagaagggcaggagttcctttggtgacttcacagtgaagtcttgccctctctgtgggatatcacatcagtggttccaagatttcaaagtggtgaaatgaaaatggagcagctagtatgttttattattttatgggtcttgagtgcatttgaaggtgtccttcagttcccacgtagagagagtgtggattatattacatgataacctacctggggaacagtccagaaagctatagaacaagtattttgctggaaatcctaattgaggacttaagacttcctgggttaaggatgtggccgtgtgtgtgtgtgtctgcctgtggttgtatgtgtccttgtgattataagattaacctgctgtgtgtgttaattccaggcagggaattagcacaaaaggtttaggaaggaatctttttttaaagacttccatctactgtggtattatacccaagcctagtgtgtattacaacttcaacactcccctttggcttatattaccatgtgcatagctaaagtcttctatttttagaacaccttctgtctgttctttccccatcaactccttcctcatccttcttggtgttctgtcatgggccatgggcttgctatggccagccttactgaggccaagcagcttatgggatgttctttattgtgtgtgatggtattggtttgtttggtagataagtgggaggaaaagtactgttgctacactattataggcatgtttgatactagcagctaacactggtcactccaaagcactgtttctataggaacattgaagctattaagatgttttgattatcctaattacataatgaccgatttgagatagaggcctttaaatacattccatgccctccccagaaaatagtctgtgggagtcagttgccttggtgccaggtatgtgttctgatgtaggtcatgagtctttctacttaatgggaagggaagaacatttgtttccaggatgactttctggccagaataccggaaagcttttaggaagcttcgttcacatgctatttaaatgcacaaaatagacagtaaggatttatctgttcagtttttcttcccagtgaattaatttcagcttatatgggtgtcttcatttgaacatgaggaatattaggttatattttcagcagtggttttttcctttgccctttaaggagtggggataatgtccacggtggcccagcctcttgctgatggcaccttccctgcattgctgcctcccgatgatgtggttcttttcttgtgcctgtggctttgggaatgtaacatctctttcctcctttccttcccttttcctcttcacctgaggtcctaaatactctctgtaattactgtgttcttcacggtaattagacatcattcagtgaataaattactgtagtcaaagacagtatgggctggcagtttgtgtaattgcaagttcataaagagaattgagggtccagttgggagaactattagtcagttcttttatatgctgataaatgatccctcgagttcagttagtattctgtccagagtgtttagctcactttcttagcagtgtgtaagctttctccatgtcagaagcaagcctgctctttgataaatctgtcttcctgaaaatctaaatcatgcttttgtctttagatctacacagaaatgaccctccttggatcagttttctttccagtctaatcatctttggaactaaaacttgttctaactcgtctcttggcattcagctactcctagatcttttggttttatcccctggcctcagagccatttatattcccagagtaggcagtacaggatctcgtgttgatttgctgtggttacccagtgtcttctctacatggcataaagcggcaaagcccaccattaggtgaggcggtcccgagttgaggtagagtggggcagaggaagatggcagtgaatatcaaacagtagaccgccatcaacttctaacagccagtacacacactgtttcattttgaggtaacgttcagttttgcattttgtttaaatattgaaggcctagacaaagaactagaaaaaaaaaagcagtttccaggcccatccatattgtaatttttctttatctgcagatattgcctgtagtctaaagatctctttggaagacaaagcattggctatatatcttttgccttttccatgcatctaaatcttctctggagattatctccctactgtgtaggttaagggcagtctcgacttttccttttttgagtcctgtgtggctctttgaatcagcgtgaaactgaggctccagctccctgtgttgtgtgtgtgtgccatccatgggcttgggtgtcagtttgtcacaggtatctgccagcattcaaggttttggatcatttcatgaggatctttcctttgactgggtgctgtgaggacacacctgggtctgtgcctgagattgccaggcaagattaaggaaagttttcatgtggcttttgttttgaggttattctcaaaaccttaatttcttatattttctgttgactaaggcaccagtaacccattcttcaccctccatttgtatggcaatttaaaagtctttggctttgctctgaatttaattaaaactgccttttatgaacagacttcgagttttgccattttgggcaagcccttccgcttgtcccttcctagtggctaataaagtaaaaaaacccacactactttgttctctttttctcatattcattgggctgttgtattcagccagtctcatgctttccctgggtcttcacggattgctttccaagctgccttgttgcggggttgctgcagagcagcaactggacctttccagctgtcgccatgttccttccactaaagtagagggttcttaaaatggaaaaacctgtgggctcttcatatacctccctttagttaagtaatagaccaggcagcttctcatctcagcatttacctgttaatatttttgtgaatagtgctctctacctgtgggtggccgttctcttccacttgctcgtctccccccagccccattctgcataatctaccattcttctcctctctttctcttcttatacagaccctcattactggggcccaagatgtgggatactactgttagtattatttaactattttgtagatttaaaagatttctggttaagggaggtgggggtcactgttcatcactcttaaaatatgtgttttctctatagaaaagtaaaatgtgtttatggtcccaaacagtcaactcacaaatttttataacaaaatttccttgtaaaaactagggaccatctatatattccctttaagatctagttctttttgtaggtgttcagcaatggtgataaagcagaatattctcctacctcacgtcattaaagtcagaagattatagaccttctcaaactataagtccctcttcttgccgttggcctttctgactctggaatgaccactgttcattgaaaaatagttttctgactattggtctggctctaacagtttgtttgttcatccagcaaatgtttatgagtgatgaccatgtgccagaaatgtcaggtatgtgtccttcccttggcgccacatagtagtttactaatgtttgggggattgtacttggactgtcatagcctctgcgtttgaccttaaaatagctcttcccagtaagattgtgcaatttttattcacagctcttccatgtagacttacctttcctcatagagctatcctggttaataacaggccaagattctcccattatcccctgttgtctcctgtagctttgataatgcctgggagattccttggtgtaagtgtcatggataccgactgtttttatgttggaatttgttccaacataattagaatctgtttggtgagttgaaaggtaagttggctcagagttgcacagtagggcattaaatgtttaagcaaagcatctgcccacactcccctttccaatctagtgccttccttgaactttttcctgagctgctacgtccctaatcccccttgttgggaggattttcgtatcacccttatgggacctgtcaccatgtcctgtactatttggaattggttttccagtctttcaacaaccgttgtggctaactatgttttagaagggctggaggtgtgggccctgtcttcgggtctcaggacccaaagatcctttagtcagttgttgggtcttccaagagccagacattaatacagattgaactccatcagtcccctaattgtcagcctttacctccctcccagagcaaggagtttagggattctaaagcttagtgtccacacatcattctaccagaccttagagctttagaagctcaatctaaaatactgtaactcagcataaactattactatcactcctttgaactcagtctccatgagcagtgttttgttggaaatacatagaacggcttaatgcctagagggtggtggatagtgaaggacggtcaaggttatatttttgactgcttagggattctttggatccaagaaacagaaatgttcaagcggaataaaggagggagtggagttgtggtaaggatgcagggtatttcgcagaacccaggacgggaagtgcctttggttcttgggtggagctggaactgcagagctttgcacctagtcctttctcccgcttcacagtctgcttatggtatatgtggcccccaaataggcactctagtcctcaagtctacaccaccttccaactctggggatcaccatgaacaaattctcaatttcccatacttaattttttttttttttgagatggagtctcgctgtgtcgcccaggctggagtgcagtggtgcagtctcaactcaccacaacctctgcctcccaggttcaagcagttctctgcctcaacctcccgagtagctgggattacaggcgcctgccaccatgcccagctaatgttcatatttttagtagagacagggtttcaccgtcttggctaggctggtcttgaactcctgaccctcatgatccacccacctcggcctcccaaagtgctaagattacaggcgtgagccaccgcgcccggcccatacttcgtattcttaaaaaaaactacactcagcccagcacattgatcaagtatctatctctgagcagttggccttgccagggagagcagagatgtggcaggctccttcagctggagacagggagcttctcagagaagtgagcagagactccacagacaccctaaaaaggcttctactcaagaagtaaagccactactcctgcctttttgcttagtggacaggaaggcacaggagtttgtctgggacatcatagaaattcttaggtttaacttaattctggtcattgtcttctttatttcctgtttttcttccctttgtcagtcttcgcatccaagatttcttccctccctcttgtgggccagcctgtcctgttccagagctagcctgttcctgggtagccttccttagcctccattcagcctcaggtcttttgccttcttccgtgtttatttagagagcagaatctaataacgggttccactgtagccactatccatggacttctgggtcctcttcaggtttgagtgcttgaaaatgttcattctctgggcttgtggcctgtctcctccactctcctcctcaccctctcgctccttcctgtgtgagggccgctctgcagtaatgttctcaggcaagccttcctaggcacctcagaaactactttgccagagccagtaagaatatataatattggagcagttgccaggatagaaattaaatatagattccagtttaggatagagtttttaccgagagctctttagacagtatacctgtgtcttctctggcaattgctttcattttagtcctatataaaagctttccttttctgtttttttttaaaactatgcttttgcttgcctaaatcttttgatcttatatttctctcatctcagagcctgtcctgagttgtaaggtatttcatactgccttacttaaaagttttttaaactactagagtcatttgatacacacagaagttacctaataatccaaagatgtccatcaagggaggaagggtgggtcatcagactttgcctttgatgttgtagactaggctcctgagttaagcagcagagggacagcagtgccatgtgccttcactgtgtcccaggaaatctgggttggttccagtgggaaataccagtatttcttggttctggaaagtagcaaaagagtaggagatggggaaatagggatggggagagcaagccccgcatgtccatggcgagtcaggtggggagcacgggtggaagggccggctgttgacagacagactaagctgtgtggtgctcttgccgccccttcctgggtacagagcttgagaaaaatgcagccgaccactccctgtgtttgtacagagcaaagcccaaaagccaacctcagatctcctgatttggcagctgaagaaatcagcagagtcctgattgcctgattcagtcccaaaaatgaatgtcaggccccgccccctccccaccaacattgcctctcctacattctccttctgcccctaaatcagacaggaggccagagaggagtattgctcaatgcgtgctatgtgcaactcctcaggccttgtgccacctccatgctgagccctgaagcagggtgtcctgggtgcctgtgtgtcagctccctcctctctacctacctctgaccttcttgtgggtgagggtggccatgcttatggccatcttaaaactggagaggcagagaactacttatgagtctgtagaccacgtgttgtcttccatggcctgtttctcctgctgtctgggtgagtgagcctgcaacgcaatgcccatgagagtaaatgcctcctgacctaccctgctcagcactgttctagtgtcttggccttgaaagaaaagcctgacttcctgctgacacatgtggtaggggcatggcagctatgaggcacctcctacgtctgttttctggctgtggtgacttgggatttttaaccttatatatctttttcctttactcaaaacaaaacaatttttagcacactgaaaaaaaaaaaaagccaaatgttttgtgcctttctaaggcagcactgtatcccaggctgcattttaggacttaatatggaaataccagagtctgagctcctctaccttgagtttcattagtccttagtgtctaggagacaggaaagaatgctctctgtgactggagaggtgacatgcaggtgcagtgtgtctggagtccctttcccctgctgtgagacttcagtggaggagagaagcattgtaccctgggatcatttggttggttccaatcacaagcttagttatcaggttgcatgccttgtctcctgcaaaagacagaatgtttcacaattcccaggtaaactctggaccattccaagtgtcctagccttctgatgacattaattacctagttgtgtcgaggagtataggatggactctcctgagaaggggaggttggtggctttgtcttttctttttgctggatcctgaactggtctagacctcctgcccccaccccccagcccccatcagatgtggctggcctttcatttgaaggcttcagacttaaagcattaagcagctagtgccctctgcagggcctggtttccccagggaagggcagcaaggaacatgggaccagaagcctgtcctcagtaatgtgactatagtgagctttagcaaaagtttttctatataatgacatcttacttatcttttaccctttcctcagttttcccctgcctttaactaataaagaattgggagacagaaattttaaagtcctccttattcaagattttgaaattcttagcctgggagtgctggagagaacctgatgctttctccagaatgaagagtcccaatttgtatatcagtgttaagaagaaaacaaaacaaacacataggtgagattttcgtggactattttaaaaatgtgtcattaatataaaaaatttatattagcagtatttaatcattctcacctgtaaagaataagaaaaacagaaggtaaatattcttacagagaatagcagagctttaagattcattttcattttaagtccattttattttgccagtgtattaatgtttagaagtctgttttactaatgttatttattaattttttttcatttccatacacagttagttaactaaagagctttttcaagcacccatgtctgtaaaaaaatatttttaaataaagtttcttttgttgtagcagaaaaaaaaaaa

SEQ ID NO: 613 - DNA, 4265 bp, Homo sapiens
ggcggtccgggcgggtgactggcggcgggcgccgcggtcgggctggctgccgggcagcatggaggagctgagcagcgtgggcgagcaggtcttcgccgccgagtgcatcctgagcaagcggctccgcaagggcaagctggagtacctggtcaagtggcgcggctggtcctccaaacataacagctgggagccggaggagaacatcctggacccgaggctgctcctggccttccagaagaaggaacatgagaaggaggtgcagaaccggaagagaggcaagaggccgagaggccggccaaggaagctcactgccatgtcctcctgcagccggcgctccaagctcaaggaacccgatgctccctccaaatccaagtccagcagttcctcctcttcctccacgtcatcctcctcttcctcagatgaagaggatgacagtgacttagatgctaagaggggtccccggggccgcgagacccacccagtgccgcagaagaaggcccagatcctggtggccaaacccgagctgaaggatcccatccggaagaagcggggacgaaagcccctgcccccagagcaaaaggcaacccgaagacccgtgagcctggccaaggtgctgaagaccgcccggaaggatctgggggccccggccagcaagctgccccctccactcagcgcccccgttgcaggcctggcagctctgaaggcccacgccaaggaggcctgtggcggccccagtgccatggccaccccagagaacctggccagcctaatgaagggcatggccagtagccccggccggggtggcatcagctggcagagctccatcgtgcactacatgaaccggatgacccagagccaggcccaggctgccagcaggttggcgctgaaggcccaggccaccaacaagtgcggcctcgggctggacctgaaggtgaggacgcagaaaggggagctgggaatgagccctccaggaagcaaaatcccgaaggcccccagcggtggggctgtggagcagaaagtggggaacacagggggccccccgcacacccatggtgccagcagggtgcctgctgggtgcccaggcccccagccagcacccacccaggagctgagcctccaggtcttggacttgcagagtgtcaagaatggcatgcccggggtgggtctccttgcccgccacgccaccgccaccaagggtgtcccggccaccaacccagcccctgggaagggcactgggagtggcctcattggggccagcggggccaccatgcccaccgacacaagcaaaagtgagaagctggcttccagagcagtggcgccacccacccctgccagcaagagggactgtgtcaagggcagtgctacccccagtgggcaggagagccgcacagcccccggagaagcccgcaaggcggccacactgccagagatgagcgcaggtgaggagagtagcagctcggactccgaccccgactccgcctcgccgcccagcactggacagaacccgtcagtgtccgttcagaccagccaggactggaagcccacccgcagcctcatcgagcacgtatttgtcaccgacgtcactgccaacctcatcaccgtcacagtgaaggagtctcccaccagcgtgggcttcttcaacctgaggcattactgaagccccggcgccaccagctgcgcggtcttactccccttccctgcctatggtgtcgcttggctaagtgactcccagcccaagccccctcaagagtctgggtcgggggaggaggagtgggtggcctccttgatgggcaggcttggaagggacttctcccgcaccccactctgtcccaggacatagggcagggggcctcactgccttgttggtctccaccttgttcctacctctgcaggcctctttgctctcccctcttgcctcaggaaacccggtggcacctgtggctccaggtgactgtcttgaacagagcgggcttcttcatggctgcgttgttgctgagtttgaactgctcctccctggcctgcgtgactgaatcacagctttggtccctgtcttgcaggggctgaggtgtcaggaggggacttctggcccaccttgccttcagccctggagtgggcagagagtattgtggggaggcatggccagtgggactagtgttccctccatctggccacagcttttgggagatggggtgggcaggggtggtcctggctggcattgcctgagccggcagtgatgaagtggggagcttgcccttgacaggtgggggctggctggggccttaatgtgaaaagacagtggcaggcagctggagtagagcgagcccagcagccctaaaaggctgccttcatggccatctagccccagttcagggcagcatccatagcccacaagccagcgtgggtggggcgggggtggtcccacagctgggttccacctgaagagcctccgtgcctcggagcaggagaggcaggctatggctgccaccctccctcctgcctgtgtcccagtgagaactgacctgagtccccttccaaacccagacccacctcctgccccaggcccactgaagcatgttccatttctaaaaagcccagagttcagtgtgtcccaaggaaaacccaaagtggaggtgctcaggtccaggggagtccagtgggcaggacccttggcaggcaagcccctcccttcactcccaggacctaccttctgctagtaaaggactggcttcattctaattatggcccacagactgccccggagacctggaggacagcagtgctggcacttgggtgtccatgggcccgtctgccggctctgcctgtgctgcaagtgttggccgtgggtccagccaacaactccctacgtcctgtgtggggccctgcccaagtggatgaggcattccttgaggagtatcattttccctgacaatccccatcacctttaggggttccctgcttggctcctttccagctgaaaaactagacctgtgccattggggaagctggacaaagtctagggggcccgcctggtagagggtcccgggaagctggatctgtcagcctcggccctgaggcccctgttaactcaagactgtgagctgcctctaggtggtcacgtctgggagctagcttgtatggcttctgaccagtatcaggatttctgttctgagagcagcgtgggcagcaaggcagggcagcccagaggtggcagcggcaggcaatctggtcactaggtctttgtgatgccaaaaataaaagagggtggggtgggtgctttctgttcctctgattggatggagtccgccagcaggcatggggctacattccagtgcctgactatagggaggcactcctgattccatggagcagcccggactttgagaatgggctctggtttgcggggggcaggcgtaccagactgcaagaccccccagtacctcaccgtgccaaataggaagaggtggccttggtgtagccaaatggatctttttaacagtgtgcctttggggagggacccatgtccatggcttcgttgagggccatccatatgccagctgggggccagcccacagtggccatattggctgcagcaggaatggtgcccacctcggcgaattgaagggctaagagtcccagatagctaggccagagctggaagcagacagtaaggggaagagctgctcccacaggagagggagagattccagctcactgcgcagcctgggaggaggcgtggatcctggcacgctgagcctcaggcaccagcctccctgtgctcgacagcaaagtcttgactccttcctgctgagcactgtgctaccttcactgctccaaagccagactaacagctctccaagcccttggggtgactcggcttccaggagctgttggagaaatgaggatgtctgtccctgtctgcctgggcaggccagattcctccccagcagccgggtctctccagaccctgattcggtgcctttctgtttaccagctacttcaatcccaaagtttgaatctgcagataccttactcccagccactttgccttcttactgtgttgtgtgtttttcctggtgcttcaagagcgtgtgcagggcaagtgccgtcactgggaactgcaccagatgctcagacttggttgtcttatgtttaccaataaataaaagtagactttttctatttttatttgctgctatttgtgtgtgtgtttgtgtttgtgtagctaggtatctggcacttctgacgatgcattgttgcttttttcc

SEQ ID NO: 614 - DNA, 1269 bp, Homo sapiens
aggtgacagcctcgcttggacgcagagcccggcccgacgccgccatgagcgccgcgctcttcagcctggacggcccggcgcgcggcgcgccctggcctgcggagcctgcgcccttctacgaaccgggccgggcgggcaagccgggccgcggggccgagccaggggccctaggcgagccaggcgccgccgcccccgccatgtacgacgacgagagcgccatcgacttcagcgcctacatcgactccatggccgccgtgcccaccctggagctgtgccacgacgagctcttcgccgacctcttcaacagcaatcacaaggcgggcggcgcggggcccctggagcttcttcccggcggccccgcgcgccccttgggcccgggccctgccgctccccgcctgctcaagcgcgagcccgactggggcgacggcgacgcgcccggctcgctgttgcccgcgcaggtggccgcgtgcgcacagaccgtggtgagcttggcggccgcagggcagcccaccccgcccacgtcgccggagccgccgcgcagcagccccaggcagacccccgcgcccggccccgcccgggagaagagcgccggcaagaggggcccggaccgcggcagccccgagtaccggcagcggcgcgagcgcaacaacatcgccgtgcgcaagagccgcgacaaggccaagcggcgcaaccaggagatgcagcagaagttggtggagctgtcggctgagaacgagaagctgcaccagcgcgtggagcagctcacgcgggacctggccggcctccggcagttcttcaagcagctgcccagcccgcccttcctgccggccgccgggacagcagactgccggtaacgcgcggccggggcgggagagactcagcaacgacccatacctcagacccgacggcccggagcggagcgcgccctgccctggcgcagccagagccgccgggtgcccgctgcagtttcttgggacataggagcgcaaagaagctacagcctggacttaccaccactaaactgcgagagaagctaaacgtgtttattttcccttaaattatttttgtaatggtagctttttctacatcttactcctgttgatgcagctaaggtacatttgtaaaaagaaaaaaaaccagacttttcagacaaaccctttgtattgtagataagaggaaaagactgagcatgctcacttttttatattaatttttacagtatttgtaagaataaagcagcatttgaaatcgaaaaaaaaaaaaaaaaaa

SEQ ID NO: 615 - DNA, 2823 bp, Homo sapiens
acgcggacgcggctggcggctcggtttctgcaaatgcgtgaatgagccggatgccagcctctgtcccctggagcccagcgtgaggaagaggcatgccccatcagccttcagcttgagcccggcggcccccgcccccgccccctgccaccctgcactgccccggctcccccgcggcccccacgctgcagtgcggccgggccccctccccgcaggggccgcccccgccgcccacccctagcgcccgtggtggtggtggtggtggtggtggtggtggcccgggccgcagggccatgaaactacaggccgtgatggagacgctgttgcagcggcagcagcgggcgcgccaggagctggaggcccggcagcagctgccccccgatccccctgctgcaccccccggccgggcccgggctgcccccgacgaggacagagagcccgagagtgcccggatgcagcgggctcagatggccgcactggcagccatgcgggctgcagctgcgggcctgggacacccagccagccccggcggctctgaggatgggcccccaggctcggaggaggaggacgcggcccgggaggggacaccgggctcacccgggcgaggcagagaagggccaggagaggagcactttgaggacatggcctccgacgaggacatgaagcccaaatgggaggaggaggagatggaggaagacctcggggaggatgaggaggaggaggaggaggattacgaggatgaggaggaggaggaggacgaggaggggctgggccccccaggccctgccagcttgggcaccacggcactgttcccccgaaaggcccagccaccccaggccttccgcggcgatggcgttcccagggtgctggggggccaggagcggccggggcctggccctgcccaccccggaggggccgcccacgtagccccgcagctgcagccgcctgaccacggcgactggacttacgaggagcagtttaagcagctctacgaactcgacggggaccccaagaggaaggaattcctggatgacttgttcagcttcatgcagaagcgagggacacctgtgaaccgcatccccatcatggccaaacaggtccttgacctgttcatgctgtacgtgctggtgacggagaagggcggcctcgtggaggtcatcaacaagaagctgtggcgtgagatcaccaagggcctcaacctgcccacgtccatcaccagtgcagccttcaccctgcggacccaatacatgaagtacctgtacccctacgagtgtgagaagcggggcctcagtaaccccaatgagctccaggcagccatagacagcaaccgacgggagggccggcgccagagctttggtggctccctctttgcctactcgccaggcggggcacacggcatgctctcctcacccaagctacccgtgtcctccctgggcctggccgcaagcaccaatggcagctccatcacccccgcccctaagatcaagaaagaggaggactcagccatccccatcacagtccctggccgcctgcctgtgtccctggcgggccaccctgtggtggcagcccaggcagcagctgtgcaagcagcagccgcccaagcagctgtggccgcacaggcagctgccctggaacagctgcgggagaagctggagtctgcagagcctccggagaagaagatggccctggtggccgatgagcagcaacggctgatgcaacgtgcactccagcagaacttcctggccatggcggcccagctgcccatgagcattcggatcaacagccaagcctccgaaagccgccaggactctgctgtgaacctgacgggcaccaacggcagcaacagcatcagcatgtcggtggagatcaacggcatcatgtacacaggagttctgtttgctcagccgccggcccccacgccaacctctgctcccaacaaaggaggcggcggcggcggcggcagcagcagcaacgcaggcggccggggaggaaacaccggaaccagcggcggccaggctgggccagcggggctgtccacaccctccacatctacctcaaataactcgttgccttaaccgcatcactccccacccgccacccaccctggagcccgccggcctgggcagggggtccaggtgggccacacaggggccaggatggcggaagatacgggtggggagggaagatatccagaaaggagccacagctgacgccaaaaagaaaagaaaaaagatatatatatatatatatatatatacacgtatatatataaagagaatttaataaaacaggggaaaaccaaggaacacttgaatttctcaggttttggacattcagagagatgaattgtgagaacagcaaagaaatccatcagaaaaacagaaagaggcagacgtttcccagggcgttcaggcagccctgatggaccgaaggctctggtgtctggtttggccccacagcagtgtgggccgatcctgtttacctcatacatccctgcactgtgtgttttcatttttgtctgctttagttctcttttattttctattcaccacacactcaccactcccagcttctcgtgtccagtgaaacccctgaaccaagatcactgaatttttgtttttttcttgttgctttgggaaatttttttttctctgtagggtttttaagaggtttcgggggttttgttgtgtaaatattctattttattcttggggggatcaaaccttaggaaaaggatatctatatatctatatagctatatatttgtgttccttcagggaaactggtcttgaaaaagcaagaaaaaaaagcaaaaaaaaaaaaaaa

SEQ ID NO: 616 - DNA, 5837 bp, Homo sapiens
cccgctctgcttcagcgcacgctgaagacggcactaggacccagggaagtccccgagcggggttcgcggaaaggcagccagactcctccttatctccagtgtcaaacttgacatcagcctgcgagcggagcatggtaacttctccagcaatcagagcgctccccctcacatcagtggcatgcttcatggagatatgctcctctcactgccctctgcaccagcaacatggattgtcagctctccatcctcctccttctcagctgctctgttctcgacagcttcggggaactgattccgcagccttccaatgaagtcaatctactggattcaaaaacaattcaaggggagctgggctggatctcttatccatcacatgggtgggaagagatcagtggtgtggatgaacattacacacccatcaggacttaccaggtgtgcaatgtcatggaccacagtcaaaacaattggctgagaacaaactgggtccccaggaactcagctcagaagatttatgtggagctcaagttcactctacgagactgcaatagcattccattggttttaggaacttgcaaggagacattcaacctgtactacatggagtctgatgatgatcatggggtgaaatttcgagagcatcagtttacaaagattgacaccattgcagctgatgaaagtttcactcaaatggatcttggggaccgtattctgaagctcaacactgagattagagaagtaggtcctgtcaacaagaagggattttatttggcatttcaagatgttggtgcttgtgttgccttggtgtctgtgagagtatacttcaaaaagtgcccatttacagtgaagaatctggctatgtttccagacacggtacccatggactcccagtccctggtggaggttagagggtcttgtgtcaacaattctaaggaggaagatcctccaaggatgtactgcagtacagaaggcgaatggcttgtacccattggcaagtgttcctgcaatgctggctatgaagaaagaggttttatgtgccaagcttgtcgaccaggtttctacaaggcattggatggtaatatgaagtgtgctaagtgcccgcctcacagttctactcaggaagatggttcaatgaactgcaggtgtgagaataattacttccgggcagacaaagaccctccatccatggcttgtacccgacctccatcttcaccaagaaatgttatctctaatataaacgagacctcagttatcctggactggagttggcccctggacacaggaggccggaaagatgttaccttcaacatcatatgtaaaaaatgtgggtggaatataaaacagtgtgagccatgcagcccaaatgtccgcttcctccctcgacagtttggactcaccaacaccacggtgacagtgacagaccttctggcacatactaactacacctttgagattgatgccgttaatggggtgtcagagctgagctccccaccaagacagtttgctgcggtcagcatcacaactaatcaggctgctccatcacctgtcctgacgattaagaaagatcggacctccagaaatagcatctctttgtcctggcaagaacctgaacatcctaatgggatcatattggactacgaggtcaaatactatgaaaagcaggaacaagaaacaagttataccattctgagggcaagaggcacaaatgttaccatcagtagcctcaagcctgacactatatacgtattccaaatccgagcccgaacagccgctggatatgggacgaacagccgcaagtttgagtttgaaactagtccagactctttctccatctctggtgaaagtagccaagtggtcatgatcgccatttcagcggcagtagcaattattctcctcactgttgtcatctatgttttgattgggaggttctgtggctataagtcaaaacatggggcagatgaaaaaagacttcattttggcaatgggcatttaaaacttccaggtctcaggacttatgttgacccacatacatatgaagaccctacccaagctgttcatgagtttgccaaggaattggatgccaccaacatatccattgataaagttgttggagcaggtgaatttggagaggtgtgcagtggtcgcttaaaacttccttcaaaaaaagagatttcagtggccattaagaccctgaaagttggctacacagaaaagcagaggagagacttcctgggagaagcaagcattatgggacagtttgaccaccccaatatcattcgactggaaggagttgttaccaaaagtaagccagttatgattgtcacagaatacatggagaatggttccttggatagtttcctacgtaaacacgatgcccagtttactgtcattcagctagtggggatgcttcgagggatagcatctggcatgaagtacctgtcagacatgggctatgttcaccgagacctcgctgctcggaacatcttgatcaacagtaacttggtgtgtaaggtttctgatttcggactttcgcgtgtcctggaggatgacccagaagctgcttatacaacaagaggagggaagatcccaatcaggtggacatcaccagaagctatagcctaccgcaagttcacgtcagccagcgatgtatggagttatgggattgttctctgggaggtgatgtcttatggagagagaccatactgggagatgtccaatcaggatgtaattaaagctgtagatgagggctatcgactgccaccccccatggactgcccagctgccttgtatcagctgatgctggactgctggcagaaagacaggaacaacagacccaagtttgagcagattgttagtattctggacaagcttatccggaatcccggcagcctgaagatcatcaccagtgcagccgcaaggccatcaaaccttcttctggaccaaagcaatgtggatatcactaccttccgcacaacaggtgactggcttaatggtgtctggacagcacactgcaaggaaatcttcacgggtgtggagtacagttcttgtgacacaatagccaagatttccacagatgacatgaaaaaggttggtgtcaccgtggttgggccacagaagaagatcatcagtagcattaaagctctagaaacgcaatcaaagaatggcccagttcccgtgtaaagcacgggacggaagtgcttctggacggaagtggtggctgtggaaggcgtagcatcatcctgcagacagacaataattctggagatactggtggaagttccaagtccaataagacactcaaatatgagtacaaatgccttaaaatggaattgaaaaactctttattttcccctatcatttattggatgggtgggtggggtatttttttgtaattgcttttttaaatattagttaatggattaaatttaattcttcagcgtaaaatggtgaagaactagcatatagccattgatcataaactgactatcataaaatcaaaacaagtgaaataacaaaatggacatggtggctttgtttaggtagagccacaaaagaaaagacttgtaatatttttatatacagaggaaatctgtaacaggtattttgtttcttttaaagcaagcaacacagaggaatttatacctcaaactatctggccatatttactaccttatcactgcattattctcttttatctgtttaaagcatatagagatgaagtttgtagttgttttaagtactacacatttttaaattgttagcttccttaagtatatcatgtaaagaaatgtcttaatttttgaaaaaagtacatatttattttcttttgaattgtttttattgttttctatttatgccttgatgatttaatatggatttgttacagccaagtgccaaatgctctctcaaattgtcagcaatttaactagacacagataataatgggtttctttcagattttttgaaccatccacttacatatatttttaaaaaatgaaatccttttcctgttcatacactaaccaaatctctcaaatctgttatcccaatcattgttgcctctccgtttattataaactgtatgctcacaacttagtgtaatataccagcttgtatgcaatggattttcaaccagataacatacctttcctgctctggtgcttagagactatcaactccctcctttagtgaaggagccgtgttagagcttccgagaatagctccactggagagaagtggaatcctatatagaatgctgcactaattgacaacacagcctataggccaatgcatgagtaaaaaaaaaaacaattactggctcactggctttgaaaagtcacttactattgttgctgaaacttgctgagctgtttatagagaatgatgataacagaacttttcctctgtatcactggtgtttaggtgaattaattaaacattgtgatcattagtaccaggtattattatctttaagagtcttccacttcaatgcacatggtgcagttttggtgtgtaacttagaaggattgaacttctttgaatttactggacataacattttcagaatagttggtcatctagcaaccgcctcaaaatgtgtaagcaggagagaaatttctcatcacagggatttagacttactattacataaaggctaactatgagcttgctcattaattttgaaaagatgtacctggtggatatctagctagtaatatattctgaagcaacattttagctctattgatactctttctaatgctgatatgatcttgagtataagaaatgcatatgtcactagaatggataaaataatgctgcaaacttaatgttcttatgcaaaatggaacgctaatgaaacacagcttacaatcgcaaatcaaaactcacaagtgctcatctgttgtagatttagtgtaataagacttagattgtgctccttcggatatgattgtttctcaaatcttggcaatattccttagtcaaatcaggctactagaattctgtattggatatataagagcatgaaatttttaaaaatacacttgtgattataaaattaatcacaaatttcacttatacctgctatcagcagctagaaaacattttttttttaaatcaagtattttgtgtttggaatgttagaatgagatctgaatgtggtttcaatctaattttttcccagactactattttcttttttaggtactattctgagcatactcaacaaaacccatgcatttcataaactaatagaagttgaggattgttgaatctatttcacttattttggctgtggtttccatctgaaagtagaggttgtatacaccatatactgttcttcattttattaatatttttctccttgacctctcataaatttactttacacaattcttaccctgtacatatgtaaacataagtgtacgattcttaaccatggagtagaggtactagaatgcttacggccatctctttgtacaggaactgcattgactttcagtaaacataaagccacaactcctacatgatgttatgtaccatatgatctgttttgtatcttaaatttgatttacatatattatttatttctggtaactcactcagtttatgctgtgctaaatatcaatcaagccatgtataaatgtgatatgattggcaatatgtgtttactttaaacttgtcttttcaaaatattactcagtttatgttgtacaatgtagatggcctcttactaatgtaaaatgatttgtagtggaaacatttatatttttataataaacataatgaaaatattttttacagattggaaaaaaaaaaaaaaaaaaaaaaaaaaaaaa

SEQ ID NO: 617 - DNA, 6765 bp, Homo sapiens
agagcttccatggagtcagggcagccggctcgacggattgccatggcgccgctgctggagtacgagcgacagctggtgctggaactgctcgacactgacgggctagtagtgtgcgcccgcgggctcggcgcggaccggctcctctaccactttctccagctgcactgccacccagcctgcctggtgctggtgctcaacacgcagccggccgaggaggagtattttatcaatcagctgaagatagaaggagttgaacacctccctcgccgtgtaacaaatgaaatcacaagcaacagtcgctatgaagtttacacacaaggtggtgttatatttgcgacaagtaggatacttgtggttgacttcttgactgatagaataccttcagatttaattactggcatcttggtgtatagagcccacagaataatcgagtcttgtcaagaagcattcatcttgcgcctctttcgccagaaaaacaaacgtggttttattaaagctttcacagacaatgctgttgcctttgatactggtttttgtcatgtggaaagagtgatgagaaatctttttgtgaggaaactgtatctgtggccaaggttccatgtagcagtaaactcatttttagaacagcacaaacctgaagttgtagaaatccatgtttctatgacacctaccatgcttgctatacagactgctatactggacattttaaatgcatgtctaaaggaactaaaatgccataacccatcgcttgaagtggaagatttatctttagaaaatgctattggaaaaccttttgacaagacaatccgccattatctggatcctttgtggcaccagcttggagccaagactaaatccttagttcaggatttgaagatattacgaactttgctgcagtatctctctcagtatgattgtgtcacatttcttaatcttctggaatctctgagagcaacggaaaaagcttttggtcagaattcaggttggctgtttcttgactccagcacctcgatgtttataaatgctcgagcaagggtttatcatcttccagatgccaaaatgagtaaaaaagaaaaaatatctgaaaaaatggaaattaaagaaggggaagaaacaaaaaaggaactggtcctagaaagcaacccaaagtgggaggcactgactgaagtattaaaagaaattgaggcagaaaataaggagagtgaagctcttggtggtccaggtcaagtactgatttgtgcaagtgatgaccgaacatgttcccagctgagagactatatcactcttggagcggaggccttcttattgaggctctacaggaaaacctttgagaaggatagcaaagctgaagaagtctggatgaaatttaggaaggaagacagttcaaagagaattaggaaatctcacaaaagacctaaagacccccaaaacaaagaacgggcttctaccaaagaaagaaccctcaaaaagaaaaaacggaagttgaccttaactcaaatggtaggaaaacctgaagaactggaagaggaaggagatgtcgaggaaggatatcgtcgagaaataagcagtagcccagaaagctgcccggaagaaattaagcatgaagaatttgatgtaaatttgtcatcggatgctgctttcggaatcctgaaagaacccctcactatcatccatccgcttctgggttgcagcgacccctatgctctgacaagggtactacatgaagtggagccaagatacgtggttctttatgacgcagagctaacctttgttcggcagcttgaaatttacagggcgagtaggcctgggaaacctctgagggtttactttcttatatacggaggttcaactgaggaacaacgctatctcactgctttgcggaaagaaaaggaagcttttgaaaaactcataagggaaaaagcaagcatggttgtccctgaagaaagagaaggcagagatgaaacaaacttagacctagtaagaggcacagcatctgcagatgtttccactgacactcggaaagccggtggccaggaacagaatggtacacagcaaagcatagttgtggatatgcgtgaatttcgaagtgagcttccatctctgatccatcgtcggggcattgacattgaacccgtgactttagaggttggagattacatcctcactccagaaatgtgcgtggagcgcaagagtatcagtgatttaatcggctctttaaataacggccgcctctacagccagtgcatctccatgtcccgctactacaagcgtcccgtgcttctgattgagtttgaccctagcaagcctttctctctcacttcccgaggtgccttgtttcaggagatctccagcaatgacattagttccaaactcactcttcttacacttcacttccccagactacggattctctggtgcccctctcctcatgcaacggcggagttgtttgaggagctgaaacaaagcaagccacagcctgatgcggcgacagcactggccattacagcagattctgaaacccttcccgagtcagagaagtataatcctggtccccaagacttcttgttaaaaatgccaggggtgaatgccaaaaactgccgctccttgatgcaccacgttaagaacatcgcagaattagcagccctgtcacaagacgagctcacgagtattctggggaatgctgcaaatgccaaacagctttatgatttcattcacacctcttttgcagaagtcgtatcaaaaggaaaagggaaaaagtgaacagtgatggctgttttcttatcccatgcctgtacttttcagcggctccttgccagacatcataggtcattattaattattggtttgctatttcattcttttccaatgctcttaatgattgtacggtggaccagaagccaggattcctctctgaactctgcagttaggcatcacttgaacttgcctgtgcctgctctttttcctccctgcaccgtctatgccgggcttagcatgtttctttttaaatgaggtttgtcaggatcaggtaaagttcctacaagtgattacagaaggtagaaactttacctgatcctaacagatctcatttagaaaggaatatgctaagcctggcatggacggtgcagggagggaaaagagcaggcacaagaaagctaccatttttaacagtccttgttatctagtgcaacataaataacagtcttaattgcacttatacccatgtcctgtggctctccaaatctggtctttgctgttgtgtctgctggacgcttgaactgatgtttgtgtaggaaatcatgttctgaccctttgtctacaaaggagccttctggaacactgagaagaaacatctctttgccattcctgaccagttctctctaccacattttcttcagctccatacttctgcctgtctgctctaaggaaatttcatggagccttcctactactaattcaagacagtctcctcaaaaactggttgactagtcttctaatgaccctaacatatgtagcatatactataatttcattgttccaaattagtatttttaaagcaaaatgaattacctgtttgcaaaagttaatgatgaaggagctcttagaattctcaatttttgcacatattcagtctcctaatatcagagatccctaagtccagctggctagttacagagttttttcagacttcctcgtttctcagctcttatatcctaagacaccagcatcatatcctctagaaatacaacctaattggcagtgagccgagatcgcaccactgcacccctgcctgggcgacagagtgagactttgtctctattacaaaaagaaaagaaaagaaatacaacctaagctcacctgcctgtgattcctcatttctcaccatcctgtgccagggtggctacttctctctgtgaggactcaaatacaagccaatgagtggcccactaagcttttaagatttgattttcctgccttgagataaaaaggagtgtaggtaaatgaaagatcaatgtatggaatatataaaaatacgaaagaaatatatacgtttaaaaatccataaagaaaaaaatctcattctaaacctgattaagttggctttttacgtaagtgtacaaataggatattcacagcatctttgtgcagtttttaaacttttatatttaaacattattaagttggcttttgttcacatgttgagtaatgggtagtaaattttctacctcaggagctgatatagacatcagttctgctagccatatcacatattttaatgtttcatcaacatcagctgtttttttgtttgctacactatttgaactaatagacagtggatcatgtaacacaaaattgtcttcaactttaacaaaattgtcattgttatttttttttgagacagagtctccctctgttgcccaggctggagtgcagtggcgcaatctcggctcactgcaacctcgcctgctgggttcaagcagttctcccacctcagcctcccaagtagctgggattataggtgtgcaccaccagacccggctaatttttgtatttttagtagagacggggtttcaccatgttggccaggctggtctcaaactactgacctcaggtgatccacccaccttggcctcccaaagtgctgagataacaggcgtgagccaccgcacccacccaacaaaattatttttaactgtcgtttctgaactgaacctctcacattggcatcttgatttattggtacttaacagtatatatggattttgaactctacacaagggtataaccagaatgaattgaggggtatcaagaaccagattggttacagtagaactctgtaagatgatgtggagagtaaggaaaaggagaagaaataaaaattagtttaagatggaataaagatttgggctgctaattttttcccaggattcaaaatatacccgctagaatggaaaacaaaaatttgaatgattacaacattatcgttaacattcaattttgtatttattgttttattgaatatagttcagagtatattaaaatagacctaccacttcaaatgataatgattattataatgtctcttcaccctattctagcacttctgcttgcagtatgtggtttctatttttttcctcttgtataattccacttgcttttaattgttgtttcattatataaaaggaacatcttcccatagcatattctatgaaaggggtttcattccaagttgagttttcaaaaaaaaggtcttcctaaagctaccattttcaaccgtccttgttatctagtacaacataaataacagtcttaaaaattgcactaataccagtgcccccctggctctccaaatctgttctttgctcttgtatctgctggacgcttgaagacaggtgcactgtctcgtatgtatttgaattatgaacagtaatttctaatgaattctaaaatggtcattgtaagtgaaagcctctcgctaccacttcctcttccaactacataaatatatttcaatgtatttccagttttggaaagttttcaatacatacatcaagtgtttacttagatttttataaaaattttttttacaatctaataatctttggtaaaggaactagagatgcatgcagttgcaaaattaatgtatttattttccagcataattttattaacttcactttttttctctctagtaaatatccagtgtacttatgaactcatgtttggctcttttaaaaccttttctaaaagctagatcagcatttttctattttacaagttttttgtataaaaaggtgaacatatgagatattgtgagaaatcattttaagtttcatttaaatcatggtgcctcttttgatactttcttaaaattgtgcaagaagaaatcatttttagtagtggtcataaatattatccttttggcagtaagctattactaattcagcctgaagctcggtagacaatatgtctacatgtgtttgagtacatcctggatacagtttcccagctcatgagggactgaaaatagtcttattcatcaacccactaggatgtgaagggttaagtctagatttggtcgcattgaaaccccacaatatagaattaataaatggccttcagtaggaaaacctacactaaagcaaatccgaagaagtggggcagggggaaagaggcattactggtctttccttttgttttgcaagcataatttgattttcctttggctcagaaaactcatttggggaaattctcttttgtgttcagtttaacctagaaaggtcctcttgaaaaaccaacattttaggaaagttcttttttcaggatggagtatattaaaattaagccaggctttgacgtgaattatcacttttctttattattttgttttctattttggtttatagctatttctggttcagttctgaacttcagcacttaatcatccttatcaaccaggcttttggtagcctaaaccgctatgctgttgtttttttaatttaaagatgtataagccaaaatttggatgggagtgagacataactgatttatatgaattttaacagagttgtatttgtgtgtgtttaataaaatatatatttattcagtactttcctcagtattttatgggcaaagtaaaaataacaatgcatagtgaaagggcatatattaccagcagtaataattcaaaatcctgaaaatgtttcattttttttgtttttgttatgcagaataaacaaggcagaaatgctctttgaaccactaaaa

SEQ ID NO: 618 - DNA, 823 bp, Homo sapiens
cacttccctcaacccttcccacaaactgggaggaaaactgagacctcctggtcacccgccgccgggccttttagaaactcccacaagctctgccttccctccctggtcctcttcagaccccctcttagttcttcgcggctaacggctcgcgctcggggccgggtgtggagctggaacagagggctggcaaggcgcgcatgcgcaccgagggtggagccgctgagcacagaaccggaaacttagagacaaagttcggagccccgcccccgccgcgcgccgctgagttgtctggccccgccgacccacggcccacgacccaccgacccacgaatcggcccggccgtcgcgtgcaccatgtctggctcctccagcgtcgccgctatgaagaaagtggttcaacagctccggctggaggccggactcaaccgcgtaaaagtttcccaggcagctgcagacttgaaacagttctgtctgcagaatgctcaacatgaccctctgctgactggagtatcttcaagtacaaatcccttcagaccccagaaagtctgttcctttttgtagtaaaatgaatctttcaaaggtttcccaaaccactccttatgatccagtgaatattcaagagagctacatttgaagcctgtacaaaagcttatccctgtaacacatgtgccataatatacaaacttctactttcgtcagtccttaacatctacctctctgaattttcatgaatttctatttcacaagggtaattgttttatatacactggcagcagcatacaataaaacttagtatgaaacttttaaaaaaaaaaaaaaaaaa

SEQ ID NO: 619 - DNA, 3275 bp, Homo sapiens
gaagtcaagacgtctggaaagaattacccagtcctggcttcgagcagcccattgaaccagagacttgaaacagccccagccaaagacttttctcccaattctgcgcttcctgggttctgctgagtcttccacaggctttttttttttttttttttttttttaagacgaaaaagagattttctgttatcgggggcagaaagactgaagcccaaaaaaaaaaaaaaaaaaaaaagaaaagaaaagaaaaaagaaaagttaatttatttttaaagcataatttttttaagaattagactgaagtgcaacggaaacataaagagaatattagtgaaattattttttaaagtggggaagaatcaaacatttaagactcccctatcctttttaaatgttgtttttaaatttcttattttttttggccggtcgtctcaaattcatctgatctcttattacctcaattttggaaactgcccgccaccgaccctccgggaccacacagacaggctgaggacgactttatgaccaagagctgaacaagatgcattgtgagaggtttctatgtatcctgagaataattggaaccacactctttggagtctctctcctccttggaatcacagctgcttatattgttggctaccagtttatccaaacggataattactatttctcttttggactgtatggtgcctttttggcatcacacctcatcatccaaagcctgtttgcctttttggagcaccgaaaaatgaaaaaatccctagaaacccccataaagttgaacaaaacagttgccctttgcatcgctgcctatcaagaagatccagactacttaaggaaatgtttgcaatctgtgaaaaggctaacctaccctgggattaaagttgtcatggtcatagatgggaactcagaagatgacctttacatgatggacatcttcagtgaagtcatgggcagagacaaatcagccacttatatctggaagaacaacttccacgaaaagggtcccggtgagacagatgagtcacataaagaaagctcgcaacacgtaacgcaattggtcttgtccaacaaaagtatctgcatcatgcaaaaatggggtggaaaaagagaagtcatgtacacagccttcagagcactgggacgaagtgtggattatgtacaggtttgtgattcagacactatgcttgacccagcctcatctgtggagatggtaaaagttttagaagaagatcccatggttggaggtgttgggggagatgtccagattttaaacaagtacgattcctggatctcattcctcagcagtgtaagatattggatggcttttaatatagaaagggcctgtcagtcttattttgggtgtgttcagtgcattagtggacctctgggaatgtacagaaactccttgttgcatgagtttgtggaagattggtacaatcaagaatttatgggcaaccaatgtagctttggtgatgacaggcatctcacgaaccgggtgctgagcctgggctatgcaacaaaatacacagctcgatctaagtgccttactgaaacacctatagaatatctcagatggctaaaccagcagacccgttggagcaagtcctacttccgagaatggctgtacaatgcaatgtggtttcacaaacatcacttgtggatgacctacgaagcgattatcactggattctttcctttctttctcattgccacagtaatccagctcttctaccggggtaaaatttggaacattctcctcttcttgttaactgtccagctagtaggtctcataaaatcatcttttgccagctgccttagaggaaatatcgtcatggtcttcatgtctctctactcagtgttatacatgtcgagtttacttcccgccaagatgtttgcaattgcaacaataaacaaagctgggtggggcacatcaggaaggaaaaccattgttgttaatttcataggactcattccagtatcagtttggtttacaatcctcctgggtggtgtgattttcaccatttataaggagtctaaaaggccattttcagaatccaaacagacagttctaattgttggaacgttgctctatgcatgctattgggtcatgcttttgacgctgtatgtagttctcatcaataagtgtggcaggcggaagaagggacaacaatatgacatggtgcttgatgtatgatcttccatgttttgacgtttgcagtcacacacaacaccttagttcctctaggggctgtacagtattgtggcatcagataatgccaccaaaggagacatatcactgctgctgggacttgaacaaagacatttatatgggtttattttcattctgccaaagtaaaacaatacatcaacaagaagaaactcagatttaacctgttatttctatgaaaatgggatgaattctttgtttatgcactttttccttactgtgcatccgcctgaaagtgttttgccctatatacctcactagccatgctttatgtgggttatcatggaagaaaaggattttggaaactcaaggaaaagttctttcaacctatacaacctaacttatggactgttttgatagatgataattttttttttttaggaaggattttctttttaactttaccaaatgaaatgccaaaggaagttttaaaggccgttggctgtgctgtattttgatataattgtactgtgtttttaaattttgtatgccaatcttaaagacaaattttgcatattctctattttacttttctgccaaaataaacctgttcttccttttttaaaataaaataagttcttaaaaaatttatacttaaaaaatcctgcccaaaatgtgaagcttggttgactgatgttcatgatagaaagaataaaatgtttctctctctctaccttttaaaattgaatagtttatttctgtgaaagaagtatttaaactttcaatattttaactttttgtttttatttcttttagaaaaggccaatatacctatcacactttggaagtaaaaatacacactttcgtgtgtacctaaaaaaaaaatcgttgaaaatcaaggccaaaggtagtgcaattttttcattaagatttaaaaaaaagggaatgatagtctttgaaagaaaacagtaggcatccagcactggacaaaacatgggtatcaaagatgaataatctttggagattctggcagtgttttcccagaacaagtcaagtggaaagtggagaaattatctgtataattttggacacatacaatgcagtt

SEQ ID NO: 620 - DNA, 6427 bp, Homo sapiens
atagaggctgggggtggggggggaggtcaagcgtagcctcttctcctttaccaagatggcggcttgtccctgtttcgccacagttcctaccttatgagctcggttttcttatgcttataagagtggaacagcaaaagctggcaggctgacagaggcggcctcaggacggaccttctggctactgaccgttttgctgtggttttcccggattgtgtgtaggtgtgagatcaaccatgagttccgttgcagttttgacccaagagagttttgctgaacaccgaagtgggctggttccgcaacaaatcaaagttgccactctaaattcagaagaggagagcgaccctccaacctacaaggatgccttccctccacttcctgagaaagctgcttgcctggaaagtgcccaggaacccgctggagcctgggggaacaagatccgacccatcaaggcttctgtcatcactcaggtgttccatgtacccctggaggagagaaaatacaaggatatgaaccagtttggagaaggtgaacaagcaaaaatctgccttgagatcatgcagagaactggtgctcacttggagctgtctttggccaaagaccaaggcctctccatcatggtgtcaggaaagctggatgctgtcatgaaagctcggaaggacattgttgctagactgcagactcaggcctcagcaactgttgccattcccaaagaacaccatcgctttgttattggcaaaaatggagagaaactgcaagacttggagctaaaaactgcaaccaaaatccagatcccacgcccagatgaccccagcaatcagatcaagatcactggcaccaaagagggcatcgagaaagctcgccatgaagtcttactcatctctgccgagcaggacaaacgtgctgtggagaggctagaagtagaaaaggcattccaccccttcatcgctgggccgtataatagactggttggcgagatcatgcaggagacaggcacgcgcatcaacatccccccacccagcgtgaaccggacagagattgtcttcactggagagaaggaacagttggctcaggctgtggctcgcatcaagaagatttatgaggagaagaaaaagaagactacaaccattgcagtggaagtgaagaaatcccaacacaagtatgtcattgggcccaagggcaattcattgcaggagatccttgagagaactggagtttccgttgagatcccaccctcagacagcatctctgagactgtaatacttcgaggcgaacctgaaaagttaggtcaggcgttgactgaagtctatgccaaggccaatagcttcaccgtctcctctgtcgccgccccttcctggcttcaccgtttcatcattggcaagaaagggcagaacctggccaaaatcactcagcagatgccaaaggttcacatcgagttcacagagggcgaagacaagatcaccctggagggccctacagaggatgtcaatgtggcccaggaacagatagaaggcatggtcaaagatttgattaaccggatggactatgtggagatcaacatcgaccacaagttccacaggcacctcattgggaagagcggtgccaacataaacagaatcaaagaccagtacaaggtgtccgtgcgcatccctcctgacagtgagaagagcaatttgatccgcatcgagggggacccacagggcgtgcagcaggccaagcgagagctgctggagcttgcatctcgcatggaaaatgagcgtaccaaggatctaatcattgagcaaagatttcatcgcacaatcattgggcagaagggtgaacggatccgtgaaattcgtgacaaattcccagaggtcatcattaactttccagacccagcacaaaaaagtgacattgtccagctcagaggacctaagaatgaggtggaaaaatgcacaaaatacatgcagaagatggtggcagatctggtggaaaatagctattcaatttctgttccgatcttcaaacagtttcacaagaatatcattgggaaaggaggcgcaaacattaaaaagattcgtgaagaaagcaacaccaaaatcgaccttccagcagagaatagcaattcagagaccattatcatcacaggcaagcgagccaactgcgaagctgcccggagcaggattctgtctattcagaaagacctggccaacatagccgaggtagaggtctccatccctgccaagctgcacaactccctcattggcaccaagggccgtctgatccgctccatcatggaggagtgcggcggggtccacattcactttcccgtggaaggttcaggaagcgacaccgttgttatcaggggcccttcctcggatgtggagaaggccaagaagcagctcctgcatctggcggaggagaagcaaaccaagagtttcactgttgacatccgcgccaagccagaataccacaaattcctcatcggcaaggggggcggcaaaattcgcaaggtgcgcgacagcactggagcacgtgtcatcttccctgcggctgaggacaaggaccaggacctgatcaccatcattggaaaggaggacgccgtccgagaggcacagaaggagctggaggccttgatccaaaacctggataatgtggtggaagactccatgctggtggaccccaagcaccaccgccacttcgtcatccgcagaggccaggtcttgcgggagattgctgaagagtatggcggggtgatggtcagcttcccacgctctggcacacagagcgacaaagtcaccctcaagggcgccaaggactgtgtggaggcagccaagaaacgcattcaggagatcattgaggacctggaagctcaggtgacattagaatgtgctataccccagaaattccatcgatctgtcatgggccccaaaggttccagaatccagcagattactcgggatttcagtgttcaaattaaattcccagacagagaggagaacgcagttcacagtacagagccagttgtccaggagaatggggacgaagctggggaggggagagaggctaaagattgtgaccccggctctccaaggaggtgtgacatcatcatcatctctggccggaaagaaaagtgtgaggctgccaaggaagctctggaggcattggttcctgtcaccattgaagtagaggtgccctttgaccttcaccgttacgttattgggcagaaaggaagtgggatccgcaagatgatggatgagtttgaggtgaacatacatgtcccggcacctgagctgcagtctgacatcatcgccatcacgggcctcgctgcaaatttggaccgggccaaggctggactgctggagcgtgtgaaggagctacaggccgagcaggaggaccgggctttaaggagttttaagctgagtgtcactgtagaccccaaataccatcccaagattatcgggagaaagggggcagtaattacccaaatccggttggagcatgacgtgaacatccagtttcctgataaggacgatgggaaccagccccaggaccaaattaccatcacagggtacgaaaagaacacagaagctgccagggatgctatactgagaattgtgggtgaacttgagcagatggtttctgaggacgtcccgctggaccaccgcgttcacgcccgcatcattggtgcccgcggcaaagccattcgcaaaatcatggacgaattcaaggtggacattcgcttcccacagagcggagccccagaccccaactgcgtcactgtgacggggctcccagagaatgtggaggaagccatcgaccacatcctcaatctggaggaggaatacctagctgacgtggtggacagtgaggcgctgcaggtatacatgaaacccccagcacacgaagaggccaaggcaccttccagaggctttgtggtgcgggacgcaccctggaccgccagcagcagtgagaaggctcctgacatgagcagctctgaggaatttcccagctttggggctcaggtggctcccaagaccctcccttggggccccaaacgataatgatcaaaaagaacagaaccctctccagcctgctgacccaaacccaaccacacaatggtttgtctcaatctgacccagcggctggaccctccgtaaattgttgacgctcttcccccttcccgaggtcccgcagggagcctagcgcctggctgtgtgtgcggccgctcctccaggcctggccgtgcccgctcaggacctgctccactgtttaacactaaaccaaggtcatgagcattcgtgctaagataacagactccagctcctggtccacccggcatgtcagtcagcactctggccttcatcacgagagctccgcagccgtggctaggattccacttcctgtgtcatgacctcaggaaataaacgtccttgactttataaaagccaaacgtttgccctcttcctttcccacctccctcctgccagtttcccttggtccagacagtcctgtttgtggagtgcaatcagcctcctccagctgccagagcgcctcagcacaggtgtcagggtgcaaggaagacctggcaatggacagcaggaggcaggttcctggagctggggggtgacctgagaggcagagggtgacgggttctcaggcagtcctgattttacctgccgtggggtctgaaagcaccaagggtccctgcccctacctccactgccagaccctcagcctgaggtctggtgagtggagcctggaggcaaggtggtaggcaccatctgggtcccctgtggccgtcacagtgtctgctgtgattgagatgcgcacaggttgggggaggtagggccttacgcttgtcctcagtgggggcagtttgccttagatgacagctgggctcttcttcacaccacctgcagcccctccctgcccctgccctagctgctgtgtgttcagttgccttctttctacctcagccggcgtggagtggtctctgtgcagttagtgccaccccacacacccgtctcttgattgagatgtttctggtggttatgggtttcccgtggagctgggggtgggcgccgtgtacctaagctggaggctggcgctctccctcagcacaggtgggtcagtggccagcaggcccatctggagtgggagtgggcacttccaccccgcccacaggccatccggctgtgcaggccagcccctaggagcaggtcccgggtgactggcagttttcacggtctagggccgagacgatggcatggggcctagagcatgaggtagagcagaatgcagaccacgccgctggatgccgagagaccctgctctccgagggaggcatctgtgtcatgctgtgagggctgaggacggggccctagtctctggttttctggtcttaacatccttatctgtgtccgccacggaggtgactgagctgctagcgagttgtcctgtcccaggtacttgagttttggaaaagctgactcacgcccatccatctcacagcccttccctggggacagtcgcttccgccttgacacctcactctcagttgaataactcaagcttggtcatcttcagactcgaattcttgagtagacccagacggcttagcccaagtctagttgcagctgcctcggcaagtccccatttgctcaggcagccctgaatgggcctgtttacaggaatggtaaattgggattggaaggaatatagcttccagcttcataggctagggtgaccacggcttaggaaacagggaaagaaagcaaggcccttttcctgcctttcccgggatctgtctactccacctccacgggggaggccagtggggaagggctgtcacctcttccccatctgcatgagttctggaactctgtcctgttggctgcttgcttccagctccccccaatctccatcgcagcgggttcctcctgtcttttctacagtgtcataaaacatcctgcccctaccctctcccaaaggtcaattttaattctcaccaagttttgcacatctctgtatgtcgcttgatgtcttagacgcgagccctttcctaaactgttcagcgctctcttttcctttgggtggttgttgcaagggtgatgacatgactgtccccaggcctgtctccctgaagcgtctgtgctgtcaggacagccctgggcagagatgaggcaggggtgaggcgtgcgtgtgcttttcctccttgttggatgtcttccatatcatctgtttccatagctacaatccatcccttggccttaactttggaatttggagattatatgcaaacatgtgtaaaggctcatgaatatggatgacactggaattttataaattctaaaataaaacccgaaaccagatgtagcatgctgggactcattttgaaaaaaaaaaaaaaaaaaaaaaaaaaaaaaaaaaaaaaaaaaaaaaaaaaaaa

SEQ ID NO: 621 - DNA, 2613 bp, Homo sapiens
gtcatctgtctggacgcgctgggtggatgcggggggctcctgggaactgtgttggagccgagcaagcgctagccaggcgcaagcgcgcacagactgtagccatccgaggacacccccgcccccccggcccacccggagacacccgcgcagaatcgcctccggatcccctgcagtcggcgggagtgttggaggtcggcgccggcccccgccttccgcgccccccacgggaaggaagcacccccggtattaaaacgaacggggcggaaagaagccctcagtcgccggccgggaggcgagccgatgccgagctgctccacgtccaccatgccgggcatgatctgcaagaacccagacctcgagtttgactcgctacagccctgcttctacccggacgaagatgacttctacttcggcggccccgactcgacccccccgggggaggacatctggaagaagtttgagctgctgcccacgcccccgctgtcgcccagccgtggcttcgcggagcacagctccgagcccccgagctgggtcacggagatgctgcttgagaacgagctgtggggcagcccggccgaggaggacgcgttcggcctggggggactgggtggcctcacccccaacccggtcatcctccaggactgcatgtggagcggcttctccgcccgcgagaagctggagcgcgccgtgagcgagaagctgcagcacggccgcgggccgccaaccgccggttccaccgcccagtccccgggagccggcgccgccagccctgcgggtcgcgggcacggcggggctgcgggagccggccgcgccggggccgccctgcccgccgagctcgcccacccggccgccgagtgcgtggatcccgccgtggtcttcccctttcccgtgaacaagcgcgagccagcgcccgtgcccgcagccccggccagtgccccggcggcgggccctgcggtcgcctcgggggcgggtattgccgccccagccggggccccgggggtcgcccctccgcgcccaggcggccgccagaccagcggcggcgaccacaaggccctcagtacctccggagaggacaccctgagcgattcagatgatgaagatgatgaagaggaagatgaagaggaagaaatcgacgtggtcactgtggagaagcggcgttcctcctccaacaccaaggctgtcaccacattcaccatcactgtgcgtcccaagaacgcagccctgggtcccgggagggctcagtccagcgagctgatcctcaaacgatgccttcccatccaccagcagcacaactatgccgccccctctccctacgtggagagtgaggatgcacccccacagaagaagataaagagcgaggcgtccccacgtccgctcaagagtgtcatccccccaaaggctaagagcttgagcccccgaaactctgactcggaggacagtgagcgtcgcagaaaccacaacatcctggagcgccagcgccgcaacgaccttcggtccagctttctcacgctcagggaccacgtgccggagttggtaaagaatgagaaggccgccaaggtggtcattttgaaaaaggccactgagtatgtccactccctccaggccgaggagcaccagcttttgctggaaaaggaaaaattgcaggcaagacagcagcagttgctaaagaaaattgaacacgctcggacttgctagacgcttctcaaaactggacagtcactgccactttgcacattttgattttttttttaaacaaacattgtgttgacattaagaatgttggtttactttcaaatcggtcccctgtcgagttcggctctgggtgggcagtaggaccaccagtgtggggttctgctgggaccttggagagcctgcatcccaggatgctgggtggccctgcagcctcctccacctcacctccatgacagcgctaaacgttggtgacggttgggagcctctggggctgttgaagtcaccttgtgtgttccaagtttccaaacaacagaaagtcattccttctttttaaaatggtgcttaagttccagcagatgccacataaggggtttgccatttgatacccctggggaacatttctgtaaataccattgacacatccgccttttgtatacatcctgggtaatgagaggtggcttttgcggccagtattagactggaagttcatacctaagtactgtaataatacctcaatgtttgaggagcatgttttgtatacaaatatattgttaatctctgttatgtactgtactaattcttacactgcctgtatactttagtatgacgctgatacataactaaatttgatacttatattttcgtatgaaaatgagttgtgaaagttttgagtagatattactttatcactttttgaactaagaaacttttgtaaagaaatttactatatatatatgcctttttcctagcctgtttcttcctgttaatgtatttgttcatgtttggtgcatagaactgggtaaatgcaaagttctgtgtttaatttcttcaaaatgtatatatttagtgctgcatcttatagcactttgaaatacctcatgtttatgaaaataaatagcttaaaattaaatgaaaaaaaaa

SEQ ID NO: 622 - DNA, 3959 bp, Homo sapiens
aaccgcggcggcgaggggcgggactccacggccctctcaccgctcctaccctgtgcctccccgaactccttctgcccctcctcttccctctcgccccttcccccttcagttcggtttcaaaagacgcgttgcccaatgaataacagggtcgacccagagtggcggccgcgtccaccaattcgcggacggcgagggcggagcgtccgcaacgagcctctgacgccgggcggcgtgtgacgcagtcgggccctctgcgcgctgcgcccgaagcggcggtcggtggcaggggtggtagcggcggcggcgacggtttcgtgggggccgcgcgctgctctgtgagcggcgggtggcagcaggggactcctgacacttccccttccccaccgaaccgcgctttctgaaacaaagactcattttgaagatgtttaacaaatcatttggaacaccctttgggggtggcacaggtggctttggcacaacttcaacatttggacagaatactggctttggcactactagtggaggggcatttggaacatctgcatttggttctagcaacaatactggaggcctctttggaaattcacagactaaaccaggaggattgtttggaaccagttcatttagccagccagctacctccacaagcactggctttgggtttggtacgtcaacaggaacagcaaataccttgtttggaactgcaagcacagggaccagtctcttctcatcccaaaacaatgcctttgcacaaaataaaccaactggctttggcaattttggaaccagtactagcagtggaggactctttggaaccacaaataccacctctaatccttttggcagcacatctggctccctctttgggccaagtagttttacagctgctcctactgggactactattaaatttaaccctccaactggtacagatactatggtcaaagctggagttagcactaacataagtaccaagcaccagtgtattactgctatgaaagaatatgaaagcaagtcactagaggaacttcgtttagaggattatcaggctaacaggaagggcccacagaaccaggtgggagcaggtaccacaactggcttgtttgggtcttctccagccacttccagcgcaacaggactcttcagctcctccaccactaattcaggctttgcatatggtcagaacaaaactgcctttggaactagtacaactggatttggaacaaatccaggtggtctctttggccaacagaatcagcagactaccagcctcttcagcaaaccatttggccaggctacaaccacccagaacactggcttttcctttggtaataccagcaccataggacagccaagcaccaacaccatgggattatttggagtaacccaagcctcacagcctggaggtctttttgggacagctacaaacaccagcactgggacagcatttggaacaggaacaggtctctttgggcagaccaatactggatttggtgctgttggttcgaccctgtttggcaataacaagcttactacatttggaagcagcacaaccagtgcaccttcatttggtacaaccagtggcgggctctttggtaacaaaccaaccctgactttaggaaccaatacaaacacttctaattttggttttggcacaaataccagtgggaatagtatttttggaagtaaaccagcacctgggactcttggaactgggcttggtgcaggatttggaacagctcttggtgctggacaggcatctttgtttgggaacaaccaacctaagattggagggcctcttggtacaggagcctttggggcccctggatttaatactacgacagccactttgggctttggagccccccaggccccagtagctttgacagatccaaatgcttctgctgcccagcaggctgttctccagcagcacatcaatagtctaacatactcaccttttggagactctcctctcttccggaatccgatgtcagaccctaagaagaaggaagagagattgaaaccaacaaatccagcagcccagaaggctcttactacacctactcattataaactgacaccccgccctgccactagagtccggccaaaggctttacaaacaacaggcacagccaagtcacatctctttgatgggctggatgacgatgaaccatccctagccaatggagcattcatgcccaagaagagcattaagaagttggttttgaagaaccttaataatagcaatctcttttctcctgttaatcgtgattcagaaaatctagcttcaccatctgaatatccagaaaatggagagagatttagtttcctaagcaaacctgttgatgagaatcaccagcaggatggagatgaagattcccttgtttcacatttttatactaaccctattgccaaacctattcctcaaaccccagaaagtgctggaaataaacacagcaacagcaacagtgtggatgataccattgttgcattaaacatgcgtgctgctttgcgaaatgggctggaaggaagcagtgaagaaacgtcttttcatgatgagtcacttcaggatgaccgagaagaaatagaaaataattcttaccatatgcacccagcaggtattattctcactaaggttggttactatactattccatctatggatgaccttgctaaaattaccaatgaaaaaggagagtgcattgtctctgatttcactattggtcggaaaggttatggttcaatctattttgaaggagatgtgaatttgacaaatctaaatttggatgatattgtgcatatccggaggaaagaagtagttgtctacttagatgataaccaaaaaccacctgtgggtgaagggctaaataggaaggctgaagttacattggatggagtttggccaacagataaaacatctcgttgtttaataaagagcccagatcgccttgctgatatcaactatgaaggaagattggaagcagtttcaaggaaacagggagctcaattcaaagaataccggcctgaaactggttcttgggtgtttaaggtctcccatttttctaagtatggccttcaggattctgatgaagaggaggaggagcatccgtctaaaactagtacaaagaagttgaagactgctcctttgcctcctgcaagccagactacgcccttgcagatggctcttaatggcaaacctgcacctccacctcaggtagagaaaaaaggacagtgaatttgaatggaatccgtgataccgaagttgaaagcaagtcattcagctaatacaaagctgttttatgacccttggaactttgaagagtacaaacattggcaatcacgttgaaacaagtgcaagggagggcgtgaggtcttgcaggcatctgtctttttactggagagatttaaagaattctcttgctgtttggattattcctctacagattgtcatttttaaaccctttgttctctctcatttggacttgctgaattctctgctcagtgattaacttaagatttgctcatgtgggttcatgcacagtaaattctgcctttattgactacctgatgtgcagtttaatctttttctttacctccatggttttttaaaagttaaattagctttctgaaagggtttttaatctccatttttttaaagttgtttgcttatacttcgggtaaccttgatatttgtattttaatagtacataatctttatgaaaaatagtttgggaatgtaaatgaattattatttggcttggggagattagggcctacattgtttatcgcaattacttgtatcattgatacgggatttctttgtaaagcatcctctacctctcagctgctgaaagctagacctttggtattttccatgctataattcttatggctgctgaaatgtgtggtttttatgatttattaaataatctcttaggaggcatttctgaaaaaaaaaa

SEQ ID NO: 623 - DNA, 5475 bp, Homo sapiens
actgggcggactccgcgccgccggccttgtagccattttaggaggaatcgctggtcgccagcgaggggtgcggcttcaatttcaataactttattggtggcctgatctgcagaacagccatcacatcagtggcccttggaggagggagcgcatcgcccgaggtggtccccgacgagctgcagccatgggaaacaccaccagcgaccgggtgtccggggagcgccacggcgccaaggctgcacgctccgagggcgcaggcggccatgccccggggaaggagcacaagatcatggtggggagtacggacgaccccagcgtgttcagcctccctgactccaagctccctggggacaaagagtttgtatcatggcagcaggatttggaggactccgtaaagcccacacagcaggcccggcccactgttatccgctggtctgaaggaggcaaggaggtcttcatctctgggtccttcaacaattggagcaccaagattccactgattaagagccataatgactttgttgccatcctggacctccctgagggagagcaccaatacaagttctttgtggatggacagtgggttcatgatccatcagagcctgtggttaccagtcagcttggcacaattaacaatttgatccatgtcaagaaatctgattttgaggtgttcgatgctttaaagttagattctatggaaagttctgagacatcttgtagagacctttccagctcacccccagggccttatggtcaagaaatgtatgcgtttcgatctgaggaaagattcaaatccccacccatccttcctcctcatctacttcaagttattcttaacaaagacactaatatttcttgtgacccagccttactccctgagcccaaccatgttatgctgaaccatctctatgcattgtccattaaggacagtgtgatggtccttagcgcaacccatcgctacaagaagaagtatgttactactctgctatacaagcccatttgaagggatcccttcttgcctctaaggattcaggagaagcatctcccttgcatttctggactgaaccagtcttacctgagactggaaggctgatttgctttgaggctgatatgtgtgtttcagagcctctgagtaggatgctctgcttttgcatttgattgcagatgagagctttatgagttcacggaatttattttaagaaaaaaaaatatacatatgagaagaaggtaaatggaagcctcctagccccagctagaagtattgtttctgcctgtgggttttcaccaagacctgtttgggggcgctgcaggaataactatataggaagatttttcctaaaatgaaagaacagcaaactcttaggatccttgttgggtggagattctatcactgctaccttggctctccaaggaatgggcttgtgctagaccgctgccctacttaacagctgcctcattgcaagggcagtttttcttgcatgggttctctatattcccagagtatgtggcacaatctgtgttgtttatatgataccagatgccccacaagaacccttattcctctcatttcacattcttcctttaatagcctccttcagatcccatacctgacccctctctaacacaaaacttattgggtaagtgactttgaaaagttttgtggcacctgacccaccccagacactagggctatcagaaggtctcctttttagcccagcacaggcccaggccactttgtcgtgtttgttttaacttctaaagaaaatatgtttcagcattataagaaaggcagaatgcagaacacctacatttttgttttagtttggtgccaaggctcaggctgtattggcaaattcccgaaagttttcccactttgcctggccctgcttctgtcttttctttctcagtaaacagttctgaaggcaggagtggaacccgggagtattttcatgtctttcatccttgaaagatttttatgtgcctgcattttttttttaattaaaaaatgccttttcattggtcttaagagaccgcattggagaatttcaggcttttgataaatgcttcttcaaagagattttcttctctagtctagccttccacattcttagattaatatggccaaccctgtacacatcactacactaaacactgctctagataaactgctcaagttcatttaactcatttgatgcacctaaaggggttcctcattttaaagatttgttaggccaagaagcaagagagtattcctagtattcccaaccatgaaaagtatcattctttgcaccaaatgttaacaaaatcattttgttctcctgcctcttctttttaaaggtgtttgatgattaagtggggtcactgaattccatttgtggactgaaaagtattcaatccacttttggggttcagagataaaacattttttcccaagtagctggggctcttccattttgcagataagtcaaataatcaacactaaaggaggctaaactgttgatgaatgagagactccctgactgctcagatgaccctagccacactgaaagggcacctacaggtcagtttagctacctcctgtctttcccatgcaaagctgataacacagttgtctttggacttgtagacctcttggattccaggtgtgatggagtaaagtgtgggattgttgttttgctgggatgcaaataactaaatgctttggtggttaattgctaagagtaaatactactttagccatccaaggccaccttctgcagcaaaaggcttttgtggagaaccttttatgttcccaaccactttttgaatggtgtgccatttaaaaatccaggccagatcctattataaccaactctcaggatttacagccttcagttgtactagaattttgtttttatccaatactcattaaataagtgggccacttaggaagattcaaaatcttggttattacatgaagtttgttatatttcttgtcaacagtattgaaatgtaatatgtatgtgttcatgtatgaaaatttttactccacacaggtgtttcagtagagtggggcaggaaaagagatctcttcgatttctttcaggcctgaggcttttgtgaaatgcgtcagccccctgtgacagtaggttttgatgctagtgatcttcagatctttctctctggaaatgtgcagagagtgtcagtttcccaagttctgaggtaactctcagcccagatgtgaaatgggagcctaccagctggtatagaagggaatgggtaggaggcactgggtgctgactcattcagcactgtcccttttctatactgctgatacatcccatggttctgagaagccttatctcagtctatttggaagagagggaggaagagaaggaagtaacccaaagtactactcatttatcattgtatattgattagttaaagggataattaatttaatgctgaggagagtttgacagattttgaaaatgagtaaaggcaaaaaaaatttttttagcctttattttgcttttgggaattttacagagtcaaagtaggcagaataagaaaatagttcttcaggagggccgacctttaaagaacttcaacatagtttcggaattgtggggaagagaagagtgactgagctgagaagtaataatagaataaagggttgagtaacttacaactgaaaatgatctcttttaaaaagaaattaaatcagacaccacatggtggtgtccttggatctcactgtacagaattagcagtgtataaccatcttctcttttcatcttgttccaattctctcctctttcctttccattctgctttaagctcatgtgtcaggcagactttaccagagtgtcagacattacctaaaacacatacgttagccatgctgctggtatggagaaattccacaccatgattattagcctcctttaagctgaatgggatttaaccattctaggcaacacccctgaagggcatacctaacctcaatagtgttggcttttaaaacgtatgtttgtatggtagagaaactttgtaaaagaagaatccaagagaagtttgtgaggatcctacaaacccaggcccactcactttgctctaattctttctagtatcttgtagatctaatgggtctgggataaaaactttgaaaagtgtcaatattccatgtatgctgctgaaatgaagttaagtttggaaagaagtgatacctctagactgggtttatattaatctgggatataaatgaagaagacatactaatagaactccttgcttttaattggggaaatagggctttaataattttgacctcaactaaaaatgatatgcaatagtctctgtgtgtgtttgaaatacattgtgttctcagagatttctacattctcacgttctagtgatttggggcatgggcttaatagcagatgtacagtgtattcctgcattattgtgattccccttaaagcccagttcttgctgtcttctaccaggggctgctgactccagttacccatggaatgcaggacctgggaggggtagccattagggtctttcaaaactctttggatctaagcatttgtctctccttaagtgccaatcacaattggatatggaaggactgtgatttctgcaatgaacccaaacttttagagtaaaaagccaaatttaaattataagaaagaagggaaaaaagagaaaaactcaagtctattacttgtagagtccaattcttagcaatggaatcgctctaggattctagtttgggctttgtctggatttgcttttctcagttgtgctttgaagtgaataagctttgttacaaattaattttttattagttccaatattagttggagttaacttgaattgattgtatgtagcacagcacttttgcagtaagattggtgtgaaatactaaacactatggattttgtaggtgtcaggttaaatggtcaagggatacctacattaagtcatatattaggtattgatgatcttacttcttttctgttcccctgtacaaaacacttacctaacccagcttgtggttttaggacagccaaagctcactgttgttggttagtcctaatcactacacgggtctcataaatgagacttgtttgaattttggtacattggagcatgttggttggtattacacggcagcatttcgaatgagtgcagctctgtgtctgtcagaaaggagagataagactactttgaagggaattaaatatgtgagtcctctttttaatggtgctttttgtaacctttaatgctgaggtacagagctgcttttcaatatttcataaaggagtggcagacaagagtggattttaaagctgttcttcaaacgtaatttgtcactggactctgacacacctggaaattatatgatatgatacatacagaaatgttgtgggttttttccataaaactttaataaaagtattatacagcaataaaaaaaaaaaaaaa

SEQ ID NO: 624 - DNA, 3390 bp, Homo sapiens
gcttcggggccggcgcgaggcgcggcggggtcacgcgggtcgctgcgcgggctataagtaggggccggcggggtgctccgctggagtgatggctgccggcgctctctgcgtggttcttcttctcggccgctgaaacccccgcggctgcttcctgggaaggtcgtgagtcccgctgagctgtccccggtgccgccgacccgggccgtgtgcccgtggctccagccgctgtcgcctcgatctcctcgtctcccgctccgccctcccttttccctggatgaacttgcgtcctttctcttctccgccatggaattctgctccgtgcttttagccctcctgagccaaagaaaccccagacaacagatgcccatacgcagcgtatagcagtaactccccagctcggtttctgtgccgtagtttacagtatttaattttatataatatatattatttattatagcatttttgatacctcatattctgtttacacatcttgaaaggcgctcagtagttctcttactaaacaaccactactccagagaatggcaacgctgattaccagtactacagctgctaccgccgcttctggtcctttggtggactacctatggatgctcatcctgggcttcattattgcatttgtcttggcattctccgtgggagccaatgatgtagcaaattcttttggtacagctgtgggctcaggtgtagtgaccctgaagcaagcctgcatcctagctagcatctttgaaacagtgggctctgtcttactgggggccaaagtgagcgaaaccatccggaagggcttgattgacgtggagatgtacaactcgactcaagggctgctgatggccggctcagtcagtgctatgtttggttctgctgtgtggcaactcgtggcttcgtttttgaagctccctatttctggaacccattgtattgttggtgcaactattggtttctccctcgtggcaaaggggcaggagggtgtcaagtggtctgaactgataaaaattgtgatgtcttggttcgtgtccccactgctttctggaattatgtctggaattttattcttcctggttcgtgcattcatcctccataaggcagatccagttcctaatggtttgcgagctttgccagttttctatgcctgcacagttggaataaacctcttttccatcatgtatactggagcaccgttgctgggctttgacaaacttcctctgtggggtaccatcctcatctcggtgggatgtgcagttttctgtgcccttatcgtctggttctttgtatgtcccaggatgaagagaaaaattgaacgagaaataaagtgtagtccttctgaaagccccttaatggaaaaaaagaatagcttgaaagaagaccatgaagaaacaaagttgtctgttggtgatattgaaaacaagcatcctgtttctgaggtagggcctgccactgtgcccctccaggctgtggtggaggagagaacagtctcattcaaacttggagatttggaggaagctccagagagagagaggcttcccagcgtggacttgaaagaggaaaccagcatagatagcaccgtgaatggtgcagtgcagttgcctaatgggaaccttgtccagttcagtcaagccgtcagcaaccaaataaactccagtggccactaccagtatcacaccgtgcataaggattccggcctgtacaaagagctactccataaattacatcttgccaaggtgggagattgcatgggagactccggtgacaaacccttaaggcgcaataatagctatacttcctataccatggcaatatgtggcatgcctctggattcattccgtgccaaagaaggtgaacagaagggcgaagaaatggagaagctgacatggcctaatgcagactccaagaagcgaattcgaatggacagttacaccagttactgcaatgctgtgtctgaccttcactcagcatctgagatagacatgagtgtcaaggcagagatgggtctaggtgacagaaaaggaagtaatggctctctagaagaatggtatgaccaggataagcctgaagtctctctcctcttccagttcctgcagatccttacagcctgctttgggtcattcgcccatggtggcaatgacgtaagcaatgccattgggcctctggttgctttatatttggtttatgacacaggagatgtttcttcaaaagtggcaacaccaatatggcttctactctatggtggtgttggtatctgtgttggtctgtgggtttggggaagaagagttatccagaccatggggaaggatctgacaccgatcacaccctctagtggcttcagtattgaactggcatctgccctcactgtggtgattgcatcaaatattggccttcccatcagtacaacacattgtaaagtgggctctgttgtgtctgttggctggctccggtccaagaaggctgttgactggcgtctctttcgtaacatttttatggcctggtttgtcacagtccccatttctggagttatcagtgctgccatcatggcaatcttcagatatgtcatcctcagaatgtgaagctgtttgagattaaaatttgtgtcaatgtttgggaccatcttaggtattcctgctcccctgaagaatgattacagtgttaacagaagactgacaagagtctttttatttgggagccagaggagggaagtgttacttgtgctataactgcttttgtgctaaatatgaattgtctcaaaattagctgtgtaaaatagcccgggttccactggctcctgctgaggtcccctttccttctgggctgtgaattcctgtacatatttctctactttttgtatcaggcttcaattccattatgttttaatgttgtctctgaagatgacttgtgatttttttttcttttttttaaaccatgaagagccgtttgacagagcatgctctgcgttgttggtttcaccagcttctgccctcacatgcacagggatttaacaacaaaaatataactacaacttcccttgtagtctcttatataagtagagtccttggtactctgccctcctgtcagtagtggcaggatctattggcatattcgggagcttcttagagggatgaggttctttgaacacagtgaaaatttaaattagtaacttttttgcaagcagtttattgactgttattgctaagaagaagtaagaaagaaaaagcctgttggcaatcttggttatttctttaagatttctggcagtgtgggatggatgaatgaagtggaatgtgaactttgggcaagttaagtgggacagccttccatgttcatttgtctacctcttaactgaataaaaaagcctacagtttttagaaaaaaaaaaaaaaa

SEQ ID NO: 625 - DNA, 2284 bp, Homo sapiens
gcggtgccgcccgccgtggccgcctcagcccaccagccgggaccgcgagccatgctgtccgccgcccgcccccagggttgttaaagccagactgcgaactctcgccactgccgccaccgccgcgtcccgtcccaccgtcgcgggcaacaaccaaagtcgccgcaactgcagcacagagcgggcaaagccaggcaggccatggggctctgggcgctgttgcctggctgggtttctgctacgctgctgctggcgctggccgctctgcccgcagccctggctgccaacagcagtggccgatggtggggtattgtgaacgtagcctcctccacgaacctgcttacagactccaagagtctgcaactggtactcgagcccagtctgcagctgttgagccgcaaacagcggcgtctgatacgccaaaatccggggatcctgcacagcgtgagtggggggctgcagagtgccgtgcgcgagtgcaagtggcagttccggaatcgccgctggaactgtcccactgctccagggccccacctcttcggcaagatcgtcaaccgaggctgtcgagaaacggcgtttatcttcgctatcacctccgccggggtcacccattcggtggcgcgctcctgctcagaaggttccatcgaatcctgcacgtgtgactaccggcggcgcggccccgggggccccgactggcactgggggggctgcagcgacaacattgacttcggccgcctcttcggccgggagttcgtggactccggggagaaggggcgggacctgcgcttcctcatgaaccttcacaacaacgaggcaggccgtacgaccgtattctccgagatgcgccaggagtgcaagtgccacgggatgtccggctcatgcacggtgcgcacgtgctggatgcggctgcccacgctgcgcgccgtgggcgatgtgctgcgcgaccgcttcgacggcgcctcgcgcgtcctgtacggcaaccgcggcagcaaccgcgcttcgcgggcggagctgctgcgcctggagccggaagacccggcccacaaaccgccctccccccacgacctcgtctacttcgagaaatcgcccaacttctgcacgtacagcggacgcctgggcacagcaggcacggcagggcgcgcctgtaacagctcgtcgcccgcgctggacggctgcgagctgctctgctgcggcaggggccaccgcacgcgcacgcagcgcgtcaccgagcgctgcaactgcaccttccactggtgctgccacgtcagctgccgcaactgcacgcacacgcgcgtactgcacgagtgtctgtgaggcgctgcgcggactcgcccccaggaacgctctcctcgagccctcccccaaacagactcgctagcactcaagacccggttattcgcccacccgagtacctccagtcacactccccgcggttcatacgcatcccatctctcccacttcctcctacctggggactcctcaaaccacttgcctggggcggcatgaaccctcttgccatcctgatggacctgccccggacctacctccctccctctccgcgggagaccccttgttgcactgccccctgcttggccaggaggtgagagaaggatgggtcccctccgccatggggtcggctcctgatggtgtcattctgcctgctccatcgcgccagcgacctctctgcctctcttcttcccctttgtcctgcgttttctccgggtcctcctaagtcccttcctattctcctgccatgggtgcagaccctgaacccacacctgggcatcagggcctttctcctccccacctgtagctgaagcaggaggttacagggcaaaagggcagctgtgatgatgtggaaatgaggttgggggaaccagcagaaatgcccccattctcccagtctctgtcgtggagccattgaacagctgtgagccatgcctccctgggccacctcctaccccttcctgtcctgcctcctcatcagtgtgtaaataatttgcactgaaacgtggatacagagccacgagtttggatgttgtaaataaaactatttattgtgctgggtcccagcctggtttgcaaagaccacctccaacccaacccaatccctctccactcttctctcctttctccctgcagccttttctggtccctcttctctcctcagtttctcaaagatgcgtttgcctcctggaatcagtatttccttccactgtagctattagcggctcctcgcccccaccagtgtagcatcttcctctgcagaataaaatctctattttta

SEQ ID NO: 626 - DNA, 5802 bp, Homo sapiens
gccgcccctgagcagcctcgccttcgcctcccgcgtttcctgccgtccgccctcccccggccgagctccaggggctgccgcctagcagctcccggcgggagagcggttcagagcgcgcacgggggcgggcggaggcggcccggtgcggggcggccgcgctggagagaggcgcgcgcggagacgccggcccccctctccgcgtttgctcgcttgctccccgcctcccgcactccgctcgctcccaccccttcccggcgtgattgatccgtcacgggcgccgccgctgccgccgccgccgccgcggccgttctgagccgagccggaaccctagcccgagacggagccggggcccgggccggcgccattgcgcgggcgccgcgggaagaccttggcgcggggcggcgggccgggccaggccatgcgggccgagtgagccggcgcccgcagcccgcggcgcggcatggcttccccgcggagctccgggcagcccgggccgccgccgccgccgccaccgccgcccgcgcgcctgctactgctactgctgctgccgctgctgctgcctctggcgcccggggcctggggctgggcgcggggcgccccccggccgccgcccagcagcccgccgctctccatcatgggcctcatgccgctcaccaaggaggtggccaagggcagcatcgggcgcggtgtgctccccgccgtggaactggccatcgagcagatccgcaacgagtcactcctgcgcccctacttcctcgacctgcggctctatgacacggagtgcgacaacgcaaaagggttgaaagccttctacgatgcaataaaatacgggcctaaccacttgatggtgtttggaggcgtctgtccatccgtcacatccatcattgcagagtccctccaaggctggaatctggtgcagctttcttttgctgcaaccacgcctgttctagccgataagaaaaaatacccttatttctttcggaccgtcccatcagacaatgcggtgaatccagccattctgaagttgctcaagcactaccagtggaagcgcgtgggcacgctgacgcaagacgttcagaggttctctgaggtgcggaatgacctgactggagttctgtatggcgaggacattgagatttcagacaccgagagcttctccaacgatccctgtaccagtgtcaaaaagctgaaggggaatgatgtgcggatcatccttggccagtttgaccagaatatggcagcaaaagtgttctgttgtgcatacgaggagaacatgtatggtagtaaatatcagtggatcattccgggctggtacgagccttcttggtgggagcaggtgcacacggaagccaactcatcccgctgcctccggaagaatctgcttgctgccatggagggctacattggcgtggatttcgagcccctgagctccaagcagatcaagaccatctcaggaaagactccacagcagtatgagagagagtacaacaacaagcggtcaggcgtggggcccagcaagttccacgggtacgcctacgatggcatctgggtcatcgccaagacactgcagagggccatggagacactgcatgccagcagccggcaccagcggatccaggacttcaactacacggaccacacgctgggcaggatcatcctcaatgccatgaacgagaccaacttcttcggggtcacgggtcaagttgtattccggaatggggagagaatggggaccattaaatttactcaatttcaagacagcagggaggtgaaggtgggagagtacaacgctgtggccgacacactggagatcatcaatgacaccatcaggttccaaggatccgaaccaccaaaagacaagaccatcatcctggagcagctgcggaagatctccctacctctctacagcatcctctctgccctcaccatcctcgggatgatcatggccagtgcttttctcttcttcaacatcaagaaccggaatcagaagctcataaagatgtcgagtccatacatgaacaaccttatcatccttggagggatgctctcctatgcttccatatttctctttggccttgatggatcctttgtctctgaaaagacctttgaaacactttgcaccgtcaggacctggattctcaccgtgggctacacgaccgcttttggggccatgtttgcaaagacctggagagtccacgccatcttcaaaaatgtgaaaatgaagaagaagatcatcaaggaccagaaactgcttgtgatcgtggggggcatgctgctgatcgacctgtgtatcctgatctgctggcaggctgtggaccccctgcgaaggacagtggagaagtacagcatggagccggacccagcaggacgggatatctccatccgccctctcctggagcactgtgagaacacccatatgaccatctggcttggcatcgtctatgcctacaagggacttctcatgttgttcggttgtttcttagcttgggagacccgcaacgtcagcatccccgcactcaacgacagcaagtacatcgggatgagtgtctacaacgtggggatcatgtgcatcatcggggccgctgtctccttcctgacccgggaccagcccaatgtgcagttctgcatcgtggctctggtcatcatcttctgcagcaccatcaccctctgcctggtattcgtgccgaagctcatcaccctgagaacaaacccagatgcagcaacgcagaacaggcgattccagttcactcagaatcagaagaaagaagattctaaaacgtccacctcggtcaccagtgtgaaccaagccagcacatcccgcctggagggcctacagtcagaaaaccatcgcctgcgaatgaagatcacagagctggataaagacttggaagaggtcaccatgcagctgcaggacacaccagaaaagaccacctacattaaacagaaccactaccaagagctcaatgacatcctcaacctgggaaacttcactgagagcacagatggaggaaaggccattttaaaaaatcacctcgatcaaaatccccagctacagtggaacacaacagagccctctcgaacatgcaaagatcctatagaagatataaactctccagaacacatccagcgtcggctgtccctccagctccccatcctccaccacgcctacctcccatccatcggaggcgtggacgccagctgtgtcagcccctgcgtcagccccaccgccagcccccgccacagacatgtgccaccctccttccgagtcatggtctcgggcctgtaagggtgggaggcctgggcccggggcctcccccgtgacagaaccacactgggcagaggggtctgctgcagaaacactgtcggctctggctgcggagaagctgggcaccatggctggcctctcaggaccactcggatggcactcaggtggacaggacggggcagggggagacttggcacctgacctcgagccttatttgtgaagtccttatttcttcacaaagaagaggaacggaaatgggacgtcttccttaacatctgcaaacaaggaggcgctgggatatcaaacttgcaaaaaaaaaaaaaaaaaaaaaaaaacaaaaaaactagacaaggagagaggcactagaactccagctggaagtcacggagtggctcgagcagccttgggaagaggcaaggagcttctgaagaaactgcctctgcacacacatcactggctgtgacccctcaggctagcccttctccactctgggggaggaggtgggaagggccaccaggcccccagctgccaggccagctgaccccagccttcctggaacagggagtctgcaggagcgcagacaggcacagccctggagcaggcaggccgagggctgcggcactggagcaggctgacttacatgctccacatgggacctgtgtcacccaatgagatgtttgttactctggtaaatgccacacgttaacacaataacacccattcctgggaccgtggggatttagggcacgtcactgcagacacgctctgcagcattcaccgacagtctgtcatgcacccaccacgttggccatgtccttgtgttcctatcggatgctcccagtaaccagggggaccacccgagctaatcatggaatgtctgttcccagcaaacacgataaagaaagattgtgcactttaacctctctcatcagggcccaagggctggctgggattttttttttttttttcccactaactttgtttctgaccaaagtgaattggaggcactctgctaaaagacatccccgtagacataggggagagagttgctggctgagggcttcccttggcttccagaaggcagccttccatccagacaagccagtgagctctccccttgggatcactggggtgatcagtcagcagattgattctcattcataagatcattcctccctttaaattgagcccctaagagcactggcctgggagtcagacagacctgggttcaagtcctcagtcccctgcccactccctacgtgactttgatcaggtcactagtgtctctctgagcctcagtttcccctctgtaacttggggttgaactaaaacacctgtcctgcctacctcacaaggtcactctgaggattgaaacttgatcttgtccaggaaagctttgtaccaaacagtgaagccgccctgatccgtgaggtatgagtatgactctgaccttcagccctccctacagccgggggtgtggcccagagaagcttccagcacagccctctacccagaacatccgggctggagggaggctcccagtgacttttctgacattcctagacaggttcattctttgctcaagaaaggcctgaatgacaatgtccaggatgtctgcacaactgagcagctcgctcactccctaaagaaacctattggcagcttcaacaggcaggcaataatctcttcccagaaccactgcagtcaggaataaactgttttctccaccaggctttgacaaaagggcccacaggaatcttaccaatgccaacatttcaaagcaccctatttcacgtagcatagctttctgctccccttccccaaagagaggttatggaggtactgtagcttttagggaaaaaaaaatgttaacacatcacaggtcaagttgaagtcattctctgtttaggcactaaaaatcggtgttgtcactcactgtgtattaccagtatttacttgctttcttgatttcaccaaaaccaaatttaatttaaaggaccacattaatttttcaaagggaaagagacaattaattgtacataatgtatacacacacacaaaaaaaaatacctgtagaaatattattccagcatagcaggaaaacaaacaaaagtattggactgtcggaggtgagcctgtgcgtctgtaaccctttgtgactcctgagcgtgcgctgtcttctaggttaactcacgaagtacattctctgtcttactgatactgtaggttcacccatttttttttaatttcctcgcaaataacaagacccacagaagtgactctagctacttaatggttctgttcttttatatgcagcaaacacaccgtccatttctgaagaggcttcggcctgaaggcattttccaatgatgttagtgcacaaaacgctttaaattagactggaactgccagaatcaaatgtaaatgaggaatttctcgtacccctactgcatggtatcgatttttaataaattgttgcaaatttgtttttatgaataaaaggaaaaaacctgtcgtctttaaaaaaaaaaaaaaaa

SEQ ID NO: 627 - DNA, 2386 bp, Homo sapiens
aggcttacgtttactttgcgccggaaagagaacctgtaaacgctctcggaattatggcggcggtggatatccgagacaatctgctgggaatttcttgggttgacagctcttggatccctattttgaacagtggtagtgtcctggattacttttcagaaagaagtaatcctttttatgacagaacatgtaataatgaagtggtcaaaatgcagaggctaacattagaacacttgaatcagatggttggaatcgagtacatccttttgcatgctcaagagcccattcttttcatcattcggaagcaacagcggcagtcccctgcccaagttatcccactagctgattactatatcattgctggagtgatctatcaggcaccagacttgggatcagttataaactctagagtgcttactgcagtgcatggtattcagtcagcttttgatgaagctatgtcatactgtcgatatcatccttccaaagggtattggtggcacttcaaagatcatgaagagcaagataaagtcagacctaaagccaaaaggaaagaagaaccaagctctatttttcagagacaacgtgtggatgctttacttttagacctcagacaaaaatttccacccaaatttgtgcagctaaagcctggagaaaagcctgttccagtggatcaaacaaagaaagaggcagaacctataccagaaactgtaaaacctgaggagaaggagaccacaaagaatgtacaacagacagtgagtgctaaaggcccccctgaaaaacggatgagacttcagtgagtactggacaaaagagaagcctggaagactcctcatgctagttatcatacctcagtactgtggctcttgagctttgaagtactttattgtaaccttcttatttgtatggaatgcgcttattttttgaaaggatattaggccggatgtggtggctcacgcctgtaatcccagcactttgggaggccatggcgggtggatcacttgaggtcagaagttcaagaccagcctgaccaatatggtgaaaccccgtctctactaaaaatacaaaaattagccgggcgtggtggcgggcgcccatagtcccagctactcgggaggctgagacaggagacttgcttgaacccgggaggtggaggttgccctgagctgattatcatgctgttgcactccagcttgggcgacagagcgagactttgtctcaaaaaagaagaaaagatattattcccatcatgatttcttgtgaatatttgttatatgtcttctgtaacctttcctctcccggacttgagcaacctacacactcacatgtttactggtagatatgtttaaaagcaaaataaaggtatttgtatatattgcttcatcatgacttttttcttcatcataactgatatttttcagatgcactttgaagacataaaggatgttaaagtagtaactaagcatatttctttttgttcagttacataatcctcagtattaaaataaacagttgctgacattttggaagatgaagaaaaggaaaaacctcactcaccaataccattaccctataaatactgtaacagtgttgtgaattttaatcttattctgtgtgtagatacttcttttttcaataaagaaaaggaattttattttttttaaagttatggaggctgagaagtccagcattgattggctccatctggtgagggccttcttgctggtaggaagtctgcaaagtccctaggcagcacagggtatctcatggcaagggggctgagtgtgcttgctgcatgtagatgcttttaaaactgtactttaatcattcctttcgtacaattttactttattatatctgttgtaagcttttccccatgtttatgtagtttttatagactgttttagtgtccgaatttctgtaaatgattgtatctcagttttctttctgtcttatatttgggatttttcccagtttacattattttatataagactgctgtgattatatctttgtataatgccttttcagtgtttggtatttatttccttaggatagagttccagaagtggaatcactagagtctctgcatttttattgctcttagtccatattgctaagttgttcctcaaaatgttggactagtgatcactcaaacagcgaagtttgaaagtatgtatcaggttttccagaattgctaccactgaattttgtcatttatgtttttagtgttaagtagcaaaagtggtattttagtatttaaagtagttgaagaatttctcatctttttctgcttttatgaaatgtctaattttatgtattgtgtgagatttttgtctttcaacttcttattttgacataatttccggcaaacagaaaagttgtaagaata

SEQ ID NO: 628 - DNA, 5425 bp, Homo sapiens
cccgggccaccgcctccgcccggctgcccgcccggactgtcgcggcccgcggtggcgacggcggccgctgcaaagtttccccggcggcggcggcccgggggcgcatcctcccgcaactgtcaagcgctggcggcggaaatgatgaggcgctggccattttccgagcccgggtttcctgcctgagccccgctcgagcgagccgcgagcgaggagccggcgggcgggagaggacgcgcccagggcgggggcccgcccgccccctcgggatttcgagggcccgggggcgcgcgacgccatgggccggccgggcccagagctcctgtctctcagcccggccgcaccacctgggtctccgccatgaacgggcctgccctgcagccctcctcgccctcttccgcgccctcagcctccccggcggcggccccgcggggctggagcgagttctgtgagttgcacgccgtagcggcggcccgggagctggcccgccagtactggctgttcgcccgggagcatccgcagcacgcgccgctgcgcgccgagctggtgtcgctgcagttcaccgacctcttccagcgctacttctgccgcgaggtgcgcgacggacgggcgccgggccgcgactaccgggacacaggccgtgggcccccagccaaggccgaggcgtccccggagccaggccccggccccgccgcccctggcctgcccaaggcccgcagctctgaggagctggccccgccgcggccgcccgggccctgctccttccagcactttcgccgcagcctccgccacatcttccgccgccgctcggccggggagctgccagcggcccacaccgctgccgcccccgggacccccggagaggctgctgagacccccgcccggcctggcctggccaagaagttcctgccctggagcctggcccgggagccgccacccgaggcgctgaaggaggcggtgctgcgctacagcctggccgacgaggcctccatggacagcggggcacgctggcagcgcgggaggctggcgctgcgccgggccccgggccccgatggccccgaccgcgtgctggagctcttcgacccacccaagagttcaaggcccaagctacaagcagcttgctccagcatccaggaggtccggtggtgcacacggcttgagatgcctgacaacctttacacctttgtgctgaaggtgaaggaccggacagacatcatctttgaggtgggagacgagcagcagctgaattcatggatggctgagctctcggagtgcacaggccgagggctggagagcacagaagcagagatgcatattccctcagccctagagcctagcacgtccagctccccaaggggcagcacagattcccttaaccaaggtgcttctcctggggggctgctggacccggcctgccagaagacggaccatttcctgtcctgctacccctggttccacggccccatctccagagtgaaagcagctcagctggttcagctgcagggccctgatgctcatggagtgttcctggtgcggcagagcgagacgcggcgtggggaatacgtgctcactttcaactttcaggggatagccaagcacctgcgcctgtcgctgacagagcggggccagtgccgtgtgcagcacctccactttccctcggtcgtggacatgctccaccacttccagcgctcgcccatcccactcgagtgcggcgccgcctgtgatgtccggctctccagctacgtggtagtcgtctcccaaccaccaggttcctgcaacacggtcctcttccctttctcccttcctcactgggattcagagtcccttcctcactggggttcagagttgggccttccccaccttagttcttctggctgtccccgggggctcagcccagagggtctcccagggcgatcctcaccccccgagcagatcttccacctggtgccttcgcccgaagaactggccaacagcctgcagcacctggagcatgagcctgtgaatcgagcccgggactcggactacgaaatggactcatcctcccggagccacctgcgggccatagacaatcagtacacacctctctgaccagtgaggaattccaggcctcaacagctgcccttgaggagcacaggcagaagtgtgaacttgtgaatgtaattgatctttccttccttccagagaaagatttaagggacactgttaactgctcgtgccagtttggaagtgacccttctattaggcctgttgaagggccctcctgtaggtttcatctatccacctggctttctccttattgtttacagatgtagttcttgttagaggatgccgctagctcctgcccggggtccctatgcccagtccccgttactcttagagaaaggagttggggtgagggccagagctggcagtggaaacttgttctctttttcactgacactgtcacagcggatgacagactttctacggggaggagggggggatcatcaggaagcccagaacactaacaagcggttctcccatctaccgtcagtccacatggcaggtctgctgtgtccacaccacagatgaccacatctaatcctgcttctactctcagctttaggacaaaagctctgtcagaggcacaagctgaaggtcaaaaatgatttaaaacattttacctcagactaatttctttaaaggattcaggttcaaaacttaaccactgcttatttcagtgcactgtttcaactaacacccatgctatttttgtagtcagaaacagctatgcaaaccctacctaatttacagtctgagccagcatgctggcttgtctactgcatcctcgggacagtcacctgccactgagtggccactgtccttcctaaatgtcaagaagtgaagtatgtcaccctttcagggaaattcaggcaattactgaaataggagggtggcaagaacagttctatcctggtgccttacgaataaaaaactggattctggtttacagcagctttacagtgatagttaaattaactggggctaggggaagagcaagcaaaaagggaagaaggactcctaggccctttctagtaaatccttcagcaacaaggctggcttggtgccctccaagcatctaatggcttattaaattatcccacaagtgggttttaggctccttttttgagccaaaatggaagctgggaatctggtgccataactaatgagaaactcctttaatagcccacaatcagtgttctgttctagctggctactgcttcactggattgagaatctatctatctccttgcacacatgggcacacacaatctccaccatccagggaggtcctgaagtcaaatctctatctatacaagtgatacaattcatagggggctggctcctcccagaacctgtctggaggctcagaaacgggggcagtgacagtggagtcagctgctcttgggtgccagcagagccattcagtacaacccccaggctcacagcagtggcttctaggaaactgggagtttagatcagctttacagatacatcgatcagaggctaaaatgaaacctcagcctaaaactcataggactgactgcctgggaggagggttaggtctgcttcttccacttatacttagtctctgtgctccaagaggtcaaatttttgcttctagaatttccttggggtctttcagagggtgggggaacaaacccctatgcacttttcttttttttttttttgagatggagtttctcttgtcaaccgggctggagtgcagtggtgcaatcttggctcactgcaacctccaccttcctggttcaagcgattctgcctcgacctctcaagtagctgggattacaagcaccagccaccatgcctggctaattttgtatttttagtagagacagggtttcaccatgttggccaggctggtctcgaatgtctgacctcaggtgatccacccgccttggcctcccaaagtgctgggattacaggcgcgagccaccgcgcccagcctacaccacttttagtaccaacactcttgggtgatttcatggaccctaaagcagacctgacactgatccagatttgcagtccatttttaaggacacctgtctttatttcctcaaagtcaagcagctttctctggaaaatgaatgctaattagtgtgaaccaaaagagtaagtaagagtctgaagtttttttaaaggagaaagcttattatggaaagtcactggtcctcccctccgcacaggaaaggtacccagtagataatgaaccaaattaagttccctccctccagccagaagttaaacatctgggatatgacgtcttcatgccaggggcactcatttcttagcagcctctctacatacatctctcaggtggtgccaagaggcacaccaggtagagcaaacttagcagctctgactaacaggctgcaaagtgcaagttcagattctgtggcagagatttggaaggcacccacctccagactgcttcccgtccaagttaccaggacagctcaaaaacatgctgacagaaaactcccatggctctaggaagaagtgacactaagccaacacctttctttatgtgggagcagaatcagctgatgaaggggtgggcagcagtgtggggcaggcaccccactggctgcagctagcccaccataggcacagcacatcccaccactctccttccagtcctgaccaggccccagccggcaacttctaccgagagccatggctcaacaccaaactggacagtagacatcatgatccctccagttagctctaattacagaccccaccagtacagcttgacagctcccggcaccatcccttccttcatctgacttattgaacttttacaaactaacagtcaccagcaccaaagaattaagtcaactaacctgccttgaattttagaccagcaatccatatggctttatctggtataaatcttctgcctttgatcatttctggaccgtaggaaaaaggaatagcaatcattaaaatcttgggccagagaacactatttttacataacagtttcttaacctaaagtcaaggccttggactcttccctgagggttgcctgagattccttcatgctttctattcaggactaagtcccttactgcaaatgtgttagctctaacatctcccacaagctagaggaacttgcgagtatattaacaaggacacatctgacatcctgtgtttggttagaatatacagcacattgtgataacataaagtggattcatcttgtatcattataggcagaaggtatttggcaaatttttatgtattgttttatgtactgtacaagtaacttattcttgaataatgcaaattttgctataatgtacaaattgctatatgtgaattaaaaagttttcagaatcttgaaaaaaaaaaaaaaaaaaaa

SEQ ID NO: 629 - DNA, 2938 bp, Homo sapiens
gcgcgggccgctgtgaggcgcggcggcgagcgacgggcgcggggccgcggagcagcgagcgagcgagcgagcgcgaggccggagccccggccaggcccggccgacccgccgagcccgcgatgcgccccggggccgccccccggcgcagctgacgccccgcggccccgcgaagaccccggccggccggtcccggaggaagcggccgccgccgccgccgcccagcccagcgcccgcgccgcccgggcaccatggcggggaaggcggccgccccgggcaccgcggtgctgctggtcacggccaacgtgggctcgctcttcgacgacccagaaaacctgcagaagaactggcttcgggaattttaccaggtcgtgcacacacacaagccgcacttcatggccttgcactgtcaggagtttggagggaagaactacgaggcctccatgtcccacgtggacaagttcgtcaaagaactattgtcgagtgatgcgatgaaagaatataacagggctcgagtctacctggatgaaaactacaaatcccaggagcacttcacggcactaggaagcttttattttcttcatgagtccttaaaaaacatctaccagtttgactttaaagctaagaagtatagaaaggtcgctggcaaagagatctactcggataccttagagagcacgcccatgctggagaaggagaagtttccgcaggactacttccccgagtgcaaatggtcaagaaaaggcttcatccggacgaggtggtgcattgcagactgtgcctttgacttggtgaatatccatcttttccatgatgcttccaatctggtcgcctgggaaacaagcccttccgtgtactcgggaatccggcacaaggcactgggctacgtgctggacagaatcattgatcagcgattcgagaaggtttcctactttgtatttggtgatttcaacttccggctggattccaagtccgtcgtggagacgctctgcacaaaagccaccatgcagacggtccgggccgccgacaccaatgaagtggtgaagctcatatttcgtgagtcggacaacgaccggaaggttatgctccagttagaaaagaaactcttcgactacttcaaccaggaggttttccgagacaacaacggcaccgcgctcttggagtttgacaaggagttgtctgtctttaaggacagactgtatgaactggacatctcgttccctcccagctacccgtacagtgaggacgcccgccagggtgagcagtacatgaacacccggtgcccagcctggtgtgaccgcatcctcatgtccccgtctgccaaggagctggtgctgcggtcggagagcgaggagaaggttgtcacctatgaccacattgggcccaacgtctgcatgggagaccacaagcccgtgttcctggccttccgaatcatgcccggggcaggtaaacctcatgcccatgtgcacaagtgttgtgtcgtgcagtgacgtggtgggaagagatgccagcgccacgagaggacacttcgtgagcctccctgtagccgtggaccgaatacgcactcttgaaagctgcatcgagaacccgcccaagcgccacctgctagacggccagccccacacttcgcttcagcctccggaccattccggagcagcctcacatacctcactgtctcgtctgtctatgtgacattaagtagaaatattggttttttttttttttttttaaataagtcacagtcctgttgtcaaaactctaatagacagcaaagagggtctgtaccgtagacttcacagttttcagtttttaatgattgccagtggaggggcttcttcagcacagagaccccccactgtgtccagggaccccctctgccaggtggaggtgtgtccaggggctggggaagccgagacgggcactccctctgccggccggcagcgtggccctgagcatggcaagggggtctgtctctgccgatgctccttccgcggcactgactctgcgccgtgtcacatggtttttgaatcacactgcagctgctttccatttttatatatatataaatatatataaatatatactttttaaaaataatttataaatcttaccaaaacttatgctaaatatactttccagtatgaacgcacaggagagtcccatcagcaggcggcattggagtctaggagctcagctgtgtgtccatcaacacacaaattcgtaaaaaacacacatggcctcgccatcgtgggtaaaatcggccccacagcacgtctgcaccagcgggccgttactcccatgccgttcttctgtgtaatattaagaactgaatgtgaagtttatagctagcctgggtgtaccttttaagaattttgtaaaccgtttgtctgtcttttgttactgttttatggtgccaagtatcctacgttacaacaataatatcatgggagaaatagaaatagcctagtttgcttccaatagaaactgcttttaacatgggctgtatataaaaatattaaagagaaacaaaactgtacatttcctcattgctccgctacagacaacccatgtcataaccttgttgcaaatatttttctcctatagcagtaagtacagcattagaaggtgattagagagtctgttgatgaaacacaaatgtatgttttattgattttactttagaacactacagagttcctggaccgggtgaaggcattagctgggtgtttgtgtgggataaatactaccactgcaagtgactgctgtccgctgcggaatctgttcttggtggaagcacaggtccgtgtcgctgctgtggttgccgctgtccgcggttcaacacggagtccgccccgcgggtttcagctgttggtcgttctgaggggcctttggaagtgaccggtctggttcctaagcaataaaattgaccgtggtgaaaata

SEQ ID NO: 630 - DNA, 2312 bp, Homo sapiens
aagcagttgttttgctggaaggagggagtgcgcgggctgccccgggctcctccctgccgcctcctctcagtggatggttccaggcaccctgtctggggcagggagggcacaggcctgcacatcgaaggtggggtgggaccaggctgcccctcgccccagcatccaagtcctcccttgggcgcccgtggccctgcagactctcagggctaaggtcctctgttgctttttggttccaccttagaagaggctccgcttgactaagagtagcttgaaggaggcaccatgcaggagctgcatctgctctggtgggcgcttctcctgggcctggctcaggcctgccctgagccctgcgactgtggggaaaagtatggcttccagatcgccgactgtgcctaccgcgacctagaatccgtgccgcctggcttcccggccaatgtgactacactgagcctgtcagccaaccggctgccaggcttgccggagggtgccttcagggaggtgcccctgctgcagtcgctgtggctggcacacaatgagatccgcacggtggccgccggagccctggcctctctgagccatctcaagagcctggacctcagccacaatctcatctctgactttgcctggagcgacctgcacaacctcagtgccctccaattgctcaagatggacagcaacgagctgaccttcatcccccgcgacgccttccgcagcctccgtgctctgcgctcgctgcaactcaaccacaaccgcttgcacacattggccgagggcaccttcaccccgctcaccgcgctgtcccacctgcagatcaacgagaaccccttcgactgcacctgcggcatcgtgtggctcaagacatgggccctgaccacggccgtgtccatcccggagcaggacaacatcgcctgcacctcaccccatgtgctcaagggtacgccgctgagccgcctgccgccactgccatgctcggcgccctcagtgcagctcagctaccaacccagccaggatggtgccgagctgcggcctggttttgtgctggcactgcactgtgatgtggacgggcagccggcccctcagcttcactggcacatccagatacccagtggcattgtggagatcaccagccccaacgtgggcactgatgggcgtgccctgcctggcacccctgtggccagctcccagccgcgcttccaggcctttgccaatggcagcctgcttatccccgactttggcaagctggaggaaggcacctacagctgcctggccaccaatgagctgggcagtgctgagagctcagtggacgtggcactggccacgcccggtgagggtggtgaggacacactggggcgcaggttccatggcaaagcggttgagggaaagggctgctatacggttgacaacgaggtgcagccatcagggccggaggacaatgtggtcatcatctacctcagccgtgctgggaaccctgaggctgcagtcgcagaaggggtccctgggcagctgcccccaggcctgctcctgctgggccaaagcctcctcctcttcttcttcctcacctccttctagccccacccagggcttccctaactcctccccttgcccctaccaatgcccctttaagtgctgcaggggtctggggttggcaactcctgaggcctgcatgggtgacttcacattttcctacctctccttctaatctcttctagagcacctgctatccccaacttctagacctgctccaaactagtgactaggatagaatttgatcccctaactcactgtctgcggtgctcattgctgctaacagcattgcctgtgctctcctctcaggggcagcatgctaacggggcgacgtcctaatccaactgggagaagcctcagtggtggaattccaggcactgtgactgtcaagctggcaagggccaggattgggggaatggagctggggcttagctgggaggtggtctgaagcagacagggaatgggagaggaggatgggaagtagacagtggctggtatggctctgaggctccctggggcctgctcaagctcctcctgctccttgctgttttctgatgatttgggggcttgggagtccctttgtcctcatctgagactgaaatgtggggatccaggatggccttccttcctcttacccttcctccctcagcctgcaacctctatcctggaacctgtcctccctttctccccaactatgcatctgttgtctgctcctctgcaaaggccagccagcttgggagcagcagagaaataaacagcatttctgatgccaaaaaaaaaaaaaaaaa

SEQ ID NO: 631 - DNA, 3701 bp, Homo sapiens
taggcggtgcatcccgttcgcgcctggggctgtggtcttcccgcgcctgaggcggcggcggcaggagctgaggggagttgtagggaactgaggggagctgctgtgtcccccgcctcctcctccccatttccgcgctcccgggaccatgtccgcgctggcgggtgaagatgtctggaggtgtccaggctgtggggaccacattgctccaagccagatatggtacaggactgtcaacgaaacctggcacggctcttgcttccggtgttcagaatgccaggattccctcaccaactggtactatgagaaggatgggaagctctactgccccaaggactactgggggaagtttggggagttctgtcatgggtgctccctgctgatgacagggccttttatggtggctggggagttcaagtaccacccagagtgctttgcctgtatgagctgcaaggtgatcattgaggatggggatgcatatgcactggtgcagcatgccaccctctactgtgggaagtgccacaatgaggtggtgctggcacccatgtttgagagactctccacagagtctgttcaggagcagctgccctactctgtcacgctcatctccatgccggccaccactgaaggcaggcggggcttctccgtgtccgtggagagtgcctgctccaactacgccaccactgtgcaagtgaaagaggtcaaccggatgcacatcagtcccaacaatcgaaacgccatccaccctggggaccgcatcctggagatcaatgggacccccgtccgcacacttcgagtggaggaggtggaggatgcaattagccagacgagccagacacttcagctgttgattgaacatgaccccgtctcccaacgcctggaccagctgcggctggaggcccggctcgctcctcacatgcagaatgccggacacccccacgccctcagcaccctggacaccaaggagaatctggaggggacactgaggagacgttccctaaggcgcagtaacagtatctccaagtcccctggccccagctccccaaaggagcccctgctgttcagccgtgacatcagccgctcagaatcccttcgttgttccagcagctattcacagcagatcttccggccctgtgacctaatccatggggaggtcctggggaagggcttctttgggcaggctatcaaggtgacacacaaagccacgggcaaagtgatggtcatgaaagagttaattcgatgtgatgaggagacccagaaaacttttctgactgaggtgaaagtgatgcgcagcctggaccaccccaatgtgctcaagttcattggtgtgctgtacaaggataagaagctgaacctcctgacagagtacattgaggggggcacactgaaggactttctgcgcagtatggatccgttcccctggcagcagaaggtcaggtttgccaaaggaatcgcctccggaatggcctatttgcactctatgtgcatcatccaccgggatctgaactcgcacaactgcctcatcaagttggacaagactgtggtggtggcagactttgggctgtcacggctcatagtggaagagaggaaaagggcccccatggagaaggccaccaccaagaaacgcaccttgcgcaagaacgaccgcaagaagcgctacacggtggtgggaaacccctactggatggcccctgagatgctgaacggaaagagctatgatgagacggtggatatcttctcctttgggatcgttctctgtgagatcattgggcaggtgtatgcagatcctgactgccttccccgaacactggactttggcctcaacgtgaagcttttctgggagaagtttgttcccacagattgtcccccggccttcttcccgctggccgccatctgctgcagactggagcctgagagcagaccagcattctcgaaattggaggactcctttgaggccctctccctgtacctgggggagctgggcatcccgctgcctgcagagctggaggagttggaccacactgtgagcatgcagtacggcctgacccgggactcacctccctagccctggcccagccccctgcaggggggtgttctacagccagcattgcccctctgtgccccattcctgctgtgagcagggccgtccgggcttcctgtggattggcggaatgtttagaagcagaacaagccattcctattacctccccaggaggcaagtgggcgcagcaccagggaaatgtatctccacaggttctggggcctagttactgtctgtaaatccaatacttgcctgaaagctgtgaagaagaaaaaaacccctggcctttgggccaggaggaatctgttactcgaatccacccaggaactccctggcagtggattgtgggaggctcttgcttacactaatcagcgtgacctggacctgctgggcaggatcccagggtgaacctgcctgtgaactctgaagtcactagtccagctgggtgcaggaggacttcaagtgtgtggacgaaagaaagactgatggctcaaagggtgtgaaaaagtcagtgatgctccccctttctactccagatcctgtccttcctggagcaaggttgagggagtaggttttgaagagtcccttaatatgtggtggaacaggccaggagttagagaaagggctggcttctgtttacctgctcactggctctagccagcccagggaccacatcaatgtgagaggaagcctccacctcatgttttcaaacttaatactggagactggctgagaacttacggacaacatcctttctgtctgaaacaaacagtcacaagcaaaggaagaggctgggggactagaaagaggccctgccctctagaaagctcagatcttggcttctgttactcatactcgggtgggctccttagtcagatgcctaaaacattttgcctaaagctcgatgggttctggaggacagtgtggcttgtcacaggcctagagtctgagggaggggagtgggagtctcagcaatctcttggtcttggcttcatggcaaccactgctcacccttcaacatgcctggtttaggcagcagcttgggctgggaagaggtggtggcagagtctcaaagctgagatgctgagagagatagctccctgagctgggccatctgacttctacctcccatgtttgctctcccaactcattagctcctgggcagcatcctcctgagccacatgtgcaggtactggaaaacctccatcttggctcccagagctctaggaactcttcatcacaactagatttgcctcttctaagtgtctatgagcttgcaccatatttaataaattgggaatgggtttggggtattaatgcaatgtgtggtggttgtattggagcagggggaattgataaaggagagtggttgctgttaatattatcttatctattgggtggtatgtgaaatattgtacatagacctgatgagttgtgggaccagatgtcatctctggtcagagtttacttgctatatagactgtacttatgtgtgaagtttgcaagcttgctttagggctgagccctggactcccagcagcagcacagttcagcattgtgtggctggttgtttcctggctgtccccagcaagtgtaggagtggtgggcctgaactgggccattgatcagactaaataaattaagcagttaacataactggcaa

SEQ ID NO: 632 - DNA, 1634 bp, Homo sapiens
ggagagaaggaagaaggaaggggcgaacggcgtgagctggcgccgaaatgggagaaagcagcgagtgagaggggaaggggcgccaggcgagcacccgggagccagcgggacctgggcaggggcgcccggagcaggcgcgcatggcgggccccgcgcggggatccggctggaagagagcgtagcacggctcgcacgagtccggggccgatgtaccaggtgagcggccagcgcccctctggctgcgacgcgccctatggagcccccagcgcagccccgggcccagcccagaccctatccctccttcctgggctggaggtagtaacaggatccactcaccctgcggaggcagcaccagaggagggctccctggaggaggcggcaacccccatgccccaaggcaatggccctggcatcccccagggcctggacagcactgacctcgacgtccccacagaagctgtgacatgccagcctcaggggaaccccttgggctgcaccccacttctgccgaatgactctggccacccctcagagctgggcggcaccagacgggcggggaatggtgccctgggtggccccaaggcccaccggaagttgcagacacacccatctctcgccagccagggcagcaagaagagtaagagcagcagcaaatccaccacctcccagatccccctccaggcacaggaagactgctgtgtccactgcatcctgtcctgcctgttctgcgagttcctgacgctgtgcaacatcgtcctggactgcgccacctgtggctcctgcagctcggaggactcgtgcctctgctgctgctgctgtggctctggcgagtgtgccgactgcgacctgccctgcgacctggactgcggcatcctggatgcctgctgcgagtccgcggactgcctggagatctgcatggagtgctgtgggctctgcttctcctcctgagcctctgtcgggggctaagccagcctggcgcccctgcagattccagcagggtccctctgagtggggccaggcccaggactgtcacacaaggcttgagaagccccctctccctggtcctctcctacccacccatgtcctctcagaaccccagccttgaaaatagtggggggcactcagaggggccacctcctcagccgtgggtggtgggcccatggcagagaagcctgaactctttactgggttaccaggttcatacattgctgaggacctgacaggacaacctaggggcagggctggggtggggaccgcagggggcagccagggctggggaacactgtgaaagttacttggggagggtgggccggtggggccgtagctctctacctctccctgctcctggtgcctgcctctctcctccaccccaggcttagaggacagaaaaatgtgaagagacgccccacccaccctcagccagccctctccagtctcctttcctaggcttttttgggggcctaacccacgcagtgaccccagagggcagggctaggcgagagcctggggtggggcgggagggggaacagtatggaaaagactggaaggggaaaggaagggaagggagggagggtctgttctatctgttgctgtaaataaagatatttgtccatctcaaaaaaaaaaaaaaaaaa

SEQ ID NO: 633 - DNA, 2555 bp, Homo sapiens
ccggcgcgccgcggggtgagcggcgccgggcctgaggtcgcccagacgccgtcggggcggagccgggtcgcgaggctgcatcccggccggcggttccggagcctcgcggctggggaggcgcggcccgggacgctcgagcttagggagatctgccttctggagactgcgccgtcctcccgggagagccagaaagaggacatggctgctgggcagcgggaagcgaggccccaggtgtcactgacgtttgaggatgtggctgtgctgtttacccgagatgagtggagaaagctggccccttctcagagaaacttgtaccgggatgtgatgctggagaactataggaacctggtctcactggggctcccatttaccaaaccaaaagtgatctccctgttgcagcaaggagaagatccctgggaggtggagaaagacggttctggcgtctcctctctaggatcgaagagcagtcataaaaccacaaagtcaacgcaaacacaagactcttcatttcagggactgatactgaaaagatccaacaggaatgtaccttgggatttgaaattagaaaagccttacatatatgaaggcagattagagaaaaagcaggataaaaagggaagttttcagatagtttcagccacccacaaaaaaatccccactatagaaagaagccataaaaatactgaattgagccaaaacttcagcccaaagtcagtgcttattaggcaacagatacttcccagagaaaaaacaccaccaaaatgtgaaatacaaggaaacagcctcaaacagaattcacaattacttaatcaaccaaaaattacagcagataaacgctataaatgtagtctgtgtgaaaaaaccttcattaacacttcatcccttcgtaaacatgagaaaaaccatagtggagagaaactatttaagtgtaaagaatgttcaaaagcctttagccaaagttcagctcttattcaacatcaaataacgcatactggagagaaaccctacatatgtaaagaatgtgggaaagcctttactctcagtacatccctttataaacatctaagaacccatactgtggagaaatcctacagatgtaaagaatgtggtaaatccttcagccgaaggtcaggcctttttatacatcaaaaaattcatgctgaagaaaacccttgtaagtataatccgggtaggaaggcatctagttgcagcacatccctttctggatgtcaaagaattcattctagaaagaagtcctacttatgtaatgaatgtggcaacacctttaagtctagctcatcccttcgttatcatcagagaattcacactggagagaagccttttaaatgtagtgaatgtgggagagccttcagccagagtgcctctcttattcaacatgaaagaattcacaccggagaaaagccctatagatgcaatgaatgtgggaaaggctttacttctatttcacgacttaatagacaccgaatcattcatactggagagaagttttataattgtaatgaatgtggtaaagccttaagctcccactcaacacttattattcacgagcgaattcatactggagaaaaaccatgtaaatgtaaagtatgtggaaaagccttcagacagagttcagctctcattcaacatcagagaatgcatactggagaaagaccctataaatgtaacgagtgtgggaaaacattcaggtgtaactcatcacttagtaatcaccagagaattcatactggagagaaaccatatcgatgtgaggaatgtgggatatcttttggccaaagttcagctcttattcagcatcgaaggattcatacaggagaaaaaccctttaaatgtaatacatgtggaaaaacttttagacaaagctcatcacgtattgcacatcagagaattcatactggagagaaaccctatgaatgtaatacatgtgggaaacttttcaaccataggtcatcccttactaatcattataaaattcatatcgaagaggacccctagaaagtagatttgtatgtgtgaaagccttaaaccaaagctcatcgaagaatacatccttgagagagatgtaataaatgtaatggatgtgaaaaaaactgtaataatttagccctcattaggtatttaattccatggataaacctcagctatataatagatatgaggaaagtgtttgtgcctgtcagacacttaaaaaaataacctgagatgaagaatttacaattgaagacattgactttagccatttgtgaaatgggtttgctttttcccttttcctacagacgtatatgctagatgtcacgtgatcatcagaaacagatatccgagtgggtggggaggtgtgctttagatttctcattagaagaccaccaaactggtaatatttttatagcattttaatagcttgatcaaattgtacctttttagagaaaaggaccaaaataaaagaaaaatgaattatgaactacctctcagtctctggggtttgtccttttcctaccctgatgtcaaacttatgcatggatttcattaaaaaagaa

SEQ ID NO: 634 - DNA, 4088 bp, Homo sapiens
cgcctcgcagcagcgagccgcgagcgcccttctccagtcccggcttggaactgaactgtgtgagcacgggtcctggaacccgggcccagaaccggcgagcccaggtctgagcccagagctcagcggtcagcctcgtaggccctgactcggaatcgagccgaggcgctgaggttggagccggagagcgtgagagccgaagagcagggagggcgggccggctgcgcgtccgacgagtcgcagagcaggaccgcggaaggcagggagacggccgcaagcccagggcagagggcagagggcagagagcggcctggctcggcggagagggcgccgcccggccggaaccaagctcgccgcccgggacggcgggccccgtggggcgcggacccagggtggccgtgggtccgcagcgactccccggccgacggcggggggcgtgccccctcccagcccagcctccccaacccggcccgcccgccgcgtcgcgggggcatgtgagcgggaagcctaggctgccagccgcgaggaccgcacggaggaggagcaggagcgcggagccgcgagccccgagccccgagcccggcgcctggctgagtagatgtccatgaggagccccatctctgcccagctggccctggatggcgttggcaccatggtgaactgcaccatcaagtcagaggagaagaaagagccttgccacgaggccccccagggctcagccactgccgctgaacctcagcctggagacccagcccgggcctcccaggatagtgctgacccccaagctccagcccaggggaatttcaggggctcctgggactgtagctctccagagggtaatgggtccccagaacccaagagaccaggagtgtcggaggctgcctctggaagccaggagaagctggacttcaaccgaaatttgaaagaagtggtgccagccatagagaagctgttgtccagtgactggaaggagaggtttctaggaaggaactctatggaagccaaagatgtcaaagggacccaagagagcctagcagagaaggagctccagcttctggtcatgattcaccagctgtccaccctgcgggaccagctcctgacagcccactcggagcagaagaacatggctgccatgctgtttgagaagcagcagcagcagatggagcttgcccggcagcagcaggagcagattgcaaagcagcagcagcagctgattcagcagcagcataagatcaacctccttcagcagcagatccagcaggttaacatgccttatgtcatgatcccagccttccccccaagccaccaacctctgcctgtcacccctgactcccagctggccttacccattcagcccattccctgcaaaccagtggagtatccgctgcagctgctgcacagcccccctgccccagtggtgaagaggcctggggccatggccacccaccaccccctgcaggagccctcccagcccctgaacctcacagccaagcccaaggcccccgagctgcccaacacctccagctccccaagcctgaagatgagcagctgtgtgccccgcccccccagccatggaggccccacgcgggacctgcagtccagccccccgagcctgcctctgggcttccttggtgaaggggacgctgtcaccaaagccatccaggatgctcggcagctgctgcacagccacagtggggccttggatggctcccccaacacccccttccgtaaggacctcatcagcctggactcatccccagccaaggagcggctggaggacggctgtgtgcacccactggaggaagccatgctgagctgcgacatggatggctcccgccacttccccgagtcccgaaacagcagccacatcaagaggcccatgaacgccttcatggtgtgggccaaggatgagcggaggaagatcctgcaagccttcccagacatgcacaactccagcatcagcaagatccttggatctcgctggaagtccatgaccaaccaggagaagcagccctactatgaggaacaggcgcggctgagccggcagcacctggagaagtatcctgactacaagtacaagccgcggcccaagcgcacctgcatcgtggagggcaagcggctgcgcgtgggagagtacaaggccctgatgaggacccggcgtcaggatgcccgccagagctacgtgatccccccgcaggctggccaggtgcagatgagctcctcagatgtcctgtaccctcgggcagcaggcatgccgctggcacagccactggtggagcactatgtccctcgtagcctggaccccaacatgcctgtgatcgtcaacacctgcagcctcagagaggagggtgagggcacagatgacaggcactcggtggctgatggcgagatgtaccggtacagcgaggacgaggactcggagggcgaagagaagagcgatggggagttggtggtgctcacagactgatcccggctgggtgggcctggccccttctcctctggggaagaccttgtcccaactcgatgggcacagccagccaacctaagactatgttggtacttggacttgttcgtgccccagagatgggcaaagctgtgcacttgcagatacattcatgaggggagaggcgccctcccttcctgaggagctgttggcctgggtgggcaggaactgcagtatggccatgggctgagcaggctgagcacctcagcctttagggcttatggccaggggacactgtatgactctcctctcctgcaggtgtctatccacctggggtatggcatctaccgacctgtctccctggggtcacatgctttgtttccattcttgtcctggctggaccagccactgtgggaccaacacccctcccacactcccccagactgctcgtctatcaccaggatcgctttgtactttgtgcaaaagggtctggctgtcccttgctgttttcatctctgccaagcctattgtgcctctggctgctgtatgtgtgcgcgtgcacgtgtgtgtgtttcatctgttcattcactgcacaagatatttattgagtgcccactacgtgccaggcactgttgctgagttcctgtgggtgtgtctctcgatgccactcctgcttctctgggggcctctttctgtgcttctctttgtccccaaattgctacctctttgtcagtctgggtgtctcaggttctgtgtgtccttgtgtgcatttctgtctctctctgtcctcgtctctctgcaaggccctctatttctctctttcttggtgtctgtcctttgccccctgtgccctctggattctctgggtctatgtaggcccctggtctgccctgggctcatcagccttcctgacctcctcctgccctccccttcactccctccctggctctgccagtcggttcccacggagccatttttagctctgatcagcatgggaatgtgcctcggcctccaaggggctttgtcctggtgcccccgcccctggtcccaacctgatcccacgagggagttgggacaggaggattgatggtgctccccttcctgccagcgtcagaggccctggagaggggctgtccatggcagctggtctttattcctccctcatgagcacagggtcgggggggtccccattcttggaagaggttgagaagactcctgggcttcagcctctcccacccagccctgcccctcacctgcctgccctcccctcccccactctatactagggactggatctcagcctctgatcagtttcacaaagtttgttccctaaggaaatcaaatcccattgtcacctaactctgaagatctaaatagcccttggatcagtatgggaaccccaaatcccacagggccagatgtggagtctgtgtctgcccccgtcttctctccatcctcaaagcccccacttctctccaggctgtttctttttttatgactgtaaacatagatagtgctttattttgttaataataagataatgatgagtaacttaaccagcacatttctcctgtttacactcgggggatttttttgttttctgatgacataataaagacagatcatttcagaaaaaaaaaaaaaaaaa

SEQ ID NO: 635 - DNA, 5851 bp, Homo sapiens
cttgcgcggtgtggcggccgatgccgctataaaggcttgttttgctgcagggctcatgctcgggagcgtggttgagcggctggcgcggttgtcctggagcaggggcgcaggaattctgatgtgaaactaacagtctgtgagccctggaacctccactcagagaagatgaaggatatcgacataggaaaagagtatatcatccccagtcctgggtatagaagtgtgagggagagaaccagcacttctgggacgcacagagaccgtgaagattccaagttcaggagaactcgaccgttggaatgccaagatgccttggaaacagcagcccgagccgagggcctctctcttgatgcctccatgcattctcagctcagaatcctggatgaggagcatcccaagggaaagtaccatcatggcttgagtgctctgaagcccatccggactacttccaaacaccagcacccagtggacaatgctgggcttttttcctgtatgactttttcgtggctttcttctctggcccgtgtggcccacaagaagggggagctctcaatggaagacgtgtggtctctgtccaagcacgagtcttctgacgtgaactgcagaagactagagagactgtggcaagaagagctgaatgaagttgggccagacgctgcttccctgcgaagggttgtgtggatcttctgccgcaccaggctcatcctgtccatcgtgtgcctgatgatcacgcagctggctggcttcagtggaccagccttcatggtgaaacacctcttggagtatacccaggcaacagagtctaacctgcagtacagcttgttgttagtgctgggcctcctcctgacggaaatcgtgcggtcttggtcgcttgcactgacttgggcattgaattaccgaaccggtgtccgcttgcggggggccatcctaaccatggcatttaagaagatccttaagttaaagaacattaaagagaaatccctgggtgagctcatcaacatttgctccaacgatgggcagagaatgtttgaggcagcagccgttggcagcctgctggctggaggacccgttgttgccatcttaggcatgatttataatgtaattattctgggaccaacaggcttcctgggatcagctgtttttatcctcttttacccagcaatgatgtttgcatcacggctcacagcatatttcaggagaaaatgcgtggccgccacggatgaacgtgtccagaagatgaatgaagttcttacttacattaaatttatcaaaatgtatgcctgggtcaaagcattttctcagagtgttcaaaaaatccgcgaggaggagcgtcggatattggaaaaagctgggtacttccagagcatcactgtgggtgtggctcccattgtggtggtgattgccagcgtggtgaccttctctgttcatatgaccctgggcttcgatctgacagcagcacaggctttcacagtggtgacagtcttcaattccatgacttttgctttgaaagtaacaccgttttcagtaaagtccctctcagaagcctcagtggctgttgacagatttaagagtttgtttctaatggaagaggttcacatgataaagaacaaaccagccagtcctcacatcaagatagagatgaaaaatgccaccttggcatgggactcctcccactccagtatccagaactcgcccaagctgacccccaaaatgaaaaaagacaagagggcttccaggggcaagaaagagaaggtgaggcagctgcagcgcactgagcatcaggcggtgctggcagagcagaaaggccacctcctcctggacagtgacgagcggcccagtcccgaagaggaagaaggcaagcacatccacctgggccacctgcgcttacagaggacactgcacagcatcgatctggagatccaagagggtaaactggttggaatctgtggcagtgtgggaagtggaaaaacctctctcatttcagccattttaggccagatgacgcttctagagggcagcattgcaatcagtggaaccttcgcttatgtggcccagcaggcctggatcctcaatgctactctgagagacaacatcctgtttgggaaggaatatgatgaagaaagatacaactctgtgctgaacagctgctgcctgaggcctgacctggccattcttcccagcagcgacctgacggagattggagagcgaggagccaacctgagcggtgggcagcgccagaggatcagccttgcccgggccttgtatagtgacaggagcatctacatcctggacgaccccctcagtgccttagatgcccatgtgggcaaccacatcttcaatagtgctatccggaaacatctcaagtccaagacagttctgtttgttacccaccagttacagtacctggttgactgtgatgaagtgatcttcatgaaagagggctgtattacggaaagaggcacccatgaggaactgatgaatttaaatggtgactatgctaccatttttaataacctgttgctgggagagacaccgccagttgagatcaattcaaaaaaggaaaccagtggttcacagaagaagtcacaagacaagggtcctaaaacaggatcagtaaagaaggaaaaagcagtaaagccagaggaagggcagcttgtgcagctggaagagaaagggcagggttcagtgccctggtcagtatatggtgtctacatccaggctgctgggggccccttggcattcctggttattatggcccttttcatgctgaatgtaggcagcaccgccttcagcacctggtggttgagttactggatcaagcaaggaagcgggaacaccactgtgactcgagggaacgagacctcggtgagtgacagcatgaaggacaatcctcatatgcagtactatgccagcatctacgccctctccatggcagtcatgctgatcctgaaagccattcgaggagttgtctttgtcaagggcacgctgcgagcttcctcccggctgcatgacgagcttttccgaaggatccttcgaagccctatgaagttttttgacacgacccccacagggaggattctcaacaggttttccaaagacatggatgaagttgacgtgcggctgccgttccaggccgagatgttcatccagaacgttatcctggtgttcttctgtgtgggaatgatcgcaggagtcttcccgtggttccttgtggcagtggggccccttgtcatcctcttttcagtcctgcacattgtctccagggtcctgattcgggagctgaagcgtctggacaatatcacgcagtcacctttcctctcccacatcacgtccagcatacagggccttgccaccatccacgcctacaataaagggcaggagtttctgcacagataccaggagctgctggatgacaaccaagctcctttttttttgtttacgtgtgcgatgcggtggctggctgtgcggctggacctcatcagcatcgccctcatcaccaccacggggctgatgatcgttcttatgcacgggcagattcccccagcctatgcgggtctcgccatctcttatgctgtccagttaacggggctgttccagtttacggtcagactggcatctgagacagaagctcgattcacctcggtggagaggatcaatcactacattaagactctgtccttggaagcacctgccagaattaagaacaaggctccctcccctgactggccccaggagggagaggtgacctttgagaacgcagagatgaggtaccgagaaaacctccctctcgtcctaaagaaagtatccttcacgatcaaacctaaagagaagattggcattgtggggcggacaggatcagggaagtcctcgctggggatggccctcttccgtctggtggagttatctggaggctgcatcaagattgatggagtgagaatcagtgatattggccttgccgacctccgaagcaaactctctatcattcctcaagagccggtgctgttcagtggcactgtcagatcaaatttggaccccttcaaccagtacactgaagaccagatttgggatgccctggagaggacacacatgaaagaatgtattgctcagctacctctgaaacttgaatctgaagtgatggagaatggggataacttctcagtgggggaacggcagctcttgtgcatagctagagccctgctccgccactgtaagattctgattttagatgaagccacagctgccatggacacagagacagacttattgattcaagagaccatccgagaagcatttgcagactgtaccatgctgaccattgcccatcgcctgcacacggttctaggctccgataggattatggtgctggcccagggacaggtggtggagtttgacaccccatcggtccttctgtccaacgacagttcccgattctatgccatgtttgctgctgcagagaacaaggtcgctgtcaagggctgactcctccctgttgacgaagtctcttttctttagagcattgccattccctgcctggggcgggcccctcatcgcgtcctcctaccgaaaccttgcctttctcgattttatctttcgcacagcagttccggattggcttgtgtgtttcacttttagggagagtcatattttgattattgtatttattccatattcatgtaaacaaaatttagtttttgttcttaattgcactctaaaaggttcagggaaccgttattataattgtatcagaggcctataatgaagctttatacgtgtagctatatctatatataattctgtacatagcctatatttacagtgaaaatgtaagctgtttattttatattaaaataagcactgtgctaataacagtgcatattcctttctatcatttttgtacagtttgctgtactagagatctggttttgctattagactgtaggaagagtagcatttcattcttctctagctggtggtttcacggtgccaggttttctgggtgtccaaaggaagacgtgtggcaatagtgggccctccgacagccccctctgccgcctccccacggccgctccaggggtggctggagacgggtgggcggctggagaccatgcagagcgccgtgagttctcagggctcctgccttctgtcctggtgtcacttactgtttctgtcaggagagcagcggggcgaagcccaggccccttttcactccctccatcaagaatggggatcacagagacattcctccgagccggggagtttctttcctgccttcttctttttgctgttgtttctaaacaagaatcagtctatccacagagagtcccactgcctcaggttcctatggctggccactgcacagagctctccagctccaagacctgttggttccaagccctggagccaactgctgctttttgaggtggcactttttcatttgcctattcccacacctccacagttcagtggcagggctcaggatttcgtgggtctgttttcctttctcaccgcagtcgtcgcacagtctctctctctctctcccctcaaagtctgcaactttaagcagctcttgctaatcagtgtctcacactggcgtagaagtttttgtactgtaaagagacctacctcaggttgctggttgctgtgtggtttggtgtgttcccgcaaaccccctttgtgctgtggggctggtagctcaggtgggcgtggtcactgctgtcatcaattgaatggtcagcgttgcatgtcgtgaccaactagacattctgtcgccttagcatgtttgctgaacaccttgtggaagcaaaaatctgaaaatgtgaataaaattattttggattttgtaaaaaaaaaa

SEQ ID NO: 636 - DNA, 3098 bp, Homo sapiens
attactcctattgtgtaggttcccacctgcaagagtgctgtcgggtcctctgaggtgaaaccccaaaggaaagcgggatcgggactgggggagggggattcccaagtccctgacacccgcgccgtctcggcctgggcttggtgacctcgtcagtcccgtctgccgggactaggccgcggccaggccgggcacagcggtacccggtccggcgcgtgtgcggcctgctgacaaaaggccgagcccgcagggccaatccgcgcgccaccccgtagcgcctgggggcgggagcgggcgagccgagaagctcgtcttggcgcgtctattggctggtactgacgcccatccggaccccgaggccaggcagttggccaaggggggcggggttcgcagagccccaatgaatgggggagccggaagcaggaagtgagtttgcgaacggagcagctgctgcagggcccatggcggacacccagtacatcctgcccaatgacatcggcgtgtctagcctggactgccgtgaggccttccgcctgctgtcacccacagagcgcctctatgcctaccacctgtcccgtgccgcctggtacggaggcctggctgtgctgcttcagacctcccctgaggccccctacatctatgctctgctcagccgcctcttccgcgcccaggaccccgaccagctgcgccaacatgccctggctgaaggccttaccgaggaggagtatcaggcgttcctggtctatgccgcgggtgtttactccaacatgggcaactacaagtcctttggtgacaccaagtttgttcccaacttgcccaaggaaaagctggaacgggtgatcctagggagtgaggctgctcagcagcacccagaagaagtcaggggcctctggcagacctgcggggagcttatgttctctctggagccaaggcttcgacacctcggactggggaaggagggaatcaccacctatttctctgggaattgtaccatggaagatgccaaattggcccaggactttctggactcacagaacctcagtgcctacaacacccggctcttcaaagaggtcgatggagaagggaagccctactacgaggtgcggctggcttctgtgcttggctcagagccttccctggactctgaggtgacttccaagctgaagagctatgaattccggggaagccctttccaggtgacccggggggactacgcgcccatcctccagaaggtggtggagcagctggagaaagccaaggcctatgcagccaacagccaccaggggcagatgctggcccagtatatagagagcttcacccagggctccatcgaggcccacaagaggggctcccgcttctggatccaggacaaaggccccatcgtggagagttacatcgggttcatcgagagctaccgcgacccctttggttcccgaggagaatttgaaggtttcgtagctgtggtgaacaaggccatgagtgccaagtttgagcggctggtggcgagcgcagagcagctgctgaaggagctgccctggcccccaacctttgagaaggacaagttcctcacccctgacttcacctccctggatgttctcaccttcgctggctccggcatccctgccggcatcaacatccccaactacgatgatctgaggcagacggaaggctttaagaacgtgtcgctggggaatgtgctggctgtggcctacgccacgcagcgggagaagcttacctttctggaggaggatgacaaggacctgtacatcctctggaaggggccctccttcgatgtgcaggtgggcctgcacgagctgctgggccatggcagtggcaagctcttcgtacaggacgaaaaaggagcattcaactttgaccaggaaacagtgatcaacccagagacgggcgagcagattcagagctggtatcggagcggggagacctgggatagcaagttcagcaccatcgcctccagctacgaagagtgccgggctgagagcgtgggtctctacctctgtctccacccgcaagtgctggagatctttggctttgagggggctgatgcggaggacgtgatctacgtgaactggctcaacatggttcgggccgggctgctcgctctggagttctacacacctgaggccttcaactggcgacaggcccatatgcaggcccggtttgtgatcctgagagtcttgctggaggctggcgagggactcgttaccatcactcccaccacaggctccgatgggcgcccagatgcccgggtccgcctcgaccgcagcaagatccggtctgtgggcaagcctgctctagagcgcttcctgcggagacttcaggtgctgaagtccacaggggatgtggccggagggcgggccctgtacgaggggtatgcaacagtcactgatgcgccccccgagtgcttcctcaccctcagggacacggtgctgctgcgtaaggaatctcggaagctcattgttcagcccaacactcgccttgaaggctcagacgtgcagcttctggaatacgaggcgtcagctgctggcctcatccgatccttctctgagcgtttcccagaggatggacccgagttggaggagatcctcacacagctggccacagccgatgcccgattctggaagggccccagtgaggccccatctggccaagcttgaggaagatgtgtggccttgcccccaattccatcagaccaaggctgcaagtggccctccattcgtgtgtgtatttaggggctggggagggggaggggcaggagcttggaccttggtactacctcagctgagggtggtgacacaaccccttccatttgtcagcactttccagcctgccaattgcttcccctctgtgatctcatttcatctgcactgccatacgtggagtgagcaagacagggcttaccatcctgtctaccagatgaggaaatggcagttctgagaagtcactggtctagatcccgcaggtggcacgtgacagctagggttcaaaacgttctcaccaaatccaatgctcctcacatattaattttataaccagacaaataaatattagagacaaccaccatcaaaaaaaaaaaaaaaaaa

SEQ ID NO: 637 - DNA, 1964 bp, Homo sapiens
ggcgccgctgcgggagaggcccggtctggagtttgcggagggccgagccgggtgcgcacggggaggcggaggcagcggcggcggcggcggcggcggcggcggcggcggagcagatgaagaaactgaggccctgtgatgtgaagtgacttgccccccagccacacagctggaccattctggctgctgtctggacaagaagtcgtagggggtgagggtggaagctgggaaacccacaggaggcaaccacactagtttagatcttctggtgaccccacttctcgctgctcatgccgctgggactggggcggcggaaaaaggcgccccctctagtggaaaatgaggaggctgagccaggccgtggagggctgggcgtgggggagccagggcctctgggcggaggtgggtcggggggcccccaaatgggcttgcccccccctcccccagccctgcggccccgcctcgtgttccacacccagctggcccatggcagtcccactggccgcatcgagggcttcaccaacgtcaaggagctgtatggcaagatcgccgaggccttccgcctgccaactgccgaggtgatgttctgcaccctgaacacccacaaagtggacatggacaagctcctggggggccagatcgggctggaggacttcatcttcgcccacgtgaaggggcagcgcaaggaggtggaggtgttcaagtcggaggatgcactcgggctcaccatcacggacaacggggctggctacgccttcatcaagcgcatcaaggagggcagcgtgatcgaccacatccacctcatcagcgtgggcgacatgatcgaggccattaacgggcagagcctgctgggctgccggcactacgaggtggcccggctgctcaaggagctgccccgaggccgtaccttcacgctgaagctcacggagcctcgcaaggccttcgacatgatcagccagcgttcagcgggtggccgccctggctctggcccacaactgggcactggccgagggaccctgcggctccgatcccggggccccgccacggtggaggatctgccctctgcctttgaagagaaggccattgagaaggtggatgacctgctggagagttacatgggtatcagggacacggagctggcggccaccatggtggagctgggaaaggacaaaaggaacccggatgagctggccgaggccctggacgaacggctgggtgactttgccttccctgacgagttcgtctttgacgtctggggcgccattggggacgccaaggtcggccgctactaggactgcccccggaccctgcgatgatgacccgggcgcaacctggtgggggcccccagcagggacactgacgtcaggacccgagcctccagcctgagcctagctcagcagcccaaggacgatggtgaggggaggtggggccaggccccctgccccgctccaatcggtaccatcccctccctggttcccagtctggccggggtccccggcccccctgtgccctgttccccacctacctcagctgggtcaggcacagggaggggagggatcagccaaattgggcggccacccccgcctccaccactttccaccatcagctgccaaactggtccctctgtctccctggggccttgggttctgtttgggggtcatgaccttcctagtttcctgacgcagggaatacaggggagagggttgtccttccccccagcaaatgcaataatgccctcacccctcctgagaggagccccctccctgtggagcctgttacctccgcatttgacacgagtctgctgtgaaccccgcaacctcctccccacctcccatctctccttccaggcccatccctggcccagagcaggagggagggagggacgatggcggtgggtttttgtatctgaatttgctgtcttgaacataaagaatctatctgctgttggaaaaaaaaaaaaaaaaaaa

SEQ ID NO: 638 - DNA, 3213 bp, Homo sapiens
ggagcctgccgctccccgcgctcgtagcgcgggcctggggactggggatcccgccgccgggccgcagcatggggcgcttccgcgggggcctgcggtgcatcaagtacctgctgcttggcttcaacctgctcttctggctggctggatcggccgtcattgcttttggactatggtttcggttcggaggtgccataaaggagttatcatcagaggacaagtccccagagtatttctatgtggggctgtatgttctggttggagccggggccctgatgatggccgtggggttcttcgggtgctgcggagccatgcgggagtcgcaatgtgtgcttggatcattttttacctgcctcctggtgatatttgctgctgaagtaaccactggagtatttgcttttataggcaagggggtagctatccgacatgttcagaccatgtatgaagaggcttacaatgattaccttaaagacaggggaaaaggcaatgggacactcatcaccttccactcaacatttcagtgctgtggaaaagaaagctccgaacaggtccaacctacatgcccaaaggagcttctaggacacaagaattgcatcgatgaaattgagaccataatcagtgttaagctccagctcattggaattgtcggtattggaattgcaggtctgacgatctttggcatgatattcagcatggtcctctgctgtgcgatacgaaactcacgagatgtgatatgaagctacttctacatgaaaattgcaatctaaagctttcataccaaatgtcacaggagctgtctcccagctcatttttaacactgaaatgacattaggatctaaaataatttgctgtcaattgtacatttgcatgagtacgtatgtttggctcattactggtttaccccttgagtgaatgcctgtttatgatgactgagagcatattcatgtgtgatctgcgtgtttctggaatatgctttatacgtaatgaaatctgtttgctgggaattcctgattcttgttatataagaagaacaacctatttcgctcccagaaaaaaaagatcaaagagctttcagaaactttgagaacttggctatttagaaaaagtgataatgggtcagtttctcagactgtagccattgaaaattagatgcagagaattcagagatttcttcttaatggaagtaataagctgtaagaattgagagatcacaatggagtgttaaaactgactgtgtctaagttgggtgtaagggtttcctgggtttttttatatacatgctctccccagaatacagtaaaccacagttttagaactaaacacatctgtaaaactaaatatagcatggaaaatccaatttgaataagtcatgctttcctagaatttaaaaataaaaaagtcttcctctggaaagagaagtcacacagacaatcatgtgccctataaaagtgagtgtttataggactaaaaaacttttaacaactttttaaggaaatatttttgttcttatacaaaaacatgtaaatattgctttattactttcattttctgaccctgctgtaaactactgcaaccctcacatcctcaaagggacttttatgtcaaactcttctgtttctccaaatataaggaaaaaagactaaagcaagagatctggcagttgaaaattgtgggaaagagaatttgtatgggcactgtatctatgaaatacctcataacttacgtttacatgttttcctaactttttgtatttttcttgtatagccacctagagaattcttcatagattaagaactacagttttcaccacttaacataagtaaaacaaagtccttcataatttaaccattagcatctttggccaaaccaaaataaagaaaagcatcttctcctagttgtgtgtgggcaacagaaacaagttaaggaaacaaaaatacttatatatacacagaacaaaaataatgttctttttatgcaaatcccctgtgaaaataaaattttcaatgtttttttggtcttaacgcttcattttaacttagtaaacccaaatttaggatttacattggcaaatttttcagtgatttttaacgtgttacatttagtaaaccatagattttttaaaaactacattttgtaaggccacacataagtgaaaatacggaaggctttggaaacccccagatgaacttctatacatgtgaaaacacaagtctttgagtgtgcactaaaagtgtcacactcccaaaaaactcacaaaacattttgctaaaaagatatgactgcttgaaatagtctctctcccatggagaaccacatttctctttctgccatacttgctactgctactgattttggaggaaatttttctagaagaacaaaggtcatatttgaggcaagctaaaaacttaattatacatggctactttactgtgtctgtagctaaagaaaaattattttacaaaaattacttcatgaaatatagtttgtaccccagtagttgagaaatgtgaccttttaggcaaagaacaggcagtccatctctcttagctttagtttatctctctgcctgaagacaggaaacaggcccaagtgcatactcgggttctttccaactcagaatcatctctgattccacaaaagtgagtttagtttcctatctgaattaacaactttaaaggagactataatagttaaaagtggaagaatagaaataaataaatttaaaatgaaattaattaaagtagaagagaagggttctgttccatgtacgattaatgtgccccttttggagataagctttccaaaatatgcgtatgagtaaaattagagaattccaccactaagcaacaatagattttatatgtgtgtgtggatatatatacacacacacacagaaagatgaatatatatatatatatatctgtatagacacacatataatatatatagatatataatccctatatatcttgaatctacaaatatctttatatgtatataatttgaatatatacatgtatgtatatacagatgtgtgtgtatatatatatatacatacacatatacataaattttcagctatttctgttcccctgaactaatttgagattagacccaaacatgcttttaaatgtctcatgccaaggcactgaattaagacttcttaatgttgaaatattttaagtgatttcatattaaattttctatatactgaaa

SEQ ID NO: 639 - DNA, 7346 bp, Homo sapiens
gcgaggaggaaacggtgccggagcgcgcagggcttgctgccgccaccgccgctgcacaggctgccggagcgagcctgccgcgcgccgccctccccgctctccttcctgggcgagctgcggggatggggcggccgcgggagcccgagcgcgcgcaggaaccgccgccgccgccgcccgcgtctccgttgccgcgcgcctgagccgccgtcgccgccgcgcgccctgcccgggggcggcccccccagccccatggaggtctcccggaggaaggcgccgccgcgccccccgcgccccgcagcgccactgcccctgctcgcctatctgctggcactggcggctcccggccggggcgcggacgagcccgtgtggcggtcggagcaagccatcggagccatcgcggcgagccaggaggacggcgtgtttgtggcgagcggcagctgcctggaccagctggactacagcctggagcacagcctctcgcgcctgtaccgggaccaagcgggcaactgcacagagccggtctcgctggcgccccccgcgcggccccggcccgggagcagcttcagcaagctgctgctgccctaccgcgagggggcggccggcctcggggggctgctgctcaccggctggaccttcgaccggggcgcctgcgaggtgcggcccctgggcaacctgagccgcaactccctgcgcaacggcaccgaggtggtgtcgtgccacccgcagggctcgacggccggcgtggtgtaccgcgcgggccggaacaaccgctggtacctggcggtggccgccacctacgtgctgcctgagccggagacggcgagccgctgcaaccccgcggcatccgaccacgacacggccatcgcgctcaaggacacggaggggcgcagcctggccacgcaggagctggggcgcctcaagctgtgcgagggcgcgggcagcctgcacttcgtggacgcctttctctggaacggcagcatctacttcccctactacccctacaactacacgagcggcgctgccaccggctggcccagcatggcgcgcatcgcgcagagcaccgaggtgctgttccagggccaggcatccctcgactgcggccacggccaccccgacggccgccgcctgctcctctcctccagcctagtggaggccctggacgtctgggcgggagtgttcagcgcggccgctggagagggccaggagcggcgctcccccaccaccacggcgctctgcctcttcagaatgagtgagatccaggcgcgcgccaagagggtcagctgggacttcaagacggccgagagccactgcaaagaaggggatcaacctgaaagagtccaaccaatcgcatcatctaccttgatccattccgacctgacatccgtttatggcaccgtggtaatgaacaggactgttttattcttggggactggagatggccagttacttaaggttattcttggtgagaatttgacttcaaattgtccagaggttatctatgaaattaaagaagagacacctgttttctacaaactcgttcctgatcctgtgaagaatatctacatttatctaacagctgggaaagaggtgaggagaattcgtgttgcaaactgcaataaacataaatcctgttcggagtgtttaacagccacagaccctcactgcggttggtgccattcgctacaaaggtgcacttttcaaggagattgtgtacattcagagaacttagaaaactggctggatatttcgtctggagcaaaaaagtgccctaaaattcagataattcgaagcagtaaagaaaagactacagtgactatggtgggaagcttctctccaagacactcaaagtgcatggtgaagaatgtggactctagcagggagctctgccagaataaaagtcagcccaaccggacctgcacctgtagcatcccaaccagagcaacctacaaagatgtttcagttgtcaacgtgatgttctccttcggttcttggaatttatcagacagattcaactttaccaactgctcatcattaaaagaatgcccagcatgcgtagaaactggctgcgcgtggtgtaaaagtgcaagaaggtgtatccaccccttcacagcttgcgacccttctgattatgagagaaaccaggaacagtgtccagtggctgtcgagaagacatcaggaggaggaagacccaaggagaacaaggggaacagaaccaaccaggctttacaggtcttctacattaagtccattgagccacagaaagtatcgacattagggaaaagcaacgtgatagtaacgggagcaaactttacccgggcatcgaacatcacaatgatcctgaaaggaaccagtacctgtgataaggatgtgatacaggttagccatgtgctaaatgacacccacatgaaattctctcttccatcaagccggaaagaaatgaaggatgtgtgtatccagtttgatggtgggaactgctcttctgtgggatccttatcctacattgctctgccacattgttcccttatatttcctgctaccacctggatcagtggtggtcaaaatataaccatgatgggcagaaattttgatgtaattgacaacttaatcatttcacatgaattaaaaggaaacataaatgtctctgaatattgtgtggcgacttactgcgggtttttagcccccagtttaaagagttcaaaagtgcgcacgaatgtcactgtgaagctgagagtacaagacacctacttggattgtggaaccctgcagtatcgggaggaccccagattcacggggtatcgggtggaatccgaggtggacacagaactggaagtgaaaattcaaaaagaaaatgacaacttcaacatttccaaaaaagacattgaaattactctcttccatggggaaaatgggcaattaaattgcagttttgaaaatattactagaaatcaagatcttaccaccatcctttgcaaaattaaaggcatcaagactgcaagcaccattgccaactcttctaagaaagttcgggtcaagctgggaaacctggagctctacgtcgagcaggagtcagttccttccacatggtattttctgattgtgctccctgtcttgctagtgattgtcatttttgcggccgtgggggtgaccaggcacaaatcgaaggagctgagtcgcaaacagagtcaacaactagaattgctggaaagcgagctccggaaagagatacgtgacggctttgctgagctgcagatggataaattggatgtggttgatagttttggaactgttcccttccttgactacaaacattttgctctgagaactttcttccctgagtcaggtggcttcacccacatcttcactgaagatatgcataacagagacgccaacgacaagaatgaaagtctcacagctttggatgccctaatctgtaataaaagctttcttgttactgtcatccacacccttgaaaagcagaagaacttttctgtgaaggacaggtgtctgtttgcctccttcctaaccattgcactgcaaaccaagctggtctacctgaccagcatcctagaggtgctgaccagggacttgatggaacagtgtagtaacatgcagccgaaactcatgctgagacgcacggagtccgtcgtcgaaaaactcctcacaaactggatgtccgtctgcctttctggatttctccgggagactgtcggagagcccttctatttgctggtgacgactctgaaccagaaaattaacaagggtcccgtggatgtaatcacttgcaaagccctgtacacacttaatgaagactggctgttgtggcaggttccggaattcagtactgtggcattaaacgtcgtctttgaaaaaatcccggaaaacgagagtgcagatgtctgtcggaatatttcagtcaatgttctcgactgtgacaccattggccaagccaaagaaaagattttccaagcattcttaagcaaaaatggctctccttatggacttcagcttaatgaaattggtcttgagcttcaaatgggcacacgacagaaagaacttctggacatcgacagttcctccgtgattcttgaagatggaatcaccaagctaaacaccattggccactatgagatatcaaatggatccactataaaagtctttaagaagatagcaaattttacttcagatgtggagtactcggatgaccactgccatttgattttaccagattcggaagcattccaagatgtgcaaggaaagagacatcgagggaagcacaagttcaaagtaaaagaaatgtatctgacaaagctgctgtcgaccaaggtggcaattcattctgtgcttgaaaaactttttagaagcatttggagtttacccaacagcagagctccatttgctataaaatacttttttgactttttggacgcccaggctgaaaacaaaaaaatcacagatcctgacgtcgtacatatttggaaaacaaacagccttcctcttcgcttctgggtaaacatcctgaagaaccctcagtttgtctttgacattaagaagacaccacatatagacggctgtttgtcagtgattgcccaggcattcatggatgcattttctctcacagagcagcaactagggaaggaagcaccaactaataagcttctctatgccaaggatatcccaacctacaaagaagaagtaaaatcttattacaaagcaatcagggatttgcctccattgtcatcctcagaaatggaagaatttttaactcaggaatctaagaaacatgaaaatgaatttaatgaagaagtggccttgacagaaatttacaaatacatcgtaaaatattttgatgagattctaaataaactagaaagagaacgagggctggaagaagctcagaaacaactcttgcatgtaaaagtcttatttgatgaaaagaagaaatgcaagtggatgtaagcactctggggcctggcttaatctggcaaagttcttcagacgacttgggagcaaaatggctgcttgagctactctgtgtcgttaatttgttgtttgcacataggttccactttgggcactgtctttttaagagaccaaggcacatgcacagcttttagaaagcataccaacccttgtgcctgtgtgtataccgtgggaacccttctgtaaatagagttgaagtggttgttgcaaacagcctccttgtttacagagaatacaaggccagtaagcgaatgtcagtattgtaactacagtctccacttaagcacaatgatataagtggttttgtttgaaaactacagctatgtagcacttgtgctacactgcacctctgcattgtaaagggatactgccagtgctcaaaacaaaatgtgaaatgagtcatttggaaacaaggtgggggtgttagggcaacctcgaggatttgcagcattgaaactttccccagtagttcttggaaaagctgaccgcagaatttggtagtgtacacttagcatttgtgagtgtgtgtgtgtgtttaaaccaaaaactaacagtgttgcaacattgttgaaagggctcgtgtttttcagtggtcatcaactgcactccatcaaactcacctccatttcaccaaggagctctaaagtaaggagagtgggctttatttaaatgaacagcattttaaccagatactttgtcctaatgtatgttccttttcttcatctgttttttcatactaaatgtatttgatagtggacatgttggatattatacaaaaaaatcattaattcatttctgttccaaaacctttgatcagaacgatctgtggaagagtaactccatttctatatgagtgagtgtctccttgctttagatttctggtgaaccctgtggttatgaatacttgtgtgtgatttaaaaaaaaaaagatacattttacatttcatcgaattgctgttcacactggagtattatatataaatatatatatttgaggcccaaggcctgaaaaatattagtatacaacttggtatcttagtcttactatgtactttttgaaagtattcctcgcaggagaaagaatttaaaatacccattttattcatgcctttctttttaaagaattctctatccagttatactgtagtctttttagtgctgattttttaattcctgaatttttgctgctcatgaccagttttaataccactgtgttttccttctattaaaccagaagaagtaaacagcataattggcaactcttgagcttttcttgtggcaggcaccttttacccttggtgctccaaatcccccatctaggaaagaaaattttttcaagtcaaataacattgatcacatattccttgaaatcatttaccaacactgtatggagcattaggatttaaatatgaatttgtcttaaaggcaattcctttttgcttctgtattatctggaaaagcatgagagaggtgacacctcaacaaactgatcagagaaaataagcagttactaccctgataggcaccttcccaatcctgttgcttttgaccattgtctgtccaacggacacacctcaaacaaacaaaactaccaaatagatgacagatcagaataaaggtgagaggtctggtccccattgaaggctgctacagtcttcaaagaggtgaaggagttcataagagaacaacagtaggaaagttgagagccaagggtaggagagttgcccaaaagacttcccctactactttagggtactgaaaactcaaaggatcagctacagctttatctaagtatttactaaatgctacatgagggtgtccctgtccagctttctggcacatgagtcctgtgtggagagttacctcctcttccagggactgtgctgttgggaactttgggcaagtcacttacctctttgtgcctcaatttctgtataatatttctaagctacctcactgaggtggtatgaagattcactaatgtatgtagcgtgtttgtcaatcctccagtgaaaagcactatctagatcacattttggatcacattagccaaatgcagtaaatggccaaattagatgtgtgctgaagacaatcagtcactgggtctatattaaacagcaaccagagcaacaaatggcaaacaatttctattttcaagtttctttgcatatttttttggtgcaaaaccatttataaacttttttttctaacactagtgtctacagcagcattcaaaaaaattctgttaccttttctgtattaggatttaaagtctatttcttattgtatacctgattgaagctgttcttggagatgaatgttttaaatgtctatatccaaaaaataaacattttgatgtaactgtg

SEQ ID NO: 640 - DNA, 5887 bp, Homo sapiens
gaagttgagcaaacacctcctacttcccggccttccatcccagtttcttctaggaattcggagcctcccctgcagcgactcggaagattcgaggcggcgggggacaagtcggcgccccagagcggacgagtcaccaggtgtcaagatgctgcaagtacataggactggactgggcaggctgggggtcagcctctccaagggtcttcaccacaaagctgtgttggccgtccggagggaggatgtgaacgcctgggagagaagggccccgctagctcccaagcacatcaaaggcatcaccaatctgggatacaaggtcttgatacagccttcgaatcggcgggccattcatgataaggactatgtcaaagctggtggcattcttcaggaggatatttctgaagcttgtctaattttaggagttaaaagacctccagaggaaaaattaatgtccaggaagacttatgcatttttctcccacacaataaaagctcaggaggccaatatgggcttgttggatgagattctaaaacaggaaattcgccttattgattatgagaaaatggtggatcatagaggagtacgggtagtggcatttggacagtgggctggtgtggcaggaatgatcaacattttacatggaatgggtttaaggctccttgctttgggacatcacacaccttttatgcacattggcatggctcataactacaggaatagcagtcaggctgtgcaagctgtccgtgatgctggctatgaaatatctttgggtttgatgcctaagtcaataggacccttaacatttgtgttcacaggaactggtaatgtttctaagggagcccaagcaatctttaatgagctaccttgtgaatatgtggagccccatgaattaaaagaagtttcccaaactggagacctcagaaaagtgtatgggacggtgttaagtcgtcatcatcatcttgtcaggaaaacagatgctgtgtatgatcctgcagagtatgacaaacatccggagcgctacataagtcgttttaatactgatattgcaccctatacaacttgcttaattaatggaatctactgggaacaaaacactcctcgcctcctaacccgccaagatgctcagagtctcctggctccgggcaagttctcacctgctggtgtggaaggctgccctgcattaccacacaaactcgtggcaatatgtgacatttcagctgacacaggagggtctatagagtttatgactgagtgtacaacaatagagcatcccttttgcatgtatgatgcagaccagcatattattcatgacagtgttgaaggctcggggatcctgatgtgttccattgacaatttgccggcacagctcccaattgaagctacagaatgctttggagacatgctttacccttatgttgaagaaatgatattatcagacgcgacacagcctcttgaaagtcagaatttttctcctgtggtgagagatgcagtgattacatccaacggtacattacctgataaatataaatatatccagacactccgggagagcagggaacgtgctcagtcactttcaatgggcaccaggagaaaggttttggttcttggatctggctacatatctgagcctgtattagaatatttatcaagagatggcaatatagaaataacagtaggatctgacatgaagaatcaaattgaacagttaggcaagaaatataatattaatcctgttagcatggacatttgtaaacaagaagagaagctgggcttcttggtggcaaaacaggatcttgtcatcagcttgttgccttatgtattgcaccctcttgtggccaaggcctgcatcacaaacaaagttaacatggtcactgcaagctacatcacaccagcactaaaagaattggaaaagagtgtggaagatgctggcatcacaatcattggtgaattgggattggaccctggtctggatcacatgttagcaatggaaacaatagataaagccaaggaagtgggagccacgattgaatcatatatttcctactgtggtgggcttccagcccctgaacattcaaacaatccattgagatataaatttagctggagtccagtgggagttttgatgaatgtaatgcagtctgccacctatctgctcgatggaaaggttgtgaatgttgcaggaggcatctcctttcttgatgccgttacgtccatggatttttttccaggattaaatttggaaggctatcctaacagagacagtacgaaatatgctgagatttatggcatttcttctgctcacactttgttgcgggggacactgagatataagggatatatgaaagctttgaatggatttgtaaaattaggtcttataaacagagaagcgcttcctgcctttagacctgaggccaaccctctcacctggaaacaactcctctgtgacctagttgggatttcaccctcctctgagcatgatgtgttgaaggaagctgttcttaagaaactaggaggagacaatacccagttggaggctgctgaatggttgggcttacttggggatgaacaagttcctcaggcagagtccattctggatgccctctccaagcatttggtcatgaagctttcctatggtcctgaagaaaaagatatgattgtgatgagagacagctttggaatcagacatccttctggacatttagaacataaaacgattgatcttgtggcttatggggacatcaatggcttttcagccatggctaaaaccgtggggttacccaccgccatggcagccaaaatgttgcttgatggtgaaattggagccaaaggcctaatggggcccttttcaaaggagatctatggaccaatattggagcgaattaaagcagaaggcattatatatactacacagagtacaattaaaccataattgggaattatattttgtttttttcttcccaggcaatacacctctgaacatgtgtgtgataaatgggtttgctaatgtgctgttttaaagtataaagcataatatgttttggttaacacaatgtactttttgaactataaatctttattttaatatggaaatgtttggaacaggagatgcaagccactaacagagaactttaataattctaccctgtattttataaatacgtatgtgaaagtgatgatcatgctatttgttaatttattgtgccactttttttcttttgttttttttttgttgttgttgttttttgagatggagtctcgctctgtcacccaggctggagtgcagtggcgcgatctcggctcactgcaagctccgcctcctgggttcacgccattctcctgcctcagcctcccaagtagctgggactacaggcacccgccaccacgcccggctaaattttttgtatttttcagtagagacggggtttcaccatgttagccaggatgtccacttttttcttaaatgaacatattgtcttataaccagcaaatgaagttttacttttttagtcagaaaaaatttcgtcataaagctatatttttatatttttaaaattgatacagttagataccttcagattacctaagttaagtttttgccaaaatgctattttatgccctttttgtaaagttatgatttattttgtaaatatagttccttatagttttctcttgagtgtttggacatgagaatagataagattaaattacaatttacaagatcacttcattaggcacaggaaaagtatttaacaaaattcaacaccctttcacaataaaaaataaaaaataaaaaaccctcaacaaactaggaatagaaggaaacttcctcaacctgataaagggcatctatgaagaacccatggttagcatcatacttaatggtgaaggactggattatttccccctgagatcagaaacaagacaaggatgtctgctttggccatttctattcaacttgtactggacagtcaagaaagggcaattaggcaagaaaataaaataaaagtcatctaggttggaaaggaagaagtataactaaatagagatgggagacgatatggtggttttgtgcatagtaatccaagggaaaactatagaaaatccaaaggcatgatttattaataaataaattcagcaaagttacaggatacaggattaaatatgcagaaattggttatctttcaatatagtatcaatgaataaatcaaaaatgatgttaagaaaacaatttaattttcaacaatggtcaagcttggtggcttgtgcctgtaatcccaacactttgggagtctgaggcagaaagactgctagaggccaggagaccagcctgggaaacagtgagatcccatctctacaaaaacaaacaaacaaaaaacaacaagcaaacaaaaaacagctggatgtgatgacactcatctgtcgtctcagctactcagaggctgaggtgtaaggatggcttgagccccaaagttcgaagctgcaatgagctataactgggtcactgcaatccagcctggatgacagagttagaccttgactcaaaaaaaacaaaaaagaaaagaaaaaaattgacagcatcagaaagagtaaaataccaatataattgagggtccagaaatattgatcacatttatcatcaactgacttttgaaaatagtgctaagacaattcaatgggggcaaaatagtctttttcattaaatgatgcttggaaacatggatatccacatgcaaaataatgaaattggactcctacctcatattgcatataaaaattaactcaaagttgacctaagatctaaatgtaagagctaatattgtaagtatcttcaaagaaaacatggcgtaaatctttctgactttgaattaggcaatgatttcttaaataaatgacactaaaaacacaagcaacaaaagaagaaaataggtaaattaaaattaaaaccatttgtgtttccaaggacaatatcaagaaagcaaaaatacaacccacagaatgagataattttttttaaaatcatgtattagttaagggaggaatttgtatttagaatatgtaaagaactgttacaataataattaaaaggcatataattcaatttttaaaaatcaacaagagatctgaattaacagttctccaaagaagatacacaaaaggccaataagcacatgaaaaggttctcaacatcactagccatcagggaaatgcaaatgagatctacaatgagatatcacttaacactcactggaatagatatataatcaaagtgataatatcaagtgttggtgaggatgcagagaaattggaaccctcatgcactgttggtggatacccacgtgatataaaaacaaatgtctacacaaaaacttgtgcacagatgttctttgcagcattatttataatagcccaaaattgaaacagccctaatttctatcaactaacaagtgaataaacaaaacgtggcatatccatacaaggaatattattcagcaataaaaaaagagatgaagtactgatatgcaccacaacatggaaaaaccttgaaaacatatcaagtgaagaatgccagacatgaaaggccacatattatatgatttcatttatatgaaatgtccagaacaggcgaatatatatagagagaaggcagattagtggttgcttaggctgaagggttggggaggacaaaggggtgactgctaattagtatggggtttcttttttggggtgatgtaaacgttgtaaagttgattgtggtaatggtggcacaactctgaatatactaaaaaccactgaattgtatactttgaatgtttgaactgtgtggtatgtagattttatctcaagttgttataaaaaattaaattacaaatgcaaaaaaaaaaaaaaaaaa

SEQ ID NO: 641 - DNA, 5028 bp, Homo sapiens
gcggccgctgcccgctttgcgccgctcctccctgcgcgagtagcgctggccccggcgtcgaggcggccatggcgacccggagcccgctccccacccaccccgcctgctccgccctcccctccgccccgcgccacctttgatggctcggacctcagccggccaccgccagccctgctcgcgcgcccgcgccgccgccgcccgcgggtattaatagccggcgccgccgcgccctcggccgccgggggcttgggagccgccgatcccggagcccgagccgggagagggagccgccgcagccgccggcgctgtggagatattctctaagccgctttcatcatgggagaaatagagcagaggccgaccccaggatcacgactgggggccccggaaaattcggggatcagtaccttggaacgtggacagaagccgcccccaacaccttcaggaaaactcgtgtccatcaaaatccagatgctggatgacacccaggaggcatttgaagttccacaaagagctcctgggaaggtgctgctggatgcagtttgcaaccacctcaacctcgtggaaggtgactattttggcctcgagtttcctgatcacaaaaagatcacggtgtggctggatctcctaaaacccattgtgaaacagattagaaggccaaagcacgttgttgttaagtttgtggtgaaattctttccgcctgaccacacacaactccaagaagaactcacaaggtacctgttcgcgctgcaggtgaagcaggacttggctcaaggcaggttgacgtgtaatgacaccagcgcagctctcttgatttcacacattgtgcaatctgagattggggattttgatgaagccttggacagagagcacttagcaaaaaataaatacatacctcagcaagacgcactagaggacaaaatcgtggaatttcaccataaccacattggacaaacaccagcagaatcagatttccagctcctagagattgcccgtcggctagagatgtatggaatccggttgcacccggccaaggacagggaaggcacgaagatcaatctggccgttgccaacacgggaattctagtgtttcagggtttcactaagatcaatgccttcaactgggccaaggtgcggaagctgagcttcaagaggaagcgctttctcatcaagctccggccagatgccaatagtgcgtaccaggataccttggaattcctgatggccagtcgggatttctgcaagtccttctggaaaatctgtgttgaacatcatgccttctttagactttttgaagagcccaaaccaaagcccaagcccgtcctctttagccgggggtcatcatttcggttcagtggtcggactcagaagcaggttctcgactatgttaaagaaggaggacataagaaggtgcagtttgaaaggaagcacagcaagattcattctatccggagccttgcttcacagcctacagaactgaattcggaagtgctggagcagtctcagcagagcaccagccttacatttggagaaggtgccgaatctccagggggccagagctgccggcgaggaaaggaaccgaaggtttccgccggggagccggggtcgcacccgagccctgcgccgaggagaagccccgcgggtaacaagcaggcggacggagccgcctcggcgcccacggaggaagaggaggaggtcgttaaggataggacccagcagagtaaacctcagcccccgcagccaagcacaggctccctgactggcagtcctcacctttccgagctgtctgtgaactcgcaggggggagtggcccctgccaacgtgaccttgtctcccaacctgagccccgacaccaagcaggcctctcccttgatcagcccgctgctgaatgaccaggcctgcccccggacggacgatgaggatgagggccggaggaagagattcccaactgataaagcgtacttcatagctaaggaagtgtctaccaccgagcgaacatatctgaaggatctcgaagttatcacttcgtggtttcagagcacagtgagcaaagaggacgccatgccggaagcactgaaaagtctcatattcccgaattttgaacctttgcacaaatttcatactaattttctcaaggaaattgagcaacgacttgccctgtgggaaggccgctcaaatgcccaaatcagagattaccaaagaatcggcgatgtcatgctgaagaacattcagggcatgaagcacctggcggctcacctgtggaagcacagcgaggccttggaggccctggagaatggaatcaagagctcccggcggctggagaacttctgcagagactttgagctgcagaaggtgtgttacctaccgctcaacaccttcctcctgcggccactgcaccggctcatgcactacaagcaggtcctggagcggctgtgcaaacaccacccgccgagccacgccgacttcagggactgccgagccgctttggcagagatcacggagatggtggcacagctccacggtacgatgatcaagatggagaatttccagaagctgcacgaactcaagaaagatttgattggcattgacaatcttgtggttccgggaagggagttcatccgtctgggcagcctcagcaagctctcggggaaggggctccagcagcgcatgttcttcctgttcaacgacgtcctgctatacacgagccgggggctgacggcctccaatcagtttaaagtccacgggcagctcccgctctatggcatgacgattgaggagagcgaagacgagtggggggtgccccactgcctgaccctccggggccagcggcagtccatcatcgtggccgccagttctcggtccgagatggagaagtgggttgaggacatccagatggccattgacctggcggagaagagcagcagccccgcccctgagttcctggccagcagcccccctgacaacaagtcccctgatgaagccaccgcggctgaccaggagtcagaggatgacctgagcgcctcgcgcacatcgctggagcgccaggccccgcaccgcggcaacacaatggtgcacgtgtgctggcaccgcaacaccagcgtctccatggtggacttcagcatcgcagtggagaatcagttgtctggaaacctgctgaggaaattcaaaaacagcaacgggtggcagaagctgtgggtggtgttcacaaacttctgcctgttcttctacaaatcacaccaggacaatcatccccttgccagcctgcctctgctcggctactcgctcaccatcccctctgagtccgagaacatccagaaagactacgtgttcaagctgcacttcaagtcccacgtctactacttcagggcggaaagcgagtacacgttcgaaaggtggatggaagtgatccgcagtgccaccagctctgcctcgcgaccccacgtgttgagtcacaaagagtctcttgtgtattgatggccggacacactcgtttccgcagtggctgctttcctggaagacgtttcctttcttctgtattaatgaagcctggtaaaattaacacctgtctgaaaatcaaaaacatggcttcccagcagctctcctgtctccacagccgcgttttttaaccccgacctctcagcgtctgaatgaacagcgctcccacctccagtcctggcatccgctgggggcgctgttctttagctagtgccagtattaaaacattgtcattacgagagtgccaaatgacatcttccctccaccctgcccctgaaaaacagtacacacacatccgttcaacacaagacagggcaagtgtttttcttcctaaaaaaagttctttcttttattattttcacctattggctgctgcattttacgaagtggacttcccggtgtttgtttgtttgtttgcaatacactcagtgcagccttaagcaaatgagatcattttcagatttcattttttttttcagtctttctacttttgtaataataggaagttagtaggactcacttctctgattaataagcaatttgcagcacacagcgttccactgcggggtttcacgctcacctgaaaacacctgttcccaacctacttcttggtgcaagttgaccaaatcgttttaagtggtaactctttccaaccgtagcagggttgttttctgttaagcaaagccgagatccagtgcaatacctggactgtcaccgtcctgtgagtggtgtacacaatgggaagataataagccgtggtgttttgctgtctgtctgtgtcacaagcatgaaaacccgtgtgtcattgatcagcaccatttgtggtatgttccgtgatgagcgtttagtgagcctgctggctgcagagcactatgaaatcatggtacgtagtccccggcacctgtcgttattcctatatcctcctgcaactgtggtttgaaactgcgcattctctagtagtatatatcgtgcctgtcttcaaaaacatttccctttttatactcattccccccaggcatggggtagtgtcagtcggactgcacagggaacacggtttccagtggctttggcccctactcgggaaacgtctgcctgttctcgatggtgatggggtggctgccattcccttggttttcctaagccctttctaacgagagtctcaaacaagcggaggcgagggccaattcaaccccattctttccagcgccccgcaccatagcacctgcccacctgagaaccaggaacgcaccctctctgtggagctctgactggtgtagctggaaacaaacagcaacttgcaaacggacgaagagcctgccgtgtgttaatcatttgccttacaagatgtaccagacggtttccagtactaacaaagggaataaaaatacctcacgccacaatccagcatattgatgttttaaggcaaaacaaaaaaaaaaaaaaaaaaaaaaaaaaaaaaaaaaaaaaaaaaaaaaaaaaaaaaaaaaaaaaaaaaaaaaaaaaaaaaaaaaaaaaaaaaaaaaaaaaaaaaaa

SEQ ID NO: 642 - DNA, 1189 bp, Homo sapiens
gacaaggtgaacccgcagccggacttctgctgcactggggctccgaatgacccagaatctggggagtgagatggcctcaatcttgcgaagccctcaggctctccagctcactctagccctgatcaagcctgacgcagtcgcccatccactgattctggaggctgttcatcagcagattctaagcaacaagttcctgattgtacgaatgagagaactactgtggagaaaggaagattgccagaggttttaccgagagcatgaagggcgttttttctatcagaggctggtggagttcatggccagcgggccaatccgagcctacatccttgcccacaaggatgccatccagctctggaggacgctcatgggacccaccagagtgttccgagcacgccatgtggccccagattctatccgtgggagtttcggcctcactgacacccgcaacaccacccatggttcggactctgtggtttcagccagcagagagattgcagccttcttccctgacttcagtgaacagcgctggtatgaggaggaagagccccagttgcgctgtggccctgtgtgctatagcccagagggaggtgtccactatgtagctggaacaggaggcctaggaccagcctgatgcaggtctatgaagaccagtggtagtgcccagacttctcctagacatctagtctaaaacattctcctaggaccagggaagcctggcttacagtgccatttctgctgggcaccaccacctgcctgagggcctagctcaccacagcacatcctccaggatctagccttctatctacctcttctctggaatgtttatggtggttcagaagaatgatgactcctctttgctgagaactgttcatccttcttcaagaagaagcttgccaggccgggcacggtggctcacgcctataatcccagcactttgggaggccgaggcaggcggatcacaaggtcaggaattcgagaccagcctgaccaacatggtgaaaccccatctctactaaaaatacaacaattagccaggcatggtggtgcatgcctgtaatcccagctactcagaggctgaggcaggagaattgcttgaacctgggaggcagagggtgcagtgagccgagatcgtgccattgcactccagcctgggcgacattctgtctcaaaaaaaaaaaaaaaaaaaaaa

SEQ ID NO: 643 - DNA, 10650 bp, Homo sapiens
atgcagaaagcccggggcacgcgaggcgaggatgcgggcacgagggcaccccccagccccggagtgcccccgaaaagggccaaggtgggggccggcggcggggctcctgtggccgtggccggggcgccagtcttcctgcggcccctgaagaacgcggcggtgtgcgcgggcagcgacgtgcggctgcgggtggtggtgagcgggacgccccagcccagcctccgctggttccgggatgggcagctcctgcccgcgccggcccccgagcccagctgcctgtggctgcggcgctgcggggcgcaggacgccggcgtgtacagctgcatggcccagaacgagcggggccgggcctcctgcgaggcggtgctcacagtgctggaggtcggagactcagagacggctgaggatgacatcagcgatgtgcagggaacccagcgcctggagcttcgggatgacggggccttcagcacccccacggggggttctgacaccctggtgggcacctccctggacacacccccgacctccgtgacaggcacctcagaggagcaagtgagctggtggggcagcgggcagacggtcctggagcaggaagcgggcagtgggggtggcacccgccgcctcccgggcagcccaaggcaagcacaggcaaccggggccgggccacggcacctgggggtggagccgctggtgcgggcatctcgagctaatctggtgggcgcaagctgggggtcagaggatagcctttccgtggccagtgacctgtacggcagcgcattcagcctgtacagaggacgggcgctctctatccacgtcagcgtccctcagagcgggttgcgcagggaggagcccgaccttcagcctcaactggccagcgaagccccacgccgccctgcccagccgcctccttccaaatccgcgctgctccccccaccgtcccctcgggtcgggaagcggtccccgccgggacccccggcccagcccgcggccacccccacgtcgccccaccgtcgcactcaggagcctgtgctgcccgaggacaccaccaccgaagagaagcgagggaagaagtccaagtcgtccgggccctccctggcgggcaccgcggaatcccgaccccagacgccactgagcgaggcctcaggccgcctgtcggcgttgggccgatcgcctaggctggtgcgcgccggctcccgcatcctggacaagctgcagttcttcgaggagcgacggcgcagcctggagcgcagcgactcgccgccggcgcccctgcggccctgggtgcccctgcgcaaggcccgctctctggagcagcccaagtcggagcgcggcgcaccgtggggcacccccggggcctcgcaggaagaactgcgggcgccaggcagcgtggccgagcggcgccgcctgttccagcagaaagcggcctcgctggacgagcgcacgcgtcagcgcagcccggcctcagacctcgagctgcgcttcgcccaggagctgggccgcatccgccgctccacgtcgcgggaggagctggtgcgctcgcacgagtccctgcgcgccacgctgcagcgtgccccatcccctcgagagcccggcgagcccccgctcttctctcggccctccacccccaagacatcgcgggccgtgagccccgccgccgcccagccgccctctccgagcagcgcggagaagccgggggacgagcctgggaggcccaggagccgcgggccggcgggcaggacagagccgggggaaggcccgcagcaggaggttaggcgtcgggaccaattcccgctgacccggagcagagccatccaggagtgcaggagccctgtgccgccccccgccgccgatcccccagaggccaggacgaaagcaccccccggtcggaagcgggagcccccggcgcaggccgtgcgcttcctgccctgggccacgccgggcctggagggcgctgctgtaccccagaccttggagaagaacagggcggggcctgaggcagagaagaggcttcgcagagggccggaggaggacggtccctgggggccctgggaccgccgaggggcccgcagccagggcaaaggtcgccgggcccggcccacctcccctgagctcgagtcttcggatgactcctacgtgtccgctggagaagagcccctagaggcccctgtgtttgagatccccctgcagaatgtggtggtggcaccaggggcagatgtgctgctcaagtgtatcatcactgccaaccccccgccccaagtgtcctggcacaaggatgggtcagcgctgcgcagcgagggccgcctcctcctccgggctgagggtgagcggcacaccctgctgctcagggaggccagggcagcagatgccgggagctatatggccaccgccaccaacgagctgggccaggccacctgtgccgcctcactgaccgtgagacccggtgggtctacatcccctttcagcagccccatcacctccgacgaggaatacctgagccccccagaggagttcccagagcctggggagacctggccgcgaacccccaccatgaagcccagtcccagccagaaccgccgttcttctgacactggctccaaggcaccccccaccttcaaggtctcacttatggaccagtcagtaagagaaggccaagatgtcatcatgagcatccgcgtgcagggggagcccaagcctgtggtctcctggctgagaaaccgccagcccgtgcgcccagaccagcggcgctttgcggaggaggctgagggtgggctgtgccggctgcggatcctggctgcagagcgtggcgatgctggtttctacacttgcaaagcggtcaatgagtatggtgctcggcagtgcgaggcccgcttggaggtccgagcacaccctgaaagccggtccctggccgtgctggcccccctgcaggacgtggacgtgggggccggggagatggcgctgtttgagtgcctggtggcggggcccactgacgtggaggtggattggctgtgccgtggccgcctgctgcagcctgcactgctcaaatgcaagatgcatttcgatggccgcaaatgcaagctgctacttacatctgtacatgaggacgacagtggcgtctacacctgcaagctcagcacggccaaagatgagctgacctgcagtgcccggctgaccgtgcggccctcgttggcacccctgttcacacggctgctggaagatgtggaggtgttggagggccgagctgcccgtttcgactgcaagatcagtggcaccccgccccctgttgttacctggactcattttggctgccccatggaggagagtgagaacttgcggctgcggcaggacgggggtctgcactcactgcacattgcccatgtgggcagcgaggacgaggggctctatgcggtcagtgctgttaacacccatggccaggcccactgctcagcccagctgtatgtagaagagccccggacagccgcctcaggccccagctcgaagctggagaagatgccatccattcccgaggagccagagcagggtgagctggagcggctgtccattcctgacttcctgcggccactgcaggacctggaggtgggactggccaaggaggccatgctagagtgccaggtgaccggcctgccctaccccaccatcagctggttccacaatggccaccgcatccagagcagcgacgaccggcgcatgacacagtacagggatgtccatcgcttggtgttccctgccgtggggcctcagcacgccggtgtctacaagagcgtcattgccaacaagctgggcaaagctgcctgctatgcccacctgtatgtcacagatgtggtcccaggccctccagatggcgccccgcaggtggtggctgtgacggggaggatggtcacactcacatggaacccccccaggagtctggacatggccatcgacccggactccctgacgtacacagtgcagcaccaggtgctgggctcggaccagtggacggcactggtcacaggcctgcgggagccagggtgggcagccacagggctgcgtaagggggtccagcacatcttccgggtcctcagcaccactgtcaagagcagcagcaagccctcacccccttctgagcctgtgcagctgctggagcacggcccaaccctggaggaggcccctgccatgctggacaaaccagacatcgtgtatgtggtggagggacagcctgccagcgtcaccgtcacattcaaccatgtggaggcccaggtcgtctggaggagctgccgaggggccctcctagaggcacgggccggtgtgtacgagctgagccagccagatgatgaccagtactgtcttcggatctgccgggtgagccgccgggacatgggggccctcacctgcaccgcccgaaaccgtcacggcacacagacctgctcggtcacattggagctggcagaggcccctcggtttgagtccatcatggaggacgtggaggtgggggctggggaaactgctcgctttgcggtggtggtcgagggaaaaccactgccggacatcatgtggtacaaggacgaggtgctgctgaccgagagcagccatgtgagcttcgtgtacgaggagaatgagtgctccctggtggtgctcagcacgggggcccaggatggaggcgtctacacctgcaccgcccagaacctggcgggtgaggtctcctgcaaagcagagttggctgtgcattcagctcagacagctatggaggtcgagggggtcggggaggatgaggaccatcgaggaaggagactcagcgacttttatgacatccaccaggagatcggcaggggtgctttctcctacttgcggcgcatagtggagcgtagctccggcctggagtttgcggccaagttcatccccagccaggccaagccaaaggcatcagcgcgtcgggaggcccggctgctggccaggctccagcacgactgtgtcctctacttccatgaggccttcgagaggcgccggggactggtcattgtcaccgagctctgcacagaggagctgctggagcgaatcgccaggaaacccaccgtgtgtgagtctgagatccgggcctatatgcggcaggtgctagagggaatacactacctgcaccagagccacgtgctgcacctcgatgtcaagcctgagaacctgctggtgtgggatggtgctgcgggcgagcagcaggtgcggatctgtgactttgggaatgcccaggagctgactccaggagagccccagtactgccagtatggcacacctgagtttgtagcacccgagattgtcaatcagagccccgtgtctggagtcactgacatctggcctgtgggtgttgttgccttcctctgtctgacaggaatctccccgtttgttggggaaaatgaccggacaacattgatgaacatccgaaactacaacgtggccttcgaggagaccacattcctgagcctgagcagggaggcccggggcttcctcatcaaagtgttggtgcaggaccggctgagacctaccgcagaagagaccctagaacatccttggttcaaaactcaggcaaagggcgcagaggtgagcacggatcacctgaagctattcctctcccggcggaggtggcagcgctcccagatcagctacaaatgccacctggtgctgcgccccatccccgagctgctgcgggcccccccagagcgggtgtgggtgaccatgcccagaaggccaccccccagtggggggctctcatcctcctcggattctgaagaggaagagctggaagagctgccctcagtgccccgcccactgcagcccgagttctctggctcccgggtgtccctcacagacattcccactgaggatgaggccctggggaccccagagactggggctgccacccccatggactggcaggagcagggaagggctccctctcaggaccaggaggctcccagcccagaggccctcccctccccaggccaggagcccgcagctggggctagccccaggcggggagagctccgcaggggcagctcggctgagagcgccctgccccgggccgggccgcgggagctgggccggggcctgcacaaggcggcgtctgtggagctgccgcagcgccggagccccagcccgggagccacccgcctggcccggggaggcctgggtgagggcgagtatgcccagaggctgcaggccctgcgccagcggctgctgcggggaggccccgaggatggcaaggtcagcggcctcaggggtcccctgctggagagcctggggggccgtgctcgggacccccggatggcacgagctgcctccagcgaggcagcgccccaccaccagcccccactcgagaaccggggcctgcaaaagagcagcagcttctcccagggtgaggcggagccccggggccggcaccgccgagcgggggcgcccctcgagatccccgtggccaggcttggggcccgtaggctacaggagtctccttccctgtctgccctcagcgaggcccagccatccagccctgcacggcccagcgcccccaaacccagtacccctaagtctgcagaaccttctgccaccacacctagtgatgctccgcagccccccgcaccccagcctgcccaagacaaggctccagagcccaggccagaaccagtccgagcctccaagcctgcaccacccccccaggccctgcaaaccctagcgctgcccctcacaccctatgctcagatcattcagtccctccagctgtcaggccacgcccagggcccctcgcagggccctgccgcgccgccttcagagcccaagccccacgctgctgtctttgccagggtggcctccccacctccgggagcccccgagaagcgcgtgccctcagccgggggtcccccggtgctagccgagaaagcccgagttcccacggtgccccccaggccaggcagcagtctcagtagcagcatcgaaaacttggagtcggaggccgtgttcgaggccaagttcaagcgcagccgcgagtcgcccctgtcgctggggctgcggctgctgagccgttcgcgctcggaggagcgcggccccttccgtggggccgaggaggaggatggcatataccggcccagcccggcggggaccccgctggagctggtgcgacggcctgagcgctcacgctcggtgcaggacctcagggctgtcggagagcctggcctcgtccgccgcctctcgctgtcactgtcccagcggctgcggcggacccctcccgcgcagcgccacccggcctgggaggcccgcggcggggacggagagagctcggagggcgggagctcggcgcggggctccccggtgctggcgatgcgcaggcggctgagcttcaccctggagcggctgtccagccgattgcagcgcagtggcagcagcgaggactcggggggcgcgtcgggccgcagcacgccgctgttcggacggcttcgcagggccacgtccgagggcgagagtctgcggcgccttggccttccgcacaaccagttggccgcccaggccggcgccaccacgccttccgccgagtccctgggctccgaggccagcgccacgtcgggctcctcagccccaggggaaagccgaagccggctccgctggggcttctctcggccgcggaaggacaaggggttatcgccaccaaacctctctgccagcgtccaggaggagttgggtcaccagtacgtgcgcagtgagtcagacttccccccagtcttccacatcaaactcaaggaccaggtgctgctggagggggaggcagccaccctgctctgcctgccagcggcctgccctgcaccgcacatctcctggatgaaagacaagaagtccttgaggtcagagccctcagtgatcatcgtgtcctgcaaagatgggcggcagctgctcagcatcccccgggcgggcaagcggcacgccggtctctatgagtgctcggccaccaacgtactgggcagcatcaccagctcctgtaccgtggctgtggcccgagtcccaggaaagctagctcctccagaggtaccccagacctaccaggacacggcgctggtgctgtggaagccgggagacagccgggcaccttgcacgtatacgctggagcggcgagtggatggggagtctgtgtggcaccctgtgagctcaggcatccccgactgttactacaacgtgacccacctgccagttggcgtgactgtgaggttccgtgtggcctgtgccaaccgtgctgggcaggggcccttcagcaactcttctgagaaggtctttgtcaggggtactcaagattcttcagctgtgccatctgctgcccaccaagaggcccctgtcacctcaaggccagccagggcccggcctcctgactctcctacctcactggccccacccctagctcctgctgcccccacacccccgtcagtcactgtcagcccctcatctccccccacacctcctagccaggccttgtcctcgctcaaggctgtgggtccaccaccccaaacccctccacgaagacacaggggcctgcaggctgcccggccagcggagcccaccctacccagtacccacgtcaccccaagtgagcccaagcctttcgtccttgacactgggaccccgatcccagcctccactcctcaaggggttaaaccagtgtcttcctctactcctgtgtatgtggtgacttcctttgtgtctgcaccaccagcccctgagcccccagcccctgagccccctcctgagcctaccaaggtgactgtgcagagcctcagcccggccaaggaggtggtcagctcccctgggagcagtccccgaagctctcccaggcctgagggtaccactcttcgacagggtccccctcagaaaccctacaccttcctggaggagaaagccaggggccgctttggtgttgtgcgagcgtgccgggagaatgccacggggcgaacgttcgtggccaagatcgtgccctatgctgccgagggcaagcggcgggtcctgcaggagtacgaggtgctgcggaccctgcaccacgagcggatcatgtccctgcacgaggcctacatcacccctcggtacctcgtgctcattgctgagagctgtggcaaccgggaactcctctgtgggctcagtgacaggttccggtattctgaggatgacgtggccacttacatggtgcagctgctacaaggcctggactacctccacggccaccacgtgctccacctagacatcaagccagacaacctgctgctggcccctgacaatgccctcaagattgtggactttggcagtgcccagccctacaacccccaggcccttaggccccttggccaccgcacgggcacgctggagttcatggctccggagatggtgaagggagaacccatcggctctgccacggacatctggggagcgggtgtgctcacttacattatgctcagtggacgctccccgttctatgagccagacccccaggaaacggaggctcggattgtggggggccgctttgatgccttccagctgtaccccaatacatcccagagcgccaccctcttcttgcgaaaggttctctctgtacatccctggagccggccctccctgcaggactgcctggcccacccatggttgcaggacgcctacctgatgaagctgcgccgccagacgctcaccttcaccaccaaccggctcaaggagttcctgggcgagcagcggcggcgccgggctgaggctgccacccgccacaaggtgctgctgcgctcctaccctggcggcccctagaggcacggaccacagccaggcctcgggcttcaactggggttcccaccaatgccacgggacattccagggcccacgctgagccaggcgggcctggggcttcggttaccaccagcagcaacatctggctgggctcttacctcatagaccttcaaggacagagaccccagggcctggacctgatgccaccccaggccaaagccagagtgggagacccattggtcaggctcagcagggtgggaacaggcagagggacaagaggggaatggagaagtggagaggaaaaggaatcgagggacaggaagggggaggctctaggaaggttctgggttgggggtcagtgcatctcagggagaaccaaggaaggtgggcatggctggagaggaggaaaaggaaggagccccaggtgtcagggcagtaggctgggagtcagtgtggcaaagcgggggcaggacacagatacagtggcaggggcccagggctgggacatgagagaaggcagcgaggcggcagagggagaagagaggactcaggtggaggtggggtgggtcagctgtcagcatccctcagaggagaaatgtggagagctggaggccagcagtcactcacactcgctctgtcctcctgtccagtggatacagccctgggcgctctgctggcccaaggatgtccccactgcccctccatggcctctggccttcttcccattcatatttatttatttattgacttttatgaagtttccccttccatccgatccctactgcccatgttgtcctgaccatccctcccagccatccagctgtctgtctgtctgccacaaggaaataaaaatggcaagcagcataa

SEQ ID NO: 644 - DNA, 3066 bp, Homo sapiens
gcgctgggtcaaagttcagccccgcccccgcttccccctcgctgtctccctcggcctgtgccgccgccgacgccgcttgtgggcccgactccgctctgtctgcttcgccaccttctccccgagcactgcccggccggccgccatggctaacgtggctgacacgaagctgtacgacatcctgggcgtcccgcccggcgccagcgagaacgagctgaagaaggcatacagaaagttagccaaggaatatcatcctgataagaatccaaatgcaggagacaaatttaaagaaataagttttgcatatgaagtactatcaaatcctgagaagcgtgagttatatgacagatacggagagcaaggtcttcgggaaggcagcggcggaggtggtggcatggatgatattttctctcacatttttggtgggggattgttcggcttcatgggcaatcagagtagaagtcgaaatggcagaagaagaggagaggacatgatgcatccactcaaagtatctttagaagatctgtataatggcaagacaaccaaactacaacttagcaagaatgtgctctgtagtgcatgcagtggccaaggcggaaagtctggagctgtccaaaagtgtagtgcttgtcgaggtcgaggtgtgcgcatcatgatcagacagctggctccagggatggtacaacagatgcagtctgtgtgctctgattgtaatggagaaggagaggtaattaatgaaaaagaccgctgtaaaaaatgtgaagggaagaaggtgattaaagaagtcaagattcttgaagtccacgtagacaaaggcatgaaacatggacagagaattacattcactggggaagcagaccaggccccaggagtggaacccggagacattgttcttttgctacaggagaaagaacatgaggtatttcagagagatgggaatgatttgcacatgacatataaaataggacttgttgaagctctatgtggatttcagttcacatttaagcaccttgatggacgtcagattgtggtgaaatacccccctggcaaagtaattgaaccagggtgtgttcgtgtagttcgaggtgaagggatgccgcagtatcgtaatccctttgaaaaaggtgatctttacataaagtttgatgtgcagtttcctgaaaacaactggatcaacccagacaagctttctgaactagaagatcttctgccatctagaccggaagttcctaacataattggagaaacagaggaggtagagcttcaggaatttgatagcactcgaggctcaggaggtggtcagaggcgtgaagcctataatgatagctctgatgaagaaagcagcagccatcatggacctggagtgcagtgtgcccatcagtaaactctgcaaacaaattgcacaggtggattttctttccacatttgcctgatttgttctcagcaatccagctggagtgtcttatcaatccagatgaactgagggacatctgttggtctatgtataacttttaaaattggtatagtatctacagagtgtataatttaaactaaccacaaagctttacatcttcattttgactgttccatagcagaataaagcacttgaaaggaaacaagactccctttcacacatggattattataagtttcaatcctggtatctgtgcttgatttttatcagttttgtgtagatttttatgtttcatattttaaatttaaatcccacattgtaaagtttgtacaatttgtcctgaagctttgtgtttggctgcacctgcataagctgctacaaatagaataaagaatttcatagcctgtatctatcatttagatgcatggaaaaaaatgggctttgcacacaatgggtttggagctgactgggaacaatggaaaaaattacattagctgtggttgtaaagtttttttgtttttggttttgttttttttttcttttttctttttttttttttttaccatcttgtgaaaggtttctgaaactcgataataaaaagcggttggtgtaaattattcttttgtgtcacatttttagaaggaaaaacataaaagaatgtatccttagtactggttcttaaacagcccataaaaacccattggcctgaagcttatatctcaggcctatgcccatcttatagtcttggaagacaaaaggctggtagagacagtcttcagtggcttcagtgatgctctgtagaggccagggtgtcttgagtgctgtaactcccaagcactgggctagcctgacttctgtatctccctaccaccacccccttaaaaaaataaggtaacagcaaatctatagtaaaaccatgtctgcatagaacgtgttcaaatcctctgttttcattaaatgtaaaagatgctgtctccattaagttgaatatttggaattggagaagccattgattattattttgagtttctgtaatgttttatagaaaagtaagatgcttattcagaatttaagaatgaaggcaactgaaatatgcattgttgtagttatttatatttcaaactaaaaataagcaaaaaaaaaaggctggtttgagaaaaatcaggtaaaattgatgaaacggatgttgtgtttctctttccatcatctggtttttaccatttcactcagtaggtatttttagaacacacttatttgaggaaagagacatcagatgcacaattttacatttataaaggaacaaatggggaaaactgaaaactaaaaattttaaatgtattaaatgccatccctgagcctaaatctagtatttgtagtttatttctaggtctgctagaacctgaaaacctgaatgaaaaaaggtgtgctgacactaatcaagtcctgtgaggtttaaattattgacctatccactctacctccattgtacaaaaaatattttacaacaagcctgggtaagattcaacagcatagtagttttgtatccaaggttacttccccacaaccactttaaacataagaaatgtggtggcaatataaagtttgtagcctttccaataaaggtttataaaacagttaaaaaaaaaaaaaaaaaa

SEQ ID NO: 645 - DNA, 10151 bp, Homo sapiens
gcagcgccgcctgcccaggcccggaccgggctttgtccgccccggagcccctgcccgcgccgcggagaccccggagcccgcgcgctccgaggccaccccgggccgggatttccggtggggcccgcggagccgcgcagagggaggaggccccagacccaggcgccccgccagcccagctgcacgtaagcggacgctgcaggagctgaagatggcgagctccgtggcgccctacgagcagctggtgaggcaggtggaggccttgaaggctgagaacagccacctgaggcaggagctaagggacaactccagccacctgtccaagctggagacagagacgtcgggcatgaaggaggtcctgaagcacctacagggaaaactggagcaggaggcccgagtgctggtgtcctcggggcagacggaggtgctggagcagctgaaggccctacagatggacatcaccagcctgtacaacctcaagttccagccgcccaccctgggcccggagcctgccgcccggacccccgagggcagcccagtacacggctccgggccctccaaggacagctttggggagctgagccgggccaccatccggctgctggaggaactggaccgggaacggtgtttcctgctgaatgagattgagaaggaggagaaggagaagctctggtactactctcagctgcagggcctgtccaagcgcctggacgagctgccgcacgtggagacgcagttctcgatgcagatggacctgatccggcagcagcttgagttcgaggcccagcacatccgctcgctgatggaggagcgcttcggcacctcggacgagatggtgcagcgggcacagatccgcgcctcgcgcctggagcagattgacaaggagctgctggaggcgcaggaccgagtgcagcagacggagccccaggccttgctggcggtgaagtcggtgccggtggacgaggaccccgagacagaggtccccacacaccctgaggatggcacccctcagccgggcaacagcaaggtggaggtggtcttctggctgttgtccatgttggcgacgcgcgaccaggaggatacagcgcgcacgctgctggccatgtccagctcgcccgagagctgcgtggccatgcgccgctcgggctgtctgcctctgctgctgcaaatcctccacggcaccgaggccgcggccgggggtcgcgccggggccccaggggcaccgggcgccaaggacgcacgcatgcgcgccaacgcggcgctgcacaacatcgtcttctcgcagccggaccagggcctggcgcgcaaggagatgcgcgtcctgcacgtgctggagcagatccgggcctactgcgagacctgctgggactggctgcaggcccgagacggcgggcccgagggaggtggcgccggcagcgccccgatccccatcgagccgcagatctgccaggccacctgtgctgttatgaagctgtcctttgatgaggagtaccgccgtgccatgaacgagctaggtgggctgcaggccgtggcagagctgctgcaggttgactatgagatgcacaagatgacccgggacccgctgaacctggcgctgcgccgctacgcgggcatgaccctcaccaacctcacctttggggacgttgccaacaaggccaccctgtgtgcgcgccgcggctgcatggaggccatcgtggcccagctggcctccgacagtgaggagctccaccaggtggtgtccagcatccttcggaacttgtcctggagggccgacatcaacagcaagaaggtgctgagggaggcgggcagcgtgactgccctggtgcagtgtgtcctgcgggccaccaaggagtccaccctgaagagcgtgctgagcgccctgtggaatctgtctgcacacagcacagagaacaaggcggccatctgccaggtggatggcgccctgggcttcctggtgagcaccctgacctacaagtgtcagagcaactcgctggccatcatcgagagcggcggcggcatcctccgcaatgtgtccagcctcgtcgccacccgtgaggactacaggcaggtgctccgggatcacaactgtctgcagacgctgctgcagcatctgacttcgcacagcctgaccatcgtgagcaacgcgtgcggcacgctctggaacctgtcggcccgcagcgcccgtgaccaggagctgctgtgggacctgggcgccgtgggcatgctgcgtaatctggtgcactccaagcacaagatgatcgccatgggcagcgccgccgccctgcgcaacctgctggcccatcggcccgccaagcaccaggcggccgccaccgccgtgtccccaggcagctgcgtgcccagcctgtacgtgcgcaagcagcgggcgctggaggccgagctggacgcacggcacctcgcgcaggcgctggagcacctggagaagcagggcccgccggcagccgaggccgccactaagaagccgctgccgcccctgcgacacctggacggcctggcccaagactatgcttccgattcgggctgctttgacgacgacgatgcaccgtcatccctggctgcggccgcggccaccggggagccagccagccctgccgcgctgtccctcttcctgggcagccccttcctgcaggggcaggcgctggctcgcaccccgcccacccgccgaggcggcaaggaggcagagaaggacaccagtggggaggcagccgtggcggccaaggccaaggccaagctggcgcttgcagtggcgcgcatcgaccagctggtggaggacatctccgccctgcacacctcgtccgacgatagcttcagcctcagctctggagacccgggacaggaggcgccacgggagggccgcgcccagtcctgctcgccatgccgcggcccggagggcgggcggcgagaggcaggaagccgggcgcacccgctgctgcggctcaaggcggcccacgccagcctctccaacgacagcctcaacagcggcagtgccagcgacgggtactgcccacgcgaacatatgctgccctgcccgctggccgcactggcttcgcgccgcgaggaccccaggtgtgggcagcctcggcccagccggcttgaccttgacctgcccggctgccaggccgagcccccggcccgcgaggccacctccgccgacgcccgcgtgcgcaccatcaagctgtcgcctacctatcagcacgtgccactgcttgagggtgcctcaagggcgggtgcagagcccctcgcggggcctggaatctctccaggggcccggaagcaggcctggctgccggcagaccacctgagcaaggttcccgagaagctggcggctgccccgctgtctgtggccagcaaggcactgcagaaactggcggcgcaagaggggccactctcgctgtcccgatgcagctccctttcctcgctgtcctcggccggccgcccaggccccagcgagggtggtgacctggatgacagtgactcctccctggaggggctggaggaggccggccccagcgaggctgagctggacagcacgtggcgggcgcccggggccacctcgctgcccgtagccattccggctccccggcgtaaccgaggccggggcctgggggtggaagacgccacgccgtccagctcgtcggagaactacgtgcaggagacaccgcttgtgctgagccgctgcagctctgtgagctcgctgggcagcttcgagagcccgtccatcgccagctccatccccagtgaaccttgcagcgggcagggcagcggcaccatcagccctagcgagctgcccgacagccccggacagaccatgcctcccagccggagcaagacgccaccgctggcgcccgcgccacagggtccccccgaggccacccagttcagcctgcagtgggagagctacgtgaagcgcttcctggacatcgccgactgccgggagcgctgccggctgccatctgagctggacgcaggcagcgtgcgctttaccgtggagaagccagacgagaacttctcgtgcgcctccagcctcagcgcgctggccttgcacgagcactacgtgcagcaggacgtggagctgcggctgctgccctcggcctgccccgagcgcggcgggggcgccgggggcgccggcctccactttgcagggcaccggcggcgggaggaggggccggcgcccacgggttctcgccctcgcggcgccgcggaccaggagctggaactgctgcgggagtgcctgggagccgccgtgcctgcccggctgcgcaaggtggcctccgcgctggtgccaggtcgccgcgcactccccgtgcccgtctacatgttggtgcccgccccggccccggcccaggaggacgactcctgcactgactccgcggagggcacgccggtcaacttctctagcgccgcctcgctcagcgacgagacgctgcagggaccccccagggaccagcccgggggaccagcgggcaggcaaagacccaccggccgccccacctctgccagacaggccatggggcaccggcacaaggcgggaggcgccggccgcagcgcggagcagtctcggggcgcgggcaagaacagagcagggctggagctgcccctgggccggcccccgagcgcccccgcagacaaggacggctcaaagcccggccggacccgcggggacggggcgctccagtcgctgtgcctcacgacgcccactgaggaggccgtgtactgcttctacggcaacgactcggacgaggagcccccggcggccgcgcccacgccaacccaccggcgcacatcggccatccctcgcgcttttacgcgggagcgtccgcagggccggaaggaggcccctgccccgtccaaggctgcaccagctgccccgccgcccgcccggacccagcccagcctcattgctgacgagaccccgccctgctactccctgagctcctccgccagctccctcagcgagcccgagccctcggagccgccggccgtccatccacgaggccgggagcccgcggtcaccaaggacccgggcccaggaggcggacgcgacagctcgcccagcccgcgggccgcggaggagcttctgcagcggtgcatcagctcggccctgcccaggcgccggccccccgtgtctggcctgcggcgccgcaagccccgagccacccggctggatgagcggcccgcagaggggtcccgggaacgcggcgaggaggcagcgggctcggaccgggcctccgacctggatagcgtggagtggcgcgccatccaggagggcgccaattcaattgtcacgtggctgcaccaggcagcagctgccacgcgggaggcctcgtccgagtccgactccatcctgtccttcgtatccgggctgtcagtgggatccaccctacagccccccaagcacaggaagggacgacaggcggagggagaaatgggcagtgcccggcggccagagaaaaggggcgcagcctcagtcaagaccagcgggagcccccgttcccctgcaggccccgagaagccacgtggcacacagaagaccacgcccggggtgccagctgtgctccggggacgaacagtgatctacgtccccagcccggcaccccgtgcccagcccaaagggacccccggcccccgcgccacaccgcggaaggtggcgcccccttgcctggcacagcccgcggctccagccaaagtcccgagccccgggcagcagcggtcgcggagcctacaccggcctgccaagacctcggagctggcgacgctgagccagccccccagaagcgccacaccgcccgcccgcctcgccaagaccccctcctccagctcctcccagacctcgcccgcctcccagcccctgcccagaaagcgccccccggtcacccaggctgctggggccctgcccggccccggagcctccccggtgcccaaaacgccggcgcgcacccttctggcgaagcagcacaagacgcagagatcgcccgtgcggatcccgttcatgcagaggccggcccggcgtgggccgccaccgctggctcgggcagtcccggagccgggccccaggggccgggcggggaccgaggcgggcccgggggcgcgcgggggccgcctgggcctggtgcgtgtggcctcagccctctccagcggcagcgagtcctccgaccgctcgggcttccggcgacagctaaccttcatcaaggagtcgccgggcttgcggcgccgccgctccgagctgtcctcggccgagtccgcggcctctgccccccagggcgcctcgccccgccgcggccggcccgcgctgcccgccgtcttcctctgctcctcgcgctgcgaagagctccgagcggcaccccggcagggcccggccccggcccggcagcggccccccgcggcccgacccagccctggcgagcgccctgcccggcgcaccacctccgagagcccgtcccgcctgcctgtgcgcgcgcccgccgcccggccggagactgtcaagcgctacgcgtcgctgccgcacatcagcgtggcccgcaggcccgacggcgccgtccccgcggcccctgcctcagccgacgccgcgcgccgcagcagcgacggggagccccggccgctccccagggtggccgcgccgggcacgacctggcggcgcatccgagatgaggacgtgccccacatcctgcgcagcacgcttcccgccacggccctgccactgcggggctccacgcccgaggacgccccggccgggcccccgccgcgcaagaccagcgacgccgtggtccagaccgaggaggtcgccgcccccaagaccaactccagcacgtccccgagcctggagaccagggagccccccggggcccccgccggcggccagctctccctcctcggcagcgacgtggacggtcccagcctcgccaaggctcccatctccgcacccttcgtgcacgagggcctgggggtcgccgtggggggcttccccgccagccggcacggctcccccagccgctcggcccgagtaccccccttcaactatgtgcccagccccatggtggtcgcagccaccaccgactcggccgcggagaaagccccggccactgcctccgccaccctcctggaatagtggcctaggccggccttctggaacgttctctcccggccctgcggcgcggtctggctgccccatgggcctgcgctgtagacgtcccccataggtcgccccagggcctctgcccacccgagccccaccactctcagaacccccgcccagcgcacggcgacctcgcgcctcaccggaagaccttgcctctgtgccgcggaggtccaggaggaaacggggcggccgctaggcctcaagtcccgaccgtggagcgctggcaagggcgtcctggcccagccctgagcgcgcggcccttcccctgtcggaagccgttgcttgaccccgggcgagggaggcggtagcctccgggtccgggtctgggtctgggtccgctgcttcgcagggacagcgctggggaggtgacggcgcccgccgcaggtggggcgaggctgggggagggcggcgccgcggcgggcctgccagctgggggcctttgcggcgcgcaggggcgaagcctgtaatcactgcagccgccggtaattcgctaatgagggctttgcagggattgttttcattctcagccccagctgtgggagtgcgggtgggggtgtggccgagccccggcaggaagccccgcccagacggtgttcagggaacccggagcccaagcgctccggcggagcccaaaagggtgggggtgggaggggcagaggccaacggatccccctgcctgtcgcaccccttggcgggagacgggaaggcagcgggctgcgtacgatgggaccctggtgcagacgccgggccggctgacatttggaccccatcccagaggagatgctggctaccagctggggcgaccccaagggtcgctggagtcagtatcggcccggcgcagccgcggcgggcgaggccaatggaaaggagactgaggggagtcccggcagtgagcccgaggccctgggacctggagcccgcgctggcctctccccagcggagcctgcacgttacggagaccatcacatgtgggcgtggtcagtgcccaggaccgcaccgctgctcatcttgtcccttttcaattcccttctggttcatgatgcataaagcgctaggccctagaactccagaaacagcacagctggggcggggacccagccttgccctccacccgaggctctgggacaaggcgggaggttcgggggccttccggcaggtgaacgcagggctggagagtatttggtgccagatgaggtgaaagcttatagaagggcctgaggggctcggctgcctcatcccctggcgggggaggctgggagctgggcctcctgcgtggggtgggactcgcaggggccgggtctccgtgactggggcaacgcctcgtcctgcagagggagccgacgacctcttttctgcagaaaagctccagcaggcgctgccttcacccacggatctgcccaggctgaaggcacacgctcaatgccccacgtgccttctccaggaggaacgaagcagggtttgagggttgggtggatggagctcagaaggaaaccccagccccaccacggatgacaccatccctcccgtcccatccccagcatgggcaaggccagcctttctggcagaaggagctgtcctcaactcagggccgctgtgagcaaagctgaccccagcccccacccccagttaacactgctgcttctctgaatgcatgtcacgctgcaccccatgctccgggcccacaccctgcaggacaaggagctccagacaggacgtccataagtcaccgaggtgtgccacccagcaggtgctggaggtgcccaatgctccctcctaggacctcgcagccaggcaaggctgtcaggttgttttgggggaagagggggtcatggatggctgagcagagagcggggaaaatgcaggctgagtggggcgacctcctgcctgccaggagccccctttcaggacacagcgggggtctcacacttgctgtccccatccatggcccgagggggaacctggtggtctcttctgagcttttggacttggggatgccaaacacgtgctcaccctcacactcgccccggcccgctgcgcccctaattgccaaagggtagggaaatggcgaagccagccaccaggtcgctggtgacagggccagggttatgcaggaaggtggtgcggcattgccttccacatatgtaagtctctgggcggcgccctcccagctccctgcctctgtttccccatgtgggccgtggggaactcccagagctacctcttgggggagcgtggtggcagcgatgatggggagacgcctggaagctcacagaacttgggtctggctggctcctgcccgtgacgccttgcccagcagcaaggtgcgcaacatggctgccagccccgcctcccacccccaccccgagtcctgagctcactttcgccttctccatcccctgccgtgggggccacagccacacctcaccgcccagtccagctgtctccagaaggggacaggcagtccgcggtctctggacaatcaactcaaggtacgcccactgcaaggcctccctcccaccgcggcccctgcctggccacctggcctctctgcaccagggtgacaaggggtcctcgtctgccccccaatgctccagggccagtcctaaggagctgagggtctgaggacgcagggagggtggaggtgtcctgaggctgatggacagtgaccgccactggcccccaacatgaccacacgtgggtgctgaactcggggcgccgtgcccaccggcatggtcctcccgagctccgacagcattacctcacccggccccatctgttgccccggtccagccctgatggcgcgcgcctggtctgtctgattcccctagccgccaccccacgtttctgtaccgggtctctgcagtgttaaacggacgtgtaaatagtggtaaatagtgaaagcctgtccttccctaaatgtaaagccatctgtccggcgtaaggacgacaccgtcagctgtccgactcgcacacatttaataaactgagctcttgcattgcc

SEQ ID NO: 646 - DNA, 5996 bp, Homo sapiens
ctttccccccacccctcaagctaggctgagctgtgcctacgtcggcctcgactcccgggggctggaggagttacctttggagcccgaaaggaggaaggaagcaaaatatcaacaacagccgaggcggctcaggcgctcggccccggttccccgcttgcctgccgcccgcctgctggcccccgcgcccacgacgggggcccaggcctcacggcgccgcccagggcccgcgcggacgccggcctcatttattattctccccgcccggagctgcggcttcccggtgttgaagatcccccggaccaggggcgagggctacccgctctttgccgtgacaacaccgttcccccagccgggctggaggctgtgcagaaggtatcctgcagaccatgaactgagcactgttcccagaccgttcatgagcacagtgtaaggtgtgccgagacccaccacccagcgagcccctcccctccgtagcactgaggacccccggagaagatggggaggaaaaagattcagatccagcgaatcaccgacgagcggaaccgacaggtgactttcaccaagcggaagtttggcctgatgaagaaggcgtatgagctgagcgtgctatgtgactgcgagatcgcactcatcatcttcaaccactccaacaagctgttccagtacgccagcaccgacatggacaaggtgctgctcaagtacacggagtacaatgagccacacgagagccgcaccaacgccgacatcatcgagaccctgaggaagaagggcttcaacggctgcgacagccccgagcccgacggggaggactcgctggaacagagccccctgctggaggacaagtaccgacgcgccagcgaggagctcgacgggctcttccggcgctatgggtcaactgtcccggcccccaactttgccatgcctgtcacggtgcccgtgtccaatcagagctcactgcagttcagcaatcccagcggctccctggtcaccccttccctggtgacatcatccctcacggacccgcggctcctgtccccccagcagccagcactacagaggaacagtgtgtctcctggcctgccccagcggccagctagtgcgggggccatgctggggggtgacctgaacagtgctaacggagcctgccccagccctgttgggaatggctacgtcagtgctcgggcttcccctggcctcctccctgtggccaatggcaacagcctaaacaaggtcatccctgccaagtctccacccccacctacccacagcacccagcttggagcccccagccgcaagcccgacctgcgagtcatcacttcccaggcaggaaaggggttaatgcatcacttgactgaggaccatttagatctgaacaatgcccagcgccttggggtctcccagtctactcattcgctcaccaccccagtggtttctgtggcaacgccgagtttactcagccagggcctccccttctcttccatgcccactgcctacaacacagattaccagttgaccagtgcagagctctcctccttaccagcctttagttcacctggggggctgtcgctaggcaatgtcactgcctggcaacagccacagcagccccagcagccgcagcagccacagcctccacagcagcagccaccgcagccacagcagccacagccacagcagcctcagcagccgcaacagccacctcagcaacagtcccacctggtccctgtatctctcagcaacctcatcccgggcagccccctgccccacgtgggtgctgccctcacagtcaccacccacccccacatcagcatcaagtcagaaccggtgtccccaagccgtgagcgcagccctgcgcctccccctccagctgtgttcccagctgcccgccctgagcctggcgatggtctcagcagcccagccgggggatcctatgagacgggagaccgggatgacggacggggggacttcgggcccacactgggcctgctgcgcccagccccagagcctgaggctgagggctcagctgtgaagaggatgcggcttgatacctggacattaaagtgacgattcccactcccctcctctcagcctccctgatgaagagttgacaatctcaccgcccgcccttccctgccccgggctcctcccgctcgacccccacttcctttcttgtgcttcgtgtcctgttgacggttacatttgtgtataattattatattattattattattattatattttttttaatttggattctcgctttggagagggggatgctctcatcccctctttctgtaccccccaccattttcactggctggggggctctctttttcgcgggaaggggggacactttgcacgttgtacacatatgctgcaggaagggggtggggggcccaataaggcctttgggaaaggacaggtgccgagccctgcatgtggagccctcccaccccacccccagatagagggaaataaccaaaaaactaccaaacaacagaaacccacactctagactgaaaccccaaagtgggcttgatgggtgggtttgtgtttcaaggggaaagtgaggcagaggttctgaaaagggtctctgtttttgtgttcatgtagccataggcacatggagcagaatacttaagcctggcccccaaatgcccctgcacacacacgtgccacacctgcgctgattcttgtgtgtgctgcacccccaaggtgtgtgggtgctggctgagctttgggccgggaaggcagcctgggaatctgaggctggagacaggggtttgaggtgggggcctctctggaagcacatttggagggaaagacaagagagccatgaggagagggctgaggagggcagaagggctaggcagggggcaaattgagcccctcccttccccagtttttctctaagatatacagtgcaatagctccccacccctcagttgacgccagccctgtaaagctggccacagtgtgcagggagaatggggagagggtcttcagtgaggtggctggggcgagagtcggcctggacttccctggggtgctccaggccagagctctttcattggggcgagtgtggtgaggggacgtccttggtcttgcacgcacactacctgggggagtcaacactgggatggtctgtggggtgggagggcctacggatgggtccgtagaggtcccacctccctcattcctccttggcccctctccctagcttctcctgttagctccttctgctcctgaccccacctccttgctcttggcgcccctattgtctctggctacctccttgtcccaccacctccaggctgcatcccaccttccctcttggctactgtaattgtaaatagcgacctttggaaaacgttagcggtgtaacagtccaggaaactgtttttttttgttgttgttgtattgatatgaaatgagattctatttttgtcaaagtatattgtaataataatgactcaaacggcccgtactgtacagacgagattcttctgctgttgttcttgctcccctcccctcctctgagtccgcccctccctgctgcctcctcagtggggcagtgggcaaggggcccaggggcagccgaagcacggggtcctgagacctcaggcaggattggagatcaaaccagagggggcaggcccccagcctgctctctaggatcaccccccgccctaaggggcctggcctggggtgacgtggccaggcagactgtctgccccactccttcacacaagcccagctcctctgcccaaggggtgcggcgcccccttggggtttcctcccagttggagagtagagttaagacaaggcccagttttgtgttagccgaccgtctttgcccacctctatgacccagcctcttgcagtattcccatacttgatgcagggaaggaaccagaagcagaggggcctctacgcaggtacacacgtgtacctgagtgtgttcatgagggcatctggtgtttatgtgtctgagtgtagctttgtatttatgtgtgtgtgtgtgtgtatgtctgattgcacgggtgtacttttgtatttatgtgtgtgtgtggttgcacgggtgtgcctctgtgtgtctctgaccctggctgggtgtgtgtgcaaatctgtgtgactggagctctaggggcatctctgtgtctgagtgtgcctggtgtgtgtttacaaagggagagttggctgctccagctccacagccctgggaccccaactcctgtcttccctgctcctttccctgtgttcaccctcagctctgacacattgaactgcagttggggggattggcagttagccctctgtgcttctccctgcagccctacctctgccaaggtctctccctccagggacctctgcttccacccacatatgtccacttagtcacccacacttgacacagttcctggagtaccctcttcccccaaccccagacctgctttcagagcaaaactcaagtccctcttcctccgtgaagcttctccctcagctgagcagtgatcacttactcactcttaaccccaatccgctgactgggtggggacagcacgtccagccttcccacctctcctgcaggcttctagacggagtttcaaaaactgatgagcctcgatccagggcttgaaagaagccagggtgtaatcttgttcatgcatgcgtccccagagcctcgcccagtgcctggcacatagtaggcactcaataaatgctgaatgggtgaatagttgaatgataggtgctcaataaatgaatgaatggccttcccttctcaggctattcccaccattagtctgcccacctttctaggctgggcttggccaccattaaacacggggtgggggtgagggcccctgcaattcacggtgcaatattcaccagttttgccctctgcctcataaaggcaaacctggcttttgattaccatgtgtggatgtttcagtgtcctttcttctctgtccctggggatggggtggtctgtgaatatgtgacatttctgcagttcagtatccgaaggtttctcttgggggtaggggctcctgggcggccagatgaatgggtccctgggaacccagacctcagatgaggacttaatgtcttcttcctctcaagccaaattcgcctccacccactccctctgaagaactgggcatttgccaaagtaaccactggagtcatctaatggccctccccctccccaggtttcccacagctttcagggacagtgggcaagaggacacccccccccaccacctcagtggaacacaccattctccccccctcaacagcacactcagtgcagcaagactgacccctgaccccctcccagccctccctaccttggacaggaaggaagtaatgcaccttctcttgctgattatttatttgtttggagagacagaaatgtaaaagtgtatctagaaatatctatatctctatatatttttaactgactctttggaatcccctggggtggggtgaggggtaagtttaggctttcgcggaggggaggagacatggagcctgggaactccttgttctcccctctgctgcctctccccaccccttaaagcagttggtagaaggaatggtatttgtatggggggagggaggctggaatggagaatctggattctctcctcttccccattctccagagggagggaggtggtgaggaagaggaagggaggggcaggatgggccatggaggtgccccacccccacacctgacaatcacccacactcctggggctcttcctgggtcctggggcagggcgagtccaagtgtgaggctgttgatttgttttcaatatttcttttcgtgctgtatggtgatgctttcttagtattctacacaataagaaaagacaaagtcctcgagattcttatgagttttgtttgaaaactctttcactatatttgttgtaaagaggtttactattaaaagaaaaagaatacacgtttctgatacttcggaaaaaaaaaaa

SEQ ID NO: 647 - DNA, 7522 bp, Homo sapiens
caccagaaacccaagttggaactaattctttctttcggaaggtgcaactcccctcccgcgagctccgcggtgccgggccgagattgccgagaggaagcggcgcagcgctgccgccaaggctcctcctgtcgccggtgcggccgggactacctggcggcgcggcgcgtgcagcgcgcagagtcccgggagcccacgcctccgcctccgcccccgccccctccgcctcccagtccacctcgcccgcccgccctctcgcccggcggagagcacagcccactccctcccacctgcggccgccgggccgccctccacccacacctctgccgcaggccggacccagtgcgcccgcccgtcggtcagtccaggccaggcgcccggcgggccgcgctcacgcagttggcgcaggaggccttacgctggcggcgcagtgcccgccccctgcgctctccccgccccctccctccctcgcaggggccgagcgaatgtagcccgcgagagaaaatggcggcggcggcggggaatcgcgcctcgtcgtcgggattcccgggcgccagggctacgagccctgaggcaggcggcggcggaggagccctcaaggcgagcagcgcgcccgcggctgccgcgggactgctgcgggaggcgggcagcgggggccgcgagcgggcggactggcggcggcggcagctgcgcaaagtgcggagtgtggagctggaccagctgcctgagcagccgctcttccttgccgcctcaccgccggcctcctcgacttccccgtcgccggagcccgcggacgcagcggggagtgggaccggcttccagcctgtggcggtgccgccgccccacggagccgcgagccgcggcggcgcccaccttaccgagtcggtggcggcgccggacagcggcgcctcgagtcccgcagcggccgagcccggggagaagcgggcgcccgccgccgagccgtctcctgcagcggcccccgccggtcgtgagatggagaataaagaaactctcaaagggttgcacaagatggatgatcgtccagaggaacgaatgatcagggagaaactgaaggcaacctgtatgccagcctggaagcacgaatggttggaaaggagaaataggcgagggcctgtggtggtaaaaccaatcccagttaaaggagatggatctgaaatgaatcacttagcagctgagtctccaggagaggtccaggcaagtgcggcttcaccagcttccaaaggccgacgcagtccttctcctggcaactccccatcaggtcgcacagtgaaatcagaatctccaggagtaaggagaaaaagagtttccccagtgccttttcagagtggcagaatcacaccaccccgaagagccccttcaccagatggcttctcaccatatagccctgaggaaacaaaccgccgtgttaacaaagtgatgcgggccagactgtacttactgcagcagatagggcctaactctttcctgattggaggagacagcccagacaataaataccgggtgtttattgggcctcagaactgcagctgtgcacgtggaacattctgtattcatctgctatttgtgatgctccgggtgtttcaactagaaccttcagacccaatgttatggagaaaaactttaaagaattttgaggttgagagtttgttccagaaatatcacagtaggcgtagctcaaggatcaaagctccatctcgtaacaccatccagaagtttgtttcacgcatgtcaaattctcatacattgtcatcatctagtacttctacgtctagttcagaaaacagcataaaggatgaagaggaacagatgtgtcctatttgcttgttgggcatgcttgatgaagaaagtcttacagtgtgtgaagacggctgcaggaacaagctgcaccaccactgcatgtcaatttgggcagaagagtgtagaagaaatagagaacctttaatatgtcccctttgtagatctaagtggagatctcatgatttctacagccacgagttgtcaagtcctgtggattccccttcttccctcagagctgcacagcagcaaaccgtacagcagcagcctttggctggatcacgaaggaatcaagagagcaattttaaccttactcattatggaactcagcaaatccctcctgcttacaaagatttagctgagccatggattcaggtgtttggaatggaactcgttggctgcttattttctagaaactggaatgtgagagagatggccctcaggcgtctttcccatgatgtcagtggggccctgctgttggcaaatggggagagcactggaaattctgggggcagcagtggaagcagcccgagtgggggagccaccagtgggtcttcccagaccagtatctcaggagatgtggtggaggcatgctgcagcgttctgtcaatggtctgtgctgaccctgtctacaaagtgtacgttgctgctttaaaaacattgagagccatgctggtatatactccttgccacagtttagcggaaagaatcaaacttcagagacttctccagccagttgtagacaccatcctagtcaaatgtgcagatgccaatagccgcacaagtcagctgtccatatcaacactgttggaactgtgcaaaggccaagcaggagagttggcagttggcagagaaatactaaaagctggatccattggtattggtggtgttgattatgtcttaaattgtattcttggaaaccaaactgaatcaaacaattggcaagaacttcttggccgcctttgtcttatagatagactgttgttggaatttcctgctgaattttatcctcatattgtcagtactgatgtttcacaagctgagcctgttgaaatcaggtataagaagctgctgtccctcttaacctttgctttgcagtccattgataattcccactcaatggttggcaaactttccagaaggatctacttgagttctgcaagaatggttactacagtaccccatgtgttttcaaaactgttagaaatgctgagtgtttccagttccactcacttcaccaggatgcgtcgccgtttgatggctattgcagatgaggtggaaattgccgaagccatccagttgggcgtagaagacactttggatggtcaacaggacagcttcttgcaggcatctgttcccaacaactatctggaaaccacagagaacagttcccctgagtgcacagtccatttagagaaaactggaaaaggattatgtgctacaaaattgagtgccagttcagaggacatttctgagagactggccagcatttcagtaggaccttctagttcaacaacaacaacaacaacaacaacagagcaaccaaagccaatggttcaaacaaaaggcagaccccacagtcagtgtttgaactcctctcctttatctcatcattcccaattaatgtttccagccttgtcaaccccttcttcttctaccccatctgtaccagctggcactgcaacagatgtctctaagcatagacttcagggattcattccctgcagaataccttctgcatctcctcaaacacagcgcaagttttctctacaattccacagaaactgtcctgaaaacaaagactcagataaactttccccagtctttactcagtcaagacccttgccctccagtaacatacacaggccaaagccatctagacctaccccaggtaatacaagtaaacagggagatccctcaaaaaatagcatgacacttgatctgaacagtagttccaaatgtgatgacagctttggctgtagcagcaatagtagtaatgctgttatacccagtgacgagacagtgttcaccccagtagaggagaaatgcagattagatgtcaatacagagctcaactccagtattgaggaccttcttgaagcatctatgccttcaagtgatacaacagtaacttttaagtcagaagttgctgtcctgtctcctgaaaaggctgaaaatgatgatacctacaaagatgatgtgaatcataatcaaaagtgcaaagagaagatggaagctgaagaagaagaagctttagcaattgccatggcaatgtcagcgtctcaggatgccctccccatagttcctcagctgcaggttgaaaatggagaagatatcatcattattcaacaggatacaccagagactctaccaggacataccaaagcaaaacaaccgtatagagaagacactgaatggctgaaaggtcaacagataggccttggagcattttcttcttgttatcaggctcaagatgtgggaactggaactttaatggctgttaaacaggtgacttatgtcagaaacacatcttctgagcaagaagaagtagtagaagcactaagagaagagataagaatgatgagccatctgaatcatccaaacatcattaggatgttgggagccacgtgtgagaagagcaattacaatctcttcattgaatggatggcagggggatcggtggctcatttgctgagtaaatatggagccttcaaagaatcagtagttattaactacactgaacagttactccgtggcctttcgtatctccatgaaaaccaaatcattcacagagatgtcaaaggtgccaatttgctaattgacagcactggtcagagactaagaattgcagattttggagctgcagccaggttggcatcaaaaggaactggtgcaggagagtttcagggacaattactggggacaattgcatttatggcacctgaggtactaagaggtcaacagtatggaaggagctgtgatgtatggagtgttggctgtgctattatagaaatggcttgtgcaaaaccaccatggaatgcagaaaaacactccaatcatcttgctttgatatttaagattgctagtgcaactactgctccatcgatcccttcacatttgtctcctggtttacgagatgtggctcttcgttgtttagaacttcaacctcaggacagacctccatcaagagagctactgaagcatccagtctttcgtactacatggtagccaattatgcagatcaactacagtagaaacaggatgctcaacaagagaaaaaaaacttgtggggaaccacattgatattctactggccatgatgccactgaacagctatgaacgaggccagtggggaacccttacctaagtatgtgattgacaaatcatgatctgtacctaagctcagtatgcaaaagcccaaactagtgcagaaactgtaaactgtgcctttcaaagaactggccctaggtgaacaggaaaacaatgaagtttgcatgactaaattgcagaagcataattttatttttttggagcactttttcagcaatattagcggctgaggggctcaggatctattttaatatttcaattattcttccatttcatatagtgatcacaagcagggggttctgcaattccgttcaaattttttgtcactggctataaaatcagtatctgcctcttttaggtcagagtatgctatgagtagcaatacatacatatatttttaaaagttgatacttctttatgacccacagttgacctttattttcttaaataccagggcagttgtggctcattgtgcattttactgttggcccattcatttcgtttttggaaattatggttttgtattttcatgtttatttacattcatttttgtttattcagggaaagctgatctttttttcaaaccagaaaaaaaaaatgaactagatatgaagtagagttcattaaatatcttgctattgtcagagtttttaaaatatagacttaattttgtttttttaaattggaatacaataaagtactacctacatttgagtcagtcaccactcttattgtgcaggttaagtacaagttaactaaaaataaactgtcctctctggtgcaactcacaaccaagatcaagattaccttaaaatttatttgaattttttagatgttttggttgtcaaactgtaggaaacttcacaacatttaagtcttactctgtatgtaacaatccatcattcaccttcactactggtagtaacatagagctgccattttccttttaccatgcatcatctctttacagtaggcctggcagatcattttttaaaaagattattcaactaccaatcagtaatgtttttaaacagtacatttgctttgaacttggaaaatgtgttcagaaagaaaaatggaattgaatttcatttatacactaattccttggattttgcacagttacctaacggttttagtctggagttaaattcagatgcatggaatcctgaaggaaaatggtagctttttaatctttttgtgtgtgtgtgagtcttttaaatcaagtactgattaactattaagtacaactttgagattttagttttaactcttcagaagccagtgtgaaatagaattggttattctcaaagactcaggataaactaaataagctatatatagagtacatttaaaatgtacaacacaaattggaaataaaataagttacaagataagtttacagggatatattgcttacaatttttaaaaggcagtttgttttttatgtgaatatgtttcttagtgaaattttacattcctttgttttggaagattggcgatatttgaagagttaaaaatagtacagaaatgtgaagtttggtatctctaaatgtgttgtacttgactttcttttttattttgtttttttttttttttgactacttagaattttcacaattctaataagattgtttccaagtctctcatgtgcaagctttaaaggatgcactcttgccattttatgtactggaagatcattggtcagatgaatactgtgtctgacaaaaatgtaaactgtataaactgaggaacctcagctaatcagtattactttgtagatcaccatgcccaccacatttcaaactcaaactatctgtagatttcaaaatccattgtgtttgagtttgtttgcagttccctcagcttgctggtaattgtggtgttttgttttttgttttgttttcaatgcaaatgtgatgtaatattcttattttctttggatcaaagctggactggaaattgtatcgtgtaattatttttgtgttcttaatgttatttggtactcaagttgtaaataacgtctactactgtttattccagtttctactacctcaggtgtcctatagatttttcttctaccaaagttcactttcacaatgaaattatatttgctgtgtgactatgattcctaagatttccagggcttaagggctaacttctattagcaccttactgtgtaagcaaatgttacaaaaaaaaaaaaaaaaaatctctgggttaagaaaatttggcttaaatgtatcctttgttattttaaatatattgagatattttaattaaaatttttaccccattgaaccgattttatagtatttgtacctattttggtgtttttgtctttatagtaaataaaagtttttgaacaaaaaaaaaaaaa

SEQ ID NO: 648 - DNA, 2276 bp, Homo sapiens
aagcccagcagccccggggcggatggctccggccgcctggctccgcagcgcggccgcgcgcgccctcctgcccccgatgctgctgctgctgctccagccgccgccgctgctggcccgggctctgccgccggacgcccaccacctccatgccgagaggagggggccacagccctggcatgcagccctgcccagtagcccggcacctgcccctgccacgcaggaagccccccggcctgccagcagcctcaggcctccccgctgtggcgtgcccgacccatctgatgggctgagtgcccgcaaccgacagaagaggttcgtgctttctggcgggcgctgggagaagacggacctcacctacaggatccttcggttcccatggcagttggtgcaggagcaggtgcggcagacgatggcagaggccctaaaggtatggagcgatgtgacgccactcacctttactgaggtgcacgagggccgtgctgacatcatgatcgacttcgccaggtactggcatggggacgacctgccgtttgatgggcctgggggcatcctggcccatgccttcttccccaagactcaccgagaaggggatgtccacttcgactatgatgagacctggactatcggggatgaccagggcacagacctgctgcaggtggcagcccatgaatttggccacgtgctggggctgcagcacacaacagcagccaaggccctgatgtccgccttctacacctttcgctacccactgagtctcagcccagatgactgcaggggcgttcaacacctatatggccagccctggcccactgtcacctccaggaccccagccctgggcccccaggctgggatagacaccaatgagattgcaccgctggagccagacgccccgccagatgcctgtgaggcctcctttgacgcggtctccaccatccgaggcgagctctttttcttcaaagcgggctttgtgtggcgcctccgtgggggccagctgcagcccggctacccagcattggcctctcgccactggcagggactgcccagccctgtggacgctgccttcgaggatgcccagggccacatttggttcttccaaggtgctcagtactgggtgtacgacggtgaaaagccagtcctgggccccgcacccctcaccgagctgggcctggtgaggttcccggtccatgctgccttggtctggggtcccgagaagaacaagatctacttcttccgaggcagggactactggcgtttccaccccagcacccggcgtgtagacagtcccgtgccccgcagggccactgactggagaggggtgccctctgagatcgacgctgccttccaggatgctgatggctatgcctacttcctgcgcggccgcctctactggaagtttgaccctgtgaaggtgaaggctctggaaggcttcccccgtctcgtgggtcctgacttctttggctgtgccgagcctgccaacactttcctctgaccatggcttggatgccctcaggggtgctgacccctgccaggccacgaatatcaggctagagacccatggccatctttgtggctgtgggcaccaggcatgggactgagcccatgtctcctcagggggatggggtggggtacaaccaccatgacaactgccgggagggccacgcaggtcgtggtcacctgccagcgactgtctcagactgggcagggaggctttggcatgacttaagaggaagggcagtcttgggcccgctatgcaggtcctggcaaacctggctgccctgtctccatccctgtccctcagggtagcaccatggcaggactgggggaactggagtgtccttgctgtatccctgttgtgaggttccttccaggggctggcactgaagcaagggtgctggggccccatggccttcagccctggctgagcaactgggctgtagggcagggccacttcctgaggtcaggtcttggtaggtgcctgcatctgtctgccttctggctgacaatcctggaaatctgttctccagaatccaggccaaaaagttcacagtcaaatggggaggggtattcttcatgcaggagaccccaggccctggaggctgcaacatacctcaatcctgtcccaggccggatcctcctgaagcccttttcgcagcactgctatcctccaaagccattgtaaatgtgtgtacagtgtgtataaaccttcttcttctttttttttttttaaactgaggattgtcattaaacacagttgttttctaaaaaaaaaaaaaaaa

SEQ ID NO: 649 - DNA, 2585 bp, Homo sapiens
ggccgcgagatggggaagatggcagcggccgtgggctctgtggcgactctggcgactgagcccggggaggacgcctttcggaaacttttccgcttctaccgtcagagccggcccgggaccgcagacctggaaggggtcatcgacttctcggcggcccacgcagcccgtggcaagggtcctggtgcccaaaaggtgatcaaatctcagctaaatgtgtcttctgtcagtgagcagaatgcatatagagcaggtcttcagcccgtcagcaagtggcaagcctatggactcaaaggctatcctgggtttatttttatcccaaaccccttcctcccaggttaccagtggcactgggtgaaacagtgccttaagttatattcccagaaacctaatgtatgtaacctggacaaacacatgtctaaagaagagacccaagatctgtgggaacagagcaaagagttcctgaggtataaagaagcgactaaacggagaccccgaagtttactggagaaactgcgttgggtgaccgtaggctaccattataactgggacagtaagaaatactcagcagatcattacacacctttcccttctgacctgggtttcctctcagagcaagtagccgctgcctgtggatttgaggatttccgagctgaagcagggatcctgaattactaccgcctggactccacactgggaatccacgtagacagatctgagctagatcactccaaacccttgctgtcattcagctttggacagtccgccatctttctcctgggtggtcttcaaagggatgaggcccccacggccatgtttatgcacagtggtgacatcatgataatgtcgggtttcagccgcctcttgaaccacgcagtccctcgtgtccttccaaatccagaaggggaaggcctgcctcactgcctagaggcacctctccctgctgtcctcccgagagattcaatggtagagccttgttctatggaggactggcaggtgtgtgccagctacttgaagaccgctcgtgttaacatgactgtccgacaggtcctggccacagaccagaatttccctctagaacccatcgaggatgaaaaaagagacatcagtacagaaggtttctgccatctggatgaccagaatagcgaagtaaaacgggccaggataaaccctgacagctgagacttggagatcccatcctttttactcaggcacctgcttaccgtaaatgatcatgttattgtgtattgccgtggacttcagcacccagacaagccaaaaacagagacagggaagaactcattgttgatcacactgttgccttggaacccacgcagaagtaaactcagccactttgctcagagaagtgtttgacatggtctgttcctagttacatgttggctgtaatgtatgttgagaagtcagtccaaggaggtatgttcttccacaacagccttctcagcctctgctatttcctttgaggaaggtagaagtgagtttccatgtttgcagagtatttaaatacctcagattttattaatgagaaatacagtacccctccctccactccatctggtaatttatggtaaaattgtggttctgtgaaccagctattagtctcatcttcttaactccctcaggcatcatcaaattctttgatcttctcttccacctctctggctctcatggaagaatcctttacacatgaaaacaatggaactggaaaatcttgtcttttagaaaagaaattaatcacaactatctctcttgcctaaaagataaatataggtaaacccaaggaaaggggaatttagtttctctacatgtcatttcggtctccaaactccctgttggctttttaatgcaattttaattgttggaataaaaaagtcccaagggtgttttgttactgttttctccatgaataaactcacttgattttaaattaaagatctatatctgtctttggggtttagtctatctgggattaaggtttttttttctgtttttctttgctgtattgttcatgctattgaagccctctagctgtttctgccctacaccattctgctgtgccctaagtattctttgtggctgtctcacagaagagagaacatttcttaatattccagtcactgctgttattgtctgagggtaggcagcttggaaaaatgtaggcaacaccaagttttaatctttatacccccaacaatttgactgactatatcatggtccaggttactttacatttctctggacctcggtttcctcatcataaaatgaagatactgtagactaccatcttcctaaagggatattggtatttgaaagagaattaagtgctcctttctacaaacatgatgtgccaaaattgttttattataagggctctttgaaacatcctaacttccttgtgtggaggactggctggaagcccatttggtacctactgtttgcaatgcatgttattaagtttacatgtctcctctgtcctgctctgccccttttttaaattactggcattgaatattgagttcatatggtaatagcagggtttttaaatgaataaaaattatggatttatctct

SEQ ID NO: 650 - DNA, 2167 bp, Homo sapiens
cgcggcgcatgttcggcgtgtcggtcttcaggcgcctgatgagttcatagttgggcggtggtgtcagcggtttcgctggcgttcgtgggcctcccccggacccacacacggaaacacgcaaccattcggggatccagacgcccgtttacacgcaccacccctgggcgggctgtgcggctcaggccctcccccgggaccggcccgtgtcccgccccgtgtcccgccccgtatttgtgcggcgccagctggccccgcagcctgcggcgcagagaggctgggcttgcaggcgcagtagctccagaggtcgcgctgggctgagagtgcgggccggcagaggctggcggggagcagccggggttatgctgggcaaggattacatgctggccatcattctggtcaactgcgatgatgacttgtggggggaccacagtctggaggtggaggctggcctgcctcctggctggaggaagatccacgatgctgcaggtacttactactggcatgtacccagcggtagcacccagtggcagcgcccaacctgggaactaggagatgcagaggacccaggcacgggaacggaggggatctggggactgcggccccccaaagggagatccttctccagcctggagagttcactggaccggagtaactctctgtcctggtatggtggggaatcctacatccagagcatggagccaggggctaagtgctttgcagtccgctctctgggctgggtagaggtacctgaagaggacctggcaccggggaagagcagtattgcagtcaataactgtatccagcagctggcccagacccgcagccggagccagcctccagatggtgcctggggtgagggccagaacatgctgatgatcctgaagaaggatgccatgagcctagtgaatcccctggaccacagtctgatccactgccagcctctggtgcacatccgtgtgtggggcgtggggagctccaagggccgtgacagccccatctctgcccctgctagggacttcgcttttgtggcaagtgacaaagatagctgtatgctcaagtgccatgtgttttgctgtgatgtccctgccaaggccattgccagtgccctacatgggctttgtgcccagatcttgtcagagcgagtagaggtcagtggtgatgcctcttgctgctccccagaccccatctctcctgaagacctgccacggcaagtggagctgctggatgcggtaagccaagctgctcagaagtacgaggcactgtatatggggacactgccagtcaccaaggccatgggcatggatgtgctgaacgaggccattggtaccctcaccgccaggggggaccggaatgcctgggtccccaccatgctcagtgtgtctgactctctcatgactgcacaccccattcaggcagaggccagtacagaggaggagccattgtggcagtgccctgtgcgccttgtgacatttattggtgttggccgcgacccacacacctttggcctcatcgctgacctgggccgtcagagcttccagtgcgcagccttctggtgccagccccatgcagggggactctctgaagctgtgcaggctgcctgtatggttcagtaccagaagtgtcttgtggcctctgcagctcgaggcaaggcctggggtgcccaggcccgtgcccgcctgcggctcaagcggaccagctccatggattccccaggaggtcccctgcccctccccctgctcaaaggaggggttggcggtgcaggggcaacccctcgaaagcggggtgtcttctcttttcttgatgccttccggctgaaaccctctctgctccatatgccctaaacttatctgggaaggctggggaagtaggctctgggtccatgcctaactctgtaccgttttattcctcaaggcctatagcctgtcactccttgaagccttctctgcctgtccctccgatccttgtccaccgtctatttattgcccaatttattgtttatacggatgactgggaggcactgcaccacaacgtaggaccctggctcccctttccttgggtccttgtgttccttgcccctgtccaaccctggacagttggctctacctcagtaacactttatagcaaaatcagtgcaaataaaaatccctcagtgacctcaaaaaaaaaa

SEQ ID NO: 651 - DNA, 5761 bp, Homo sapiens
atcggggccttggggagcccaggatggaggtggcggtcgcggcggcgggccgagccctgcggcgggcgggaggaggtgagcaccaggcccactgagcctctgcagagccaccagccatgcccgggatcgtggtgttccggcggcgctggtctgtgggcagtgatgacctcgtcctaccggccatcttcctctttctcctgcataccacctggtttgtgatcctgtccgtggtgctcttcggcctggtctataacccgcacgaggcctgctccctgaacctggtggaccacggccgcggctacctgggcatcctgctgagctgcatgatcgctgagatggccatcatctggctgagcatgcgcgggggcatcctctacacggagccccgtgactccatgcagtacgtgctctacgtgcgcctggccatcctggtgatcgagttcatctacgccatcgtgggcatcgtctggctcactcagtactacacctcctgcaacgacctcactgccaagaatgtcaccctcggaatggttgtctgcaactgggtagtcatcctcagtgtgtgcatcactgtcctctgcgtcttcgaccccacgggccgcacctttgtcaagctgagagccaccaagaggaggcagcgtaacctgcggacctacaacctgcggcaccgcttagaggagggtcaagccaccagctggtcgcgccggctcaaagtgttcctctgctgcacgcggacgaaggactcccagtcagatgcctactcagaaatcgcctacctctttgcggagttcttccgggaccttgacattgtgccatccgacatcattgctggcctggtgctgctccggcagcggcagcgggccaagcgcaacgccgtgctggacgaggcaaacaatgacatcttggccttcctgtctgggatgccggtgaccagaaacaccaagtacctcgacctcaagaattcacaagagatgctccgctacaaagaggtctgctactacatgctctttgccctggctgcctacgggtggcccatgtacctgatgcggaagcccgcctgcggcctctgccaactggctcggtcctgctcgtgttgcctgtgtcctgcgaggccgcggttcgcccctggagtcaccatcgaggaagacaactgctgtggctgtaatgccattgccatccggcgccacttcctggacgagaacatgactgcggtggacatcgtctatacctcctgccatgatgcggtctatgaaacgcccttctacgtggcggtggaccatgacaagaagaaagtggtgatcagtatccgggggaccctgtcccccaaggatgccctgactgacctgacgggtgatgctgagcgcctccccgtggaggggcaccacggcacctggctgggccacaagggtatggtcctctcagctgagtacatcaagaagaaactggagcaggagatggtcctgtcccaggcctttgggcgagacctgggccgcggaaccaaacactacggcctgattgtggtgggccactccctgggcgcgggcactgctgccatcctctccttccttctgcgcccacagtatccgaccctcaagtgctttgcctactccccgccagggggcctgctgagtgaggatgcgatggagtattccaaggagttcgtgactgctgtggttctgggcaaagacctcgtccccaggattggcctctctcagctggaaggcttccgcagacagctcctggatgtcctgcagcgaagcaccaagcccaaatggcggatcatcgtgggggccaccaaatgcatccccaagtcggagctgcctgaggaggtagaggtgaccaccctggccagcacgcggctctggacccaccccagcgacctaactatagccctctcagccagcactccactctacccgcccggccgcatcatccacgtggtccacaaccaccctgcagagcagtgctgctgctgtgagcaggaggagcccacatactttgccatctggggcgacaacaaggccttcaatgaggtgatcatctcgccagccatgctgcatgagcacctgccctatgtggtcatggaggggctcaacaaggtgctggagaactacaacaaggggaagaccgctctgctctctgcagccaaggtcatggtgagccctaccgaggtggacctgactcctgagctcatcttccagcagcagccactccccacggggccgcccatgcccactggccttgccctggagctgccgactgcagaccaccgcaacagcagcgtcaggagcaagtcccagtctgagatgagcctggagggcttctcggaggggcggctgctgtcgccagtggttgcggcggcggcccgccaggacccggtggagctgctgctgctgtctacccaggagcggctggcggcggagctgcaggcccggcgggcaccactggccaccatggagagcctctcggacactgagtccctgtacagcttcgactcgcgccgctcctcaggcttccgcagcatccggggctcccccagcctccacgctgtgctggagcgtgatgaaggccacctcttctacattgaccctgccatccccgaggaaaacccatccctgagctcgcgcactgagctgctggcggccgacagcctgtccaagcactcacaggacacgcagcccctggaggcggccctgggcagtggcggcgtcactcctgagcggccccccagtgctgcggccaatgacgaggaggaagaggttggcggtgggggtggcgggccggcctcccgcggggagctggcgctgcacaatgggcgcctgggggactcgcccagtcctcaggtgctggaattcgccgagttcatcgacagcctcttcaacctggacagcaagagcagctccttccaagacctctactgcatggtggtgcccgagagccccaccagtgactacgctgagggccccaagtcccccagccagcaagagatcctgctccgtgcccagttcgagcccaacctggtgcccaagcccccacggctctttgccggctcagccgacccctcctcgggcatctcactctcgccctccttcccgctcagctcctcgggtgagctcatggacctgacgcccacgggcctcagtagccaggaatgcctggcggctgacaagatccggacttctacccccactggccacggagccagccccgccaagcaagatgagctggtcatctcagcacgctagcaccccagttgcgtggccagccgggcccaggcaggagcaggtggccctgtgggcacctggtgcctgccccctgccgggcagctttaaggacagacccccaggggcagtttagcctcaggcacaggcatcgctgctgagctgggggtccgcatccctacctcagcttaggacccccagagccaaggtggctgggatctggccccacagatggggaaagatggggaagggtgtggagtggggaggagcctgggcagcctgctgggtgggccacactcagcctgactgccctccatgggggcattctggcaccccctgctccaggacaggccatgggcaagctgcctcccatcactgcctgctggctgctctcccaggggccaggtggagagcagtgccccccgacacatgtattctcatctgtggtccaggccggcatcgtcctggccaccccccagatctggtgcctgctggccggccccctggggtgcccctgccgaggtggcctgcagtgctgtacatgtttacagaagctgctgggcttggctcaggatgtgttctgggcttgcaagccccccgcccaatcatgtgttcagtagccgtcctctgagcagggcccaaggcagccaggggcctggaggggccagaggagggtggggtcagggccgccccttctctgccttgtgcctctcatgctgcctcctctgcccatgggtcctgggcacccaggcctgccctgcctgctggctacttcctggcttaccttctacccccaaggatcctcaccacccaaagggtggtgggcactgctgtgaccaccccagctgcagagtcagtgccctgggtggaaggaaggcactgagagcccccttcctctgagggccccacctcaccccttggtgtcacccccaccacgcctaggcagctctgggccctgggatctggaaccaacacacccctgttcccctcagctttccctcctcgctggcctgggcaccctcctgggagcaggccttcctccctcccacccccaatgtcctgttggtaggaggtggggccaagagtggggtatggtgggccttggctggagacctctgtccactgcccagggaggggcctggggctgggagcagtcccggtttagcctgaggtccccatagggcttcctcccctgctgggtttgggaagcagttagggagatagcgacccggagtttccccagaagcggggtgggagggtgtgcatgctagtgttggcgcgtatgcatgtgcatgagtgtgcaccgttcctaaggaaggggcctctggggctgcccaccctacctgccctgcctgcctgctgcccctcccagcctgccaagaaaacggtaggggagcatgatggggcctttgaggcagggtcgcagggacaagctcagctttaggcaccatctgttcccatcgcgcctgctgctgtgacccgttttggaaaactggtgtgtaccgaggcgctgactgcacggctgaccgcctgctcgtgccttcattctgcagcggcatggtccctcccattctggctccacctgcagcctccctgggtggcctaggctcccccgaccaagagacctccctctcatgatcactggtacctgggggcctgaattctggcccccggctccccacacagctgggactggcctggatggctgtcctgggagcccctgcccaccctgacagagggagctgggcctcccctcatcctctgtaactcccgccttcaccagactcaaggacaccctggccctgctgaggcatacagagcttcagcccagcacagaagcaagacaaaatcagtggctcttagagtttagaaaacaagacagactctcagatgaaagatctgacaagcaccgtggccagtcacagggagagacttgatgtctggccttttaattcctcctctgccagggtgggtcctgggacctctaatgtgggcatgtcgtccaccccaggacgagccatcagggacagaccccccacccccaaggctgcagccacaccatgtttcaggcttggggctggggcaggcttgggctcaatcctgggcacccaggggcagcccacccctaacctggctcctacccacctcgcccttgaaggatgggcctgctgcacgtctccctcctccaccccataccacactggggggtctgagccacccccctcagccccgttcggctcagaccgacccccactccatccccagacctgcagcacaagtgcgcgggcctgtcctcccaggggcctgggcgactccatatgcaatcagtagcgagcagccgggccccacagaccctcatgcactctcttacgtgccattctccccagactttttttgtacttaatgtatgaaagatccaaactaatattgctgtaaaaaggagagacaaattaatatagcttattctataaatatatctgtatataaaggtttctgtatattgtatagagctgtgtataaactggatgtagaagcacaaa

SEQ ID NO: 652 - DNA, 9369 bp, Homo sapiens
ctgtgggtaggcggcggcggcggcggctacgcggagcggcaggcggtggagcgaggccgcgcgcgccgaagatggctgagaagcagaagcacgacgggcgggtgaagatcggacactacgtgctgggcgacacgctgggcgtcggcaccttcggcaaagtgaagattggagaacatcaattaacaggccataaagtggcagttaaaatcttaaatagacagaagattcgcagtttagatgttgttggaaaaataaaacgagaaattcaaaatctaaaactctttcgtcatcctcatattatcaaactataccaggtgatcagcactccaacagatttttttatggtaatggaatatgtgtctggaggtgaattatttgactacatctgtaagcatggacgggttgaagagatggaagccaggcggctctttcagcagattctgtctgctgtggattactgtcataggcatatggttgttcatcgagacctgaaaccagagaatgtcctgttggatgcacacatgaatgccaagatagccgatttcggattatctaatatgatgtcagatggtgaatttctgagaactagttgcggatctccaaattatgcagcacctgaagtcatctcaggcagattgtatgcaggtcctgaagttgatatctggagctgtggtgttatcttgtatgctcttctttgtggcaccctcccatttgatgatgagcatgtacctacgttatttaagaagatccgagggggtgtcttttatatcccagaatatctcaatcgttctgtcgccactctcctgatgcatatgctgcaggttgacccactgaaacgagcaactatcaaagacataagagagcatgaatggtttaaacaagatttgcccagttacttatttcctgaagacccttcctatgatgctaacgtcattgatgatgaggctgtgaaagaagtgtgtgaaaaatttgaatgtacagaatcagaagtaatgaacagtttatatagtggtgaccctcaagaccagcttgcagtggcttatcatcttatcattgacaatcggagaataatgaaccaagccagtgagttctacctcgcctctagtcctccatctggttcttttatggatgatagtgccatgcatattcccccaggcctgaaacctcatccagaaaggatgccacctcttatagcagacagccccaaagcaagatgtccattggatgcactgaatacgactaagcccaaatctttagctgtgaaaaaagccaagtggcatcttggaatccgaagtcagagcaaaccgtatgacattatggctgaagtttaccgagctatgaagcagctggattttgaatggaaggtagtgaatgcataccatcttcgtgtaagaagaaaaaatccagtgactggcaattacgtgaaaatgagcttacaactttacctggttgataacaggagctatcttttggactttaaaagcattgatgatgaagtagtggagcagagatctggttcctcaacacctcagcgttcctgttctgctgctggcttacacagaccaagatcaagttttgattccacaactgcagagagccattcactttctggctctctcactggctctttgaccggaagcacattgtcttcagtttcacctcgcctgggcagtcacaccatggatttttttgaaatgtgtgccagtctgattactactttagcccgttgatctgtctctagtttctttctgttattgcactatgaaaatcagttatattctttaaatttttatcttacttttggataatatccactgcaatactaattgagaaacatgaattatttccaggggcacacaatgctattgaaattactgaaaacaaaatatctgacatcttatttacttgtagaaatctgtaattctattgtgcctatgataaattcacataggcaatatctttaataggttaatatcaatgaagatttttaattacaataatgagttcactacagacgattaacacaccacactggcgaaccatctcaatgtaagggtggtttggcaacacctccttgctttgctgtttggtgtaggtaaatctagtttacttcctaaatttcagtaggctttatgctgtgtttatgcccccaatttattttaacaaaagaagattaaaaagtaaaagaaccacgagtaagatattatttaaatgttgaaatcttaaaaacctgcctccaagatttcagaagccaagtttttctaacagtatttgtacaaatactgcctagtgtattcaacagaaggactgtggtcatgtaacaggtaaccacaattttcaggtttcttaaaaacagctgtaactaactcaggatttttatcttgagatttccctgaataatatatttatcttaagagccttcaagtttcaaattaatattggaacatctggaattgcaacaacttttgtcttttacataaacttacgtcatttaaaaaatgtcttcaaaatctacctttctcaaattctttttgcctctatttatttttgcatttcaccaacagtgataaaatagttaaatgaaacaaagcaaagtatcaacagtcccttaaatgagaatccttatctttgatctttattttctgtgttaggtgttagggtcctggtgcagctcataatgctaattcttcattggaagccactcccttcacctcacctcacctagtcactattgtctttgttcattgtttgatcctgagtggttgattgatatagctttgaatcttttctagtccaagtttgaaaacactgttctggccctaagggctggctatgacctttactgttgaacctgatagggcagggaagctttgaacatcaagaaaaaatttttatcttaaataaataaatatatatattcacacaccagtgcttttaagcaaaaaccagtttttttgtttgtttgttttgctttgtgcaggttttctttaagattaaaaaaacacaaactatagcagggtagataatagtttattgattatattttgttttagtaaaagtatttaattttaaattctgtgtaatttatctaatttgtatttattcatttgttatttttatgttgtaattaacacttatttacctggattaccctaaaaaaattaagctcttgaaaacaaaaaaatgacattaccttgacaggcttctctttgccaaaagtaatgtatgttctgccaagaagcaaatgagaatgttagactaagtttctcctgtgttagtggaaaacaagtgtgtctatctttaaatattctttgaatcaggagtttgcgttgtgtcacatcatatggctttgcagatcttttaaaaactgatgttaaataacttataagtccaacttcttaatatcaagataaatgaatagttcaccaatttgggaaggagggcgggttgcaatttgagatagtttaaggtttaattattgaaagactgccatcttgtggcaccaaaaggtaatttttacatgattatttgtatagtgataagcagtcctgctgtgttagcctggtccattatagatatggcatagttttgggttctctaaatgggtccatacctcttttgggaaaaaacagggccacctcataatatttgcctgattatgaatggaattaccttagaaataaggaactaatcagattacttaaccccaatgacaaaatccacaaaaattttgaaggcagagaaacagaaggaatccagtgatgttttagctccattagtctaataggtcagatattaaaaaattgttcatatcaaaattaccttatatggattattgccatgttttttgagagttaattatttactgttttctaattcttgccagtatttatgaacagctgtagcttgatatttacctactgaattttaggagaactaatggtcacagtttgggttcttttatgtgtatgtttttaaaacagctattttgtgaatctaggtggttggtttttagaagatttcaggagatgcagtccagcacaattagagctggaacattgttacagcaggctttttgttgctcatgggcagatagagggaaagaatcagttgttagccccaaatttccacatttcagtgttgtaaactctgaatgtgataggtagatgtgggctaagaataatttcctccagtgaagacacgggagaagagcttctattatgaggttatagataaggccttagttatatcatggaaatggactccatgtagttctagaactgcatttcccaaagtatatcctgtgagatgctccacagaaaaaatgattgcatggactaagtttgaaaaatgttgcatgctactcttcccctcgaagatgacagtggatgtcagcattaaagactttgacaggtctttctgtgaaaaaaagaaagccacataactttgttgaactttgcccaaattaatttttcattttaaaaaacttaatagcccatgaaaagcaaatttgggaaatacattttttaggaaaatactgtcccagaatgccataattagggtagttaataattaacacttccatttctcttactggttgttgggagaatctgattgaaaattagaattactttgttttaacttgcagacatgttcatcgtgagtgaatgctggattaaatagaattttctgtgtctgcaacttgtttcatgacaccttggttttcttaatcatcttgtattattatttgagtgcaacattattcttatgcatgggtgactgaaaaacctgaaacaagattacttgttaaaaaaaagtctaagagactaatgactcatgcttatggctcagtgggtaatgaatcagtgtcactgattcttacttttaaaatgtgtagtcagtgaacattttctaaatacttttctttgggataccatatgaagatctaattccttatgtttcagtgtaggaacagctaccttctcaaatagaatatgcagggagggaagtaggcaaaccatttacaagttgggtttttgttttgattaacctgttaagagacacttttgtaatctctagtgtttacattcctttatactagctatctataaagagaatccagaaggctaaattaatcagaaataattatatttctatgtcagggtattggctatatgtagcatgaacaattctccattttctgcaaatgggtttttcaggacagttttataattctgagtttgctttttcttattccctagacagtttgtactcagggaatacaaattgatttttactgttaaatgagacatagtttagaaaaaatcataagcaactattgtagatttttgatctgtttggatttatctgtagcattgaataatgtgcagtgtactgagttaatgtaggcacctcactttggatttataaaatgtaaaaacctggaacatgcctgccacagacaccactttgtctattcaccgggtactaatttacatcctattaatggttgtaaaagctgagtgtctaaatgctagacatgttcacaattttgtctgtttttgtttatttgtttttaagacccaaaccttttcaatcttgcatttatttacttggttctcctgtgtcaccctgtggctttttaaatagggaatgtaatttattttaatagtagttctcaaagactctattaaaaactctggacgagggatatgtgcaatctgttggtaagtcacatcctatgtttggcctcatttttataactcctaaaatgagaaaggtagattttaacacttctaaggtacctttgagctttaaagttcttttctgcttttccatatgatttgtgttagtgttcactttttatatatttagagtttttatatgagtgtgaatgtttctgttttgatttggtgaggcatgtcagaggtatatacttgaatatttttctaaatacagctgctggaggaatgcaaatggcaaaaatcatccagaaaaccaaacacggtgaaacatcacatccatttggcatgaagcaaagcattacaaatttggagtgatgaaagtgttccatatattttttatagtgatttttcgatctagagacccttcatattgtttacttactattacgataactttgagaggtaaccagagaaagcatttttgccatttccagatgaggaagcaggaccagaaagctcttcataaagctttaacaccatacaagtatccagcagtgatcaattgctctttataggaaaccacctttcctctggggaagaacagtctgaattaataaaacatcagagtggttgagtagtaaaaataaacacagatgtattgctttcaagtcttagagtgacataaagtagtcttaaataaatagttcttagtttattttaagcagttgattgtactaacgagatgtaattatctgaagtatttatgattagcatattggtttttataagtatttctgagttattgagggtgcttaaaaatgctgaagaaactttaaaacatgattcttcttataattttatgtgattcttatagcacaatcatttttgaaaaaggaaaactaggctgggtgtagtggctcatgcctataatcccagcactttgggaggccaaagtgggtggatcacccgagttcaggagttcgagaccagtctggccaacatggtgaaacctcgtctctactaaaaataccaaaattatccggtgtggtgacaggctgcttgtaatcccagctactcgggaggctgaggcacgggaatctcttgaacctgggaggcagagattgcaataagccaagatcatgccactgcatgccagcctgggtgacagcacaagactgtctcaaaaaaaaacaaaaaaaggaaaaagaaaactagccccagtccctgtctaaattgttatagtttttgactattatctgaattagtcttatccaaatttcatatgcagattgatttttcattttgtatgtatattacatgatataactattttcatagaatatatttctaatttacaaacactgaattattagcttgatagagtttctcccaaaccttataaaactttgaaatgtacttatgtttgagctttaaaaattataaaaacttcatttaaacaagttgctggcatcattactagcctttccacctataattatgatgcatttgatgccactgaacagtaatagcacaaagaacaggtcacacagtctagactggattgagttttaattaaacttcttcatccatagcctgataagaatcaggctgggtctagaagagttatcagactgtaggcctgtattaattttgcaagctaatgttaatgtttactgccagccttgcatagcaatgccagtttgcagttgtgactatgatgtgacttttggtaaaaatggtttatatctaaagtagtttagattttatggaagtggctcttgattgtttggacaagcagggtaggtaaatttcaattacgtttgaagtgtaattaaatcctagaatagagcactctccagaaaaaaaaatgaaaaaagaatttggagaatatcctggcatgaaaacttttttgaataatacgtagaattttgacaaggttcatacagtgcatacagtgtgaccttttctgaggtgggcagggagggttgctacgttgtgttgatttaaaatttcaaggaggaacaaaaacattctagccaaggagaattgcattgttatttttttttctactaatttaaacgtgcatttttcacagttacacatttaagttttgctaccaaaaatggccatttttctagacagataacattttcctaaagtggaagagagatccactgttctaaaaaaaaaaaaaaaaaaaaacactaaattgtgccttctcccttaaattataagaagagtaatagtaaaaacttgtttaaactatattttctttttttctaatccctctcagttctccttagatctgcctcctacaaatgatcatgttgtttgcatctgcctgattgagttcccttggtcaaacctctccctatcactatcagaagttgttcactaaatgtattttcctatttctttcatgttgattgactttataagtcaccttggtaaacataacatttggctaccttctcatgctttataaatgaatttgatgaatggcagtttttatattttaaccctttaaaaagtttgtcaaggaaacaactcagagctaagaacaaaatctaacttggaatcagtttcttcctttggctgctgaagcagcagcaagtcacgtaacctcatttagttttttgatttacaaaatgtggataataacctacctcacagatgtgtgtgagcaactgtttgaaagcccttgtttaaatacagggtttatatccccacattcaatgtaaattcctttttttaaaaaaaataagtatctttgatactgataggatgagtatcttgatttttaggtaagatcacagtttcacaaattgtggtgttgttaggtgacatttaatatttcttgagacctcaagtattcaaatatcaaacttgtcctgtgttgtaacaaatattcagaatctcttaaaatgttggctgaagctgccttaatgtaccaaaatacagctctcaagactgttcacaaatatctgtggttgtacaatgttttgaacatttaatgtaaagttgttgtagaactgtgaactctaaggatagtatctttattgttttaggaagaatggttgtgttctttgtcatgtatgcttaaatatacagtggattttgaatgcaacaaataaaactgaaaacagccatttggttgtgtcatgacaatcataatataggatataatatttactttttttcaaaaacatcctgcattcattcattcttagcatacctttgaaaaagaaaaaaaaatccataggttgatacattgacccattgaagtacttcattacgtatttattgaaaattttttttaattgttgaaattgggaccactttttataattggtttcaagaaaaaaaaatgaacagacttccagtgcttttctgttcaaataaactccgattcaaatttcagttttgtttgttatatactttttgtgagtgttaaatgatatgggaaggatttgtctttcattaaccatatggaaaagatgtcttcctgaattacatagcatttcatagttacagattcttcctaattaatgtttgcaccatatgaaactcataggtaacaaacacaaaggagaaaagcagcctgtctgattgcttataagcttttttcacaaaatcaaattaaaagtctctgattcatttgaaagctaaaaaaaaaaaaaaaaaa

SEQ ID NO: 653 - DNA, 11711 bp, Homo sapiens
cacagtggtcctccgccggctacggcgctgcgtcactggtttgcaggcgctttcctcttggaagtggcgactgctgcgggcctgagcgctggtctcacgcgcctcgggagccaggttggcggcgcgatgaggcgcagcaaggctgacgtggagcggtacatcgcctcggtgcagggctccaccccgtcgcctcgacagaagtcaatgaaaggattctattttgcaaagctgtattatgaagctaaagaatatgatcttgctaaaaaatacatatgtacttacattaatgtgcaagagagggatcccaaagctcacagatttctgggtcttctttatgaattggaagaaaacacagacaaagccgttgaatgttacaggcgttcagtggaattaaacccaacacaaaaagatcttgtgttgaagattgcagaattgctttgtaaaaatgatgttactgatggaagagcaaaatactggcttgaaagagcagccaaacttttcccaggaagtcctgcaatttataaactaaaggaacagcttctagattgtgaaggtgaagatggatggaataaactttttgacttgattcagtcagaactttatgtaagacctgatgacgtccatgtgaacatccggctagtggaggtgtatcgctcaactaaaagattgaaggatgctgtggcccactgccatgaggcagagaggaacatagctttgcgttcaagtttagaatggaattcgtgtgttgtacagacccttaaggaatatctggagtctttacagtgtttggagtctgataaaagtgactggcgagcaaccaatacagacttactgctggcctatgctaatcttatgcttcttacgctttccactagagatgtgcaggaaagtagagaattactgcaaagttttgatagtgctcttcagtctgtgaaatctttgggtggaaatgatgaactgtcagctactttcttagaaatgaaaggacatttctacatgcatgctggttctctgcttttgaagatgggtcagcatagtagtaatgttcaatggcgagctctttctgagctggctgcattgtgctatctcatagcatttcaggttccaagaccaaagattaaattaataaaaggtgaagctggacaaaatctgctggaaatgatggcctgtgaccgactgagccaatcagggcacatgttgctaaacttaagtcgtggcaagcaagattttttaaaagagattgttgaaacttttgccaacaaaagcgggcagtctgcattatatgatgctctgttttctagtcagtcacctaaggatacatcttttcttggtagcgatgatattggaaacattgatgtacgagaaccagagcttgaagatttgactagatacgatgttggtgctattcgagcacataatggtagtcttcagcaccttacttggcttggcttacagtggaattcattgcctgctttacctggaatccgaaaatggctaaaacagcttttccatcatttgccccatgaaacctcaaggcttgaaacaaatgcacctgaatcaatatgtattttagatcttgaagtatttctccttggagtagtatataccagccacttacaattaaaggagaaatgtaattctcaccacagctcctatcagccgttatgcctgccccttcctgtgtgtaaacagctttgtacagaaagacaaaaatcttggtgggatgcggtttgtactctgattcacagaaaagcagtacctggaaacgtagcaaaattgagacttctagttcagcatgaaataaacactctaagagcccaggaaaaacatggccttcaacctgctctgcttgtacattgggcagaatgccttcagaaaacgggcagcggtcttaattctttttatgatcaacgagaatacatagggagaagtgttcattattggaagaaagttttgccattgttgaagataataaaaaagaagaacagtattcctgaacctattgatcctctgtttaaacattttcatagtgtagacattcaggcatcagaaattgttgaatatgaagaagacgcacacataacttttgctatattggatgcagtaaatggaaatatagaagatgctgtgactgcttttgaatctataaaaagtgttgtttcttattggaatcttgcactgatttttcacaggaaggcagaagacattgaaaatgatgccctttctcctgaagaacaagaagaatgcaaaaattatctgagaaagaccagggactacctaataaagattatagatgacagtgattcaaatctttcagtggtcaagaaattgcctgtgcccctggagtctgtaaaagagatgcttaattcagtcatgcaggaactcgaagactatagtgaaggaggtcctctctataaaaatggttctttgcgaaatgcagattcagaaataaaacattctacaccgtctcctaccagatattcactatcaccaagtaaaagttacaagtattctcccaaaacaccacctcgatgggcagaagatcagaattctttactgaaaatgatttgccaacaagtagaggccattaagaaagaaatgcaggagttgaaactaaatagcagtaactcagcatcccctcatcgttggcccacagagaattatggaccagactcagtgcctgatggatatcaggggtcacagacatttcatggggctccactaacagttgcaactactggcccttcagtatattatagtcagtcaccagcatataattcccagtatcttctcagaccagcagctaatgttactcccacaaagggcccagtctatggcatgaataggcttccaccccaacagcatatttatgcctatccgcaacagatgcacacaccgccagtgcaaagctcatctgcttgtatgttctctcaggagatgtatggtcctcctgcattgcgttttgagtctcctgcaacgggaattctatcgcccaggggtgatgattactttaattacaatgttcaacagacaagcacaaatccacctttgccagaaccaggatatttcacaaaacctccgattgcagctcatgcttcaagatctgcagaatctaagactatagaatttgggaaaactaattttgttcagcccatgccgggtgaaggattaaggccatctttgccaacacaagcacacacaacacagccaactccttttaaatttaactcaaatttcaaatcaaatgatggtgacttcacgttttcctcaccacaggttgtgacacagccccctcctgcagcttacagtaacagtgaaagccttttaggtctcctgacttcagataaacccttgcaaggagatggctatagtggagccaaaccaattcctggtggtcaaaccattgggcctcgaaatacattcaattttggaagcaaaaatgtgtctggaatttcatttacagaaaacatggggtcgagtcagcaaaagaattctggttttcggcgaagtgatgatatgtttactttccatggtccagggaaatcagtatttggaacacccactttagagacagcaaacaagaatcatgagacagatggaggaagtgcccatggggatgatgatgatgacggtcctcactttgagcctgtagtacctcttcctgataagattgaagtaaaaactggtgaggaagatgaagaagaattcttttgcaaccgcgcgaaattgtttcgtttcgatgtagaatccaaagaatggaaagaacgtgggattggcaatgtaaaaatactgaggcataaaacatctggtaaaattcgccttctaatgagacgagagcaagtattgaaaatctgtgcaaatcattacatcagtccagatatgaaattgacaccaaatgctggatcagacagatcttttgtatggcatgcccttgattatgcagatgagttgccaaaaccagaacaacttgctattaggttcaaaactcctgaggaagcagcactttttaaatgcaagtttgaagaagcccagagcattttaaaagccccaggaacaaatgtagccatggcgtcaaatcaggctgtcagaattgtaaaagaacccacaagtcatgataacaaggatatttgcaaatctgatgctggaaacctgaattttgaatttcaggttgcaaagaaagaagggtcttggtggcattgtaacagctgctcattaaagaatgcttcaactgctaagaaatgtgtatcatgccaaaatctaaacccaagcaataaagagctcgttggcccaccattagctgaaactgtttttactcctaaaaccagcccagagaatgttcaagatcgatttgcattggtgactccaaagaaagaaggtcactgggattgtagtatttgtttagtaagaaatgaacctactgtatctaggtgcattgcgtgtcagaatacaaaatctgctaacaaaagtggatcttcatttgttcatcaagcttcatttaaatttggccagggagatcttcctaaacctattaacagtgatttcagatctgttttttctacaaaggaaggacagtgggattgcagtgcatgtttggtacaaaatgaggggagctctacaaaatgtgctgcttgtcagaatccgagaaaacagagtctacctgctacttctattccaacacctgcctcttttaagtttggtacttcagagacaagtaaaactctaaaaagtggatttgaagacatgtttgctaagaaggaaggacagtgggattgcagttcatgcttagtgcgaaatgaagcaaatgctacaagatgtgttgcttgtcagaatccggataaaccaagtccatctacttctgttccagctcctgcctcttttaagtttggtacttcagagacaagcaaggctccaaagagcggatttgagggaatgttcactaagaaggagggacagtgggattgcagtgtgtgcttagtaagaaatgaagccagtgctaccaaatgtattgcttgtcagaatccaggtaaacaaaatcaaactacttctgcagtttcaacacctgcctcttcagagacaagcaaggctccaaagagcggatttgagggaatgttcactaagaaggagggacagtgggattgcagtgtgtgcttagtaagaaatgaagccagtgctaccaaatgtattgcttgtcagaatccaggtaaacaaaatcaaactacttctgcagtttcaacacctgcctcttcagagacaagcaaggctccaaagagcggatttgagggaatgttcactaagaaggaaggacagtgggattgcagtgtgtgcttagtaagaaatgaagccagtgctaccaaatgtattgcttgtcagtgtccaagtaaacaaaatcaaacaactgcaatttcaacacctgcctcttcggagataagcaaggctccaaagagtggatttgaaggaatgttcatcaggaaaggacagtgggattgtagtgtttgctgtgtacaaaatgagagttcttccttaaaatgtgtggcttgtgatgcctctaaaccaactcataaacctattgcagaagctccttcagctttcacactgggctcagaaatgaagttgcatgactcttctggaagtcaggtgggaacaggatttaaaagtaatttctcagaaaaagcttctaagtttggcaatacagagcaaggattcaaatttgggcatgtggatcaagaaaattcaccttcatttatgtttcagggttcttctaatacagaatttaagtcaaccaaagaaggattttccatccctgtgtctgctgatggatttaaatttggcatttcggaaccaggaaatcaagaaaagaaaagtgaaaagcctcttgaaaatggtactggcttccaggctcaggatattagtggccagaagaatggccgtggtgtgatttttggccaaacaagtagcacttttacatttgcagatcttgcaaaatcaacttcaggagaaggatttcagtttggcaaaaaagaccccaatttcaagggattttcaggtgctggagaaaaattattctcatcacaatacggtaaaatggccaataaagcaaacacttccggtgactttgagaaagatgatgatgcctataagactgaggacagcgatgacatccattttgaaccagtagttcaaatgcccgaaaaagtagaacttgtaacaggagaagaagatgaaaaagttctgtattcacagcgggtaaaactatttagatttgatgctgaggtaagtcagtggaaagaaaggggcttggggaacttaaaaattctcaaaaacgaggtcaatggcaaactaagaatgctgatgcgaagagaacaagtactaaaagtgtgtgctaatcattggataacgactacgatgaacctgaagcctctctctggatcagatagagcatggatgtggttagccagtgatttctctgatggtgatgccaaactagagcagttggcagcaaaatttaaaacaccagagctggctgaagaattcaagcagaaatttgaggaatgccagcggcttctgttagacataccacttcaaactccccataaacttgtagatactggcagagctgccaagttaatacagagagctgaagaaatgaagagtggactgaaagatttcaaaacatttttgacaaatgatcaaacaaaagtcactgaggaagaaaataagggttcaggtacaggtgcggccggtgcctcagacacaacaataaaacccaatcctgaaaacactgggcccacattagaatgggataactatgatttaagggaagatgctttggatgatagtgtcagtagtagctcagtacatgcttctccattggcaagtagccctgtgagaaaaaatcttttccgttttggtgagtcaacaacaggatttaacttcagttttaaatctgctttgagtccatctaagtctcctgccaagttgaatcagagtgggacttcagttggcactgatgaagaatctgatgttactcaagaagaagagagagatggacagtactttgaacctgttgttcctttacctgatctagttgaagtatccagtggtgaggaaaatgaacaagttgtttttagtcacagggcaaaactctacagatatgataaagatgttggtcaatggaaagaaaggggcattggtgatataaagattttacagaattatgataataagcaagttcgtatagtgatgagaagggaccaagtattaaaactttgtgccaatcacagaataactccagacatgactttgcaaaatatgaaagggacagaaagagtatggttgtggactgcatgtgattttgcagatggagaaagaaaagtagagcatttagctgttcgttttaaactacaggatgttgcagactcgtttaagaaaatttttgatgaagcaaaaacagcccaggaaaaagattctttgataacacctcatgtttctcggtcaagcactcccagagagtcaccatgtggcaaaattgctgtagctgtattagaagaaaccacaagagagaggacagatgttattcagggtgatgatgtagcagatgcaacttcagaagttgaagtgtctagcacatctgaaacaacaccaaaagcagtggtttctcctccaaagtttgtatttggttcagagtctgttaaaagcatttttagtagtgaaaaatcaaaaccatttgcattcggcaacagttcagccactgggtctttgtttggatttagttttaatgcacctttgaaaagtaacaatagtgaaactagttcagtagcccagagtggatctgaaagcaaagtggaacctaaaaaatgtgaactgtcaaagaactctgatatcgaacagtcttcagatagcaaagtcaaaaatctctttgcttcctttccaacggaagaatcttcaatcaactacacatttaaaacaccagaaaaggcaaaagagaagaaaaaacctgaagattctccctcagatgatgatgttctcattgtatatgaactaactccaaccgctgagcagaaagcccttgcaaccaaacttaaacttcctccaactttcttctgctacaagaatagaccagattatgttagtgaagaagaggaggatgatgaagatttcgaaacagctgtcaagaaacttaatggaaaactatatttggatggctcagaaaaatgtagacccttggaagaaaatacagcagataatgagaaagaatgtattattgtttgggaaaagaaaccaacagttgaagagaaggcaaaagcagatacgttaaaacttccacctacatttttttgtggagtctgtagtgatactgatgaagacaatggaaatggggaagactttcaatcagagcttcaaaaagttcaggaagctcaaaaatctcagacagaagaaataactagcacaactgacagtgtatatacaggtgggactgaagtgatggtaccttctttctgtaaatctgaagaacctgattctattaccaaatccattagttcaccatctgtttcctctgaaactatggacaaacctgtagatttgtcaactagaaaggaaattgatacagattctacaagccaaggggaaagcaagatagtttcatttggatttggaagtagcacagggctctcatttgcagacttggcttccagtaattctggagattttgcttttggttctaaagataaaaatttccaatgggcaaatactggagcagctgtgtttggaacacagtcagtcggaacccagtcagccggtaaagttggtgaagatgaagatggtagtgatgaagaagtagttcataatgaagatatccattttgaaccaatagtgtcactaccagaggtagaagtaaaatctggagaagaagatgaagaaattttgtttaaagagagagccaaactttatagatgggatcgggatgtcagtcagtggaaggagcgcggtgttggagatataaagattctttggcatacaatgaagaattattaccggatcctaatgagaagagaccaggtttttaaagtgtgtgcaaaccacgttattactaaaacaatggaattaaagcccttaaatgtttcaaataatgctttagtttggactgcctcagattatgctgatggagaagcaaaagtagaacagcttgcagtgagatttaaaactaaagaagtagctgattgtttcaagaaaacatttgaagaatgtcagcagaatttaatgaaactccagaaaggacatgtatcactggcagcagaattatcaaaggagaccaatcctgtggtgttttttgatgtttgtgcggacggtgaacctctagggcggataactatggaattattttcaaacattgttcctcggactgctgagaacttcagagcactatgcactggagagaaaggctttggtttcaagaattccatttttcacagagtaattccagattttgtttgccaaggaggagatatcaccaaacatgatggaacaggcggacagtccatttatggagacaaatttgaagatgaaaattttgatgtgaaacatactggtcctggtttactatccatggccaatcaaggccagaataccaataattctcaatttgttataacactgaagaaagcagaacatttggactttaagcatgtagtatttgggtttgttaaggatggcatggatactgtgaaaaagattgaatcatttggttctcccaaagggtctgtttgtcgaagaataactatcacagaatgtggacagatataaaatcattgttgttcatagaaaatttcatctgtataagcagttggattgaagcttagctattacaatttgatagttatgttcagcttttgaaaatggacgtttccgatttacaaatgtaaaattgcagcttatagctgttgtcactttttaatgtgttataattgaccttgcatggtgtgaaataaaagtttaaacactggtgtatttcaggtgtacttgtgtttatgtactcctgacgtattaaaatggaataatactaatcttgttaaaagcaatagacctcaaactattgaaggaatatgatatatgcaatttaattttaattccttttaagatatttggacttcctgcatggatatacttaccatttgaataaagggaccacaacttggataatttaattttaggtttgaaatatatttggtaatcttaactattggtgtactcatttatgcatagagactcgtttatgaatgggtagagccacagaacgtatagagttaaccaaagtgctcttctctagaatctttacacctcctgtgtggttacaagttaactttgtaagtagcgtaccttccttccttaaaatatctagcttcctgtgccctttcatagatattcgattaatttttacattttaaacaagttgactatttcctttaggggttttgtttcaaacttttctgtcatctgtctctactacctcagaaactgcagcttggttctgatgatagaaattgaatttttccttgtagttattgtgataaagtatgaatatttttagaaagtctataccatgttctttcgttaaagatttgctttatacaagattgttgcagtacctttttctggtaaattttgtagcagaaataaaatgacaattcctaagagccactgacatccaaaaaattcattacttacgcttcgggttcattctaaagtaaggaagacaatttaaaggcagtaaattcaaactgctgcataatttccagagctcctagtttctcaagtttgatacacaccaaaaacgtatttggaaatggcttgtatcaaatgttaggcaaattgctaaagaaaagaggatgttcttattggcctactcaatatggaactacaaagaatccaggtagaacacaaaattttgtatattgcaattatgaatattgactgtcttccacccatctgtgttctttcgggtgaaattacctcattttatttagtgaggaaagacaggtttattccctgttacatggggatttggaaattgggtatcctaaagcaagtaactgttcaaccaccagtcaaaagaggggagggatgttgtgcgagtaatgagtgatggtataccatcaccattccactcggccacaaagccagatacttgaaataaacctactccaaatgtatcagttcagtcttgaaccatggattacatatgtttacactaaatatttcaaattggcttatttggaaatctatgtaatataaactgatgtaaagtgtgttgtaacttttcagctgagacagttgatgccttcgtcatgattttagaataaattcttaagttaatgcaagtgctttttaagagactttttacagatttgtatgctttcctaaagcactaaagttacaaattaaaaagctttaaaaactttgaccaaaaatttgacaaaatgacatgtaaactgacttttcccgtattagtattccaaagatgcttaaaagtggcttgtggcatttatgagaaagtctttgtgtcacatttcaggaaaggactttgatttctctttgttatttaatcactgatgtggtctaaacccacgataatatgtatctttccttttaaactggattttatgttgtctcattaaaatctgcttaaagatagaataaaattcattatttgtaca

SEQ ID NO: 654 - DNA, 2545 bp, Homo sapiens
agtgctcgctctagtgcgcgcgcccggacggcgcctgcgcagagggcaaggaacctggtaccccggtgcggtcccggcgcctgcgcgctgcggactgtggggcttctcggcccgaggcagaggaacagggaagatggcggctgtggtggagaatgtagtgaagctccttggggagcagtactacaaagatgccatggagcagtgccacaattacaatgctcgcctctgtgctgagcgcagcgtgcgcctgcctttcttggactcacagaccggagtagcccagagcaattgttacatctggatggaaaagcgacaccggggtccaggattggcctccggacagctgtactcctaccctgcccggcgctggcggaaaaagcggcgagcccatccccctgaggatccacgactttccttcccatctattaagccagacacagaccagaccctgaagaaggaggggctgatctctcaggatggcagtagtttagaggctctgttgcgcactgaccccctggagaagcgaggtgccccggatccccgagttgatgatgacagcctgggcgagtttcctgtgaccaacagtcgagcgcgaaagcggatcctagaaccagatgacttcctggatgacctcgatgatgaagactatgaagaagatactcccaagcgtcggggaaaggggaaatccaagggtaagggtgtgggcagtgcccgtaagaagctggatgcttccatcctggaggaccgggataagccctatgcctgtgacatttgtggaaaacgttacaagaaccgaccaggcctcagttaccactatgcccactcccacttggctgaggaggagggcgaggacaaggaagactctcaaccacccactcctgtttcccagaggtctgaggagcagaaatccaaaaagggtcctgatggattggccttgcccaacaactactgtgacttctgcctgggggactcaaagattaacaagaagacgggacaacccgaggagctggtgtcctgttctgactgtggccgctcagggcatccatcttgcctccaatttacccccgtgatgatggcggcagtgaagacataccgctggcagtgcatcgagtgcaaatgttgcaatatctgcggcacctccgagaatgacgaccagttgctcttctgtgatgactgcgatcgtggctaccacatgtactgtctcaccccgtccatgtctgagccccctgaaggaagttggagctgccacctgtgtctggacctgttgaaagagaaagcttccatctaccagaaccagaactcctcttgatgtggccacccacctgctccccgacatatctaaggctgtttctctcctccacttcatatttcatacccatctttcccttcttcctcctctccttcacaaatccagagaaccttggggtggttgtgccagcctgcctttggcagctgcaagctgaggtggcagctctgaccacctctggccccaggccctcagggagaaaggagcaacacactgcccctaggcgtgcgtgtggcccagtttctctctgctctccattaagtgcattcactctgcttgccttgggcccagcccctggtgatcacagggttcaaacagtgtcctcctagaaagagtgggagagcagctcacttctctgtgttctgcctcccctctggtctccagagttttcctgtcctctagaggcaagccaggccagggagctgggagcgagcaagctgaggccacgtccacaaggagcttttcatgcccctgtgccgcatagcctcacctctttcctccagagtggctctctgcggccctgtgttcctgctacagagtgttcttttctggagtcaggatgttctcggtcaccctcctggttctgccctgtcccattccaccccaccccagggggaacagtagcttcaccttgttattcccattgctctcctggctcactcttacggtcggtctccagtgactgaagcattccccacccttggaatttctcatcttctgcctcccttcctactccttttggttttgtggggagaggggaaggatcagggggccaggccagcagctcgggggccacaaggagatggataatgtgcctgttttttaacacaacaaaaaagcctacctccaaaatcccctttttgttcttcctggacctgggcattcagcctcctgctcttaactgaattgggagcctctgccacctgccccgtgtatcctggctctcagctcatggggaagccacatagacatccctttcttcccttgcacgctcgctagcagctggtaaggtcttcacaccctgattcctcaagttttctgcttagtggcactgacattaagtagtggggggacagtccatgccaggacaccctggagtagccttcccccttggccgtgggcaggccctaactcactgtcgctttggagttgaggtgtcttttttttttctttctttagttcctgtattctaaacattagtaaaaataaatgtttttacacagaaaaaaaaaaaaaaaa

SEQ ID NO: 655 - DNA, 815 bp, Homo sapiens
agaggagcagaggggctgagaccaaaccagaaacctccaattctcatgtggaagcccatgccctcaccctccaacatgaaagcctctgcagcacttctgtgtctgctgctcacagcagctgctttcagcccccaggggcttgctcagccagttgggattaatacttcaactacctgctgctacagatttatcaataagaaaatccctaagcagaggctggagagctacagaaggaccaccagtagccactgtccccgggaagctgtaatcttcaagaccaaactggacaaggagatctgtgctgaccccacacagaagtgggtccaggactttatgaagcacctggacaagaaaacccaaactccaaagctttgaacattcatgactgaactgaaaacaagccatgacttgagaaacaaataatttgtataccctgtcctttctcagagtggttctgagattattttaatctaattctaaggaatatgagctttatgtaataatgtgaatcatggtttttcttagtagattttaaaagttattaatattttaatttaatcttccatggattttggtgggttttgaacataaagccttggatgtatatgtcatctcagtgctgtaaaaactgtgggatgctcctcccttctctacctcatgggggtattgtataagtccttgcaagaatcagtgcaaagatttgctttaattgttaagatatgatgtccctatggaagcatattgttattatataattacatatttgcatatgtatgactcccaaattttcacataaaatagatttttgtataaca

SEQ ID NO: 656 - DNA, 4705 bp, Homo sapiens
ctttggaaagtcccgtggaaatccccgggcctacaacccgcatacaactgaaacggggcaaagcagactgcgcagtctgcagtcttcgtggcgggccaagcgagcttggagcccgcgggggcggagcggtgagagcggccgccaagagagatcacacccccagccgaccctgccagcgagcgagcccgaccccaggcgtccatggagcgtcgcctccgcccggtccctgccccgacccccgcctgcggcgcgctcctgccttgaccaggacttgggactttgcgaaaggatcgcggggcccggagaggtgttggagagcacaatggctgaacaagtccttcctcaggctttgtatttgagcaatatgcggaaagctgtgaagatacgggagagaactccagaagacatttttaaacctactaatgggatcattcatcattttaaaaccatgcaccgatacacactggaaatgttcagaacttgccagttttgtcctcagtttcgggagatcatccacaaagccctcatcgacagaaacatccaggccaccctggaaagccagaagaaactcaactggtgtcgagaagtccggaagcttgtggcgctgaaaacgaacggtgacggcaattgcctcatgcatgccacttctcagtacatgtggggcgttcaggacacagacttggtactgaggaaggcgctgttcagcacgctcaaggaaacagacacacgcaactttaaattccgctggcaactggagtctctcaaatctcaggaatttgttgaaacggggctttgctatgatactcggaactggaatgatgaatgggacaatcttatcaaaatggcttccacagacacacccatggcccgaagtggacttcagtacaactcactggaagaaatacacatatttgtcctttgcaacatcctcagaaggccaatcattgtcatttcagacaaaatgctaagaagtttggaatcaggttccaatttcgcccctttgaaagtgggtggaatttacttgcctctccactggcctgcccaggaatgctacagataccccattgttctcggctatgacagccatcattttgtacccttggtgaccctgaaggacagtgggcctgaaatccgagctgttccacttgttaacagagaccggggaagatttgaagacttaaaagttcactttttgacagatcctgaaaatgagatgaaggagaagctcttaaaagagtacttaatggtgatagaaatccccgtccaaggctgggaccatggcacaactcatctcatcaatgccgcaaagttggatgaagctaacttaccaaaagaaatcaatctggtagatgattactttgaacttgttcagcatgagtacaagaaatggcaggaaaacagcgagcaggggaggagagaggggcacgcccagaatcccatggaaccttccgtgccccagctttctctcatggatgtaaaatgtgaaacgcccaactgccccttcttcatgtctgtgaacacccagcctttatgccatgagtgctcagagaggcggcaaaagaatcaaaacaaactcccaaagctgaactccaagccgggccctgaggggctccctggcatggcgctcggggcctctcggggagaagcctatgagcccttggcgtggaaccctgaggagtccactggggggcctcattcggccccaccgacagcacccagcccttttctgttcagtgagaccactgccatgaagtgcaggagccccggctgccccttcacactgaatgtgcagcacaacggattttgtgaacgttgccacaacgcccggcaacttcacgccagccacgccccagaccacacaaggcacttggatcccgggaagtgccaagcctgcctccaggatgttaccaggacatttaatgggatctgcagtacttgcttcaaaaggactacagcagaggcctcctccagcctcagcaccagcctccctccttcctgtcaccagcgttccaagtcagatccctcgcggctcgtccggagcccctccccgcattcttgccacagagctggaaacgacgcccctgctggctgcctgtctcaagctgcacggactcctggggacaggacggggacgagcaagtgcagaaaagccggctgcgtgtattttgggactccagaaaacaagggcttttgcacactgtgtttcatcgagtacagagaaaacaaacattttgctgctgcctcagggaaagtcagtcccacagcgtccaggttccagaacaccattccgtgcctggggagggaatgcggcacccttggaagcaccatgtttgaaggatactgccagaagtgtttcattgaagctcagaatcagagatttcatgaggccaaaaggacagaagagcaactgagatcgagccagcgcagagatgtgcctcgaaccacacaaagcacctcaaggcccaagtgcgcccgggcctcctgcaagaacatcctggcctgccgcagcgaggagctctgcatggagtgtcagcatcccaaccagaggatgggccctggggcccaccggggtgagcctgcccccgaagacccccccaagcagcgttgccgggcccccgcctgtgatcattttggcaatgccaagtgcaacggctactgcaacgaatgctttcagttcaagcagatgtatggctaaccggaaacaggtgggtcacctcctgcaagaagtggggcctcgagctgtcagtcatcatggtgctatcctctgaacccctcagctgccactgcaacagtgggcttaagggtgtctgagcaggagaggaaagataagctcttcgtggtgcccacgatgctcaggtttggtaacccgggagtgttcccaggtggccttagaaagcaaagcttgtaactggcaagggatgatgtcagattcagcccaaggttcctcctctcctaccaagcaggaggccaggaacttctttggacttggaaggtgtgcggggactggccgaggcccctgcaccctgcgcatcaggactgcttcatcgtcttggctgagaaagggaaaagacacacaagtcgcgtgggttggagaagccagagccattccacctcccctcccccagcatctctcagagatgtgaagccagatcctcatggcagcgaggccctctgcaagaagctcaaggaagctcagggaaaatggacgtattcagagagtgtttgtagttcatggtttttccctacctgcccggttcctttcctgaggacccggcagaaatgcagaaccatccatggactgtgattctgaggctgctgagactgaacatgttcacattgacagaaaaacaagctgctctttataatatgcaccttttaaaaaattagaatattttactgggaagacgtgtaactctttgggttattactgtctttacttctaaagaagttagcttgaactgaggagtaaaagtgtgtacatatataatatacccttacattatgtatgagggatttttttaaattatattgaaatgctgccctagaagtacaataggaaggctaaataataataacctgttttctggttgttgttggggcatgagcttgtgtatacactgcttgcataaactcaaccagctgcctttttaaagggagctctagtcctttttgtgtaattcactttatttattttattacaaacttcaagattatttaagtgaagatatttcttcagctctggggaaaatgccacagtgttctcctgagagaacatccttgctttgagtcaggctgtgggcaagttcctgaccacagggagtaaattggcctctttgatacacttttgcttgcctccccaggaaagaaggaattgcatccaaggtatacatacatattcatcgatgtttcgtgcttctccttatgaaactccagctatgtaataaaaaactatactctgtgttctgttaatgcctctgagtgtcctacctccttggagatgagatagggaaggagcagggatgagactggcaatggtcacagggaaagatgtggccttttgtgatggttttattttctgttaacactgtgtcctgggggggctgggaagtcccctgcatcccatggtaccctggtattgggacagcaaaagccagtaaccatgagtatgaggaaatctctttctgttgctggcttacagtttctctgtgtgctttgtggttgctgtcatatttgctctagaagaaaaaaaaaaaaggaggggaaatgcattttccccagagataaaggctgccattttgggggtctgtacttatggcctgaaaatatttgtgatccataactctacacagcctttactcatactattaggcacactttccccttagagccccctaagtttttcccagacgaatctttataatttctttccaaagataccaaataaacttcagtgttttcatctaattctcttaaagttgatatcttaatattttgtgttgatcattatttccattcttaatgtgaaaaaaagtaattatttatacttattataaaaagtatttgaaatttgcacatttaattgtccctaatagaaagccacctattctttgttggatttcttcaagtttttctaaataaatgtaacttttcacaagagtcaacattaaaaaataaattatttaagaacagaaaaaaaaaaaaaaaa

SEQ ID NO: 657 - DNA, 9784 bp, Homo sapiens
aggcctggacgtattctcgcgacatttgccggtcgcccggcttgcactgcggcgtttcccgcgcgggctacctcagttctcgggcgtacggcgcggcctgtcctactgccgccggcgccgcggccgtcatggggttcctgaaactgattgagattgagaactttaagtcgtacaagggtcgacagattatcggaccatttcagaggttcaccgccatcattggacccaatggctctggtaagtcaaatctcatggatgccatcagctttgtgctaggtgaaaaaaccagcaacctgcgggtaaagaccctgcgggacctgatccatggagctcctgtgggcaagccagctgccaaccgggcctttgtcagcatggtctactctgaggagggtgctgaggaccgtacctttgcccgtgtcattgtaggaggttcttctgagtacaagatcaacaacaaagtggtccaactacatgagtacagtgaggaattagagaagttgggcattctcatcaaagctcgtaacttcctcgttttccagggtgctgtggaatctattgccatgaagaaccccaaagagaggacagctctatttgaagagattagtcgttctggggagctggcgcaggagtatgacaagcgaaagaaggaaatggtgaaggctgaagaggacacacagtttaattaccatcgcaagaaaaatattgcggctgaacgcaaggaagcaaagcaggagaaagaagaggctgaccggtaccagcgcctgaaggatgaggtagtacgggctcaggtacagctgcagctctttaagctttaccataatgaagtggaaattgagaagctcaacaaggaactggcctcaaagaacaaggagatcgagaaggacaagaagcgtatggacaaggtggaggatgaactgaaggagaagaagaaggagctgggcaaaatgatgcgggagcagcagcagattgagaaggagatcaaggagaaggactcagaattgaaccagaagcggcctcagtacatcaaagccaaggagaacacctcccacaaaatcaagaagctggaagcagccaagaagtctctgcagaatgctcagaagcactacaagaagcgtaaaggtgacatggatgagctggagaaggagatgctgtcagtggagaaggctcggcaggagtttgaagaacggatggaagaagagagtcagagtcagggcagagatttgacgttggaggagaatcaggtgaagaaataccaccggttgaaagaagaagccagcaagagagcagctaccctggcccaggagctggagaaattcaatcgagaccagaaagctgaccaggaccgtctggatctggaagaacggaagaaagtagagacagaggccaagatcaagcaaaagctgcgggaaattgaagagaatcagaagcggattgagaaactggaggaatacatcaccactagcaagcagtccctagaagagcagaagaagctagagggggagctgacagaggaggtggagatggccaagcggcgtattgatgaaatcaataaggagctgaaccaggtgatggagcagctaggggatgcccgcatcgaccgccaggagagcagccgccagcagcgaaaggcagagataatggaaagcatcaagcgcctttaccctggctctgtgtacggccgcctcattgacctatgccagcccacacaaaagaagtatcagattgctgtaaccaaggttttgggcaagaacatggatgccattattgtggactcggagaagacaggccgggactgtattcagtatatcaaggagcagcgtggggagcctgagaccttcttgcctcttgactacctggaggtgaagcctacagatgagaaactccgggagctgaagggggccaagctagtgattgatgtgattcgctatgagccacctcatatcaaaaaggccctgcagtatgcttgtggcaatgcccttgtctgtgacaacgtggaagatgcccgccgcattgcctttggaggccaccagcgccacaagacagtggcactggatggaaccctattccagaagtcaggagtgatctctggtggggccagtgacctgaaggccaaggcacggcgctgggatgagaaagcagtagacaagttgaaagagaagaaggagcgcttgacagaggagctgaaagagcagatgaaggcaaaacggaaagaggcagagctgcgtcaggtgcagtctcaggcccatggactgcagatgcggctcaagtactcccagagtgacctagaacagaccaagacacgacatctagccctgaatctgcaggaaaaatccaagctggagagtgagctagccaactttgggcctcgcattaatgatatcaagaggatcattcagagccgagagagggaaatgaaagacttgaaggagaagatgaaccaggtagaggatgaggtgtttgaagagttttgtcgggagattggtgtgcgcaacatccgggagtttgaggaagaaaaggtgaaacggcagaatgaaatcgccaagaagcgtttggagtttgagaatcagaagactcgcttgggcattcagttggattttgaaaagaaccaactgaaggaggaccaagataaagtacacatgtgggagcagacagtgaaaaaagatgaaaatgagatagaaaagctcaaaaaggaggaacaaagacacatgaagatcatagatgagaccatggctcagctacaagacctgaagaatcagcatctggccaagaagtcggaagtgaatgacaagaatcatgagatggaggagattcgtaagaaactcgggggcgccaacaaggaaatgacccatttacagaaggaggtgacagccattgagaccaagcttgaacagaagcgcagtgaccgtcacaacttgctacaggcctgtaagatgcaggacattaagttgccactgtcaaaaggcaccatggatgatattagtcaggaagagggtagctcccagggggaggactcagtgagtggttcacagagaatttccagtatctatgcacgagaggccctcattgagattgactacggtgatctgtgtgaggatctgaaggatgcccaggctgaggaagagatcaagcaagagatgaacacactgcagcagaagctgaatgagcagcagagtgtgcttcagcgtattgccgcccccaacatgaaggccatggaaaagctggaaagtgtccgagacaagttccaggagacctcagatgagtttgaagcagcccgaaagcgagcaaagaaggccaagcaggcattcgaacagatcaagaaggagcgctttgaccgcttcaatgcttgttttgaatctgtggctaccaacattgatgagatctataaggccctgtcccgcaatagcagtgcccaggcattcctgggccctgagaaccctgaagagccctacttggatggcatcaactacaactgtgtggctcctgggaaacgcttccggcctatggacaacttgtcaggcggggagaagacagtggcagctctggccctgctctttgccatccacagctacaagccagcccccttcttcgtcctggatgagattgatgctgccttggataacaccaacattggcaaggtggcaaattacatcaaggagcagtcgacttgcaacttccaggccatcgtcatctctctcaaggaggagttctacaccaaggccgagagcctcattggagtctatcctgagcaaggggactgtgtgatcagcaaagtcctgaccttcgacctcaccaagtacccagatgccaaccccaaccccaatgagcagtagcagtatttttgccctcccgccctgtctggatccctaagctgtccctctcccaatctctggatatttgactcccaaccttccccctacctcctggccctttttggtgtagtcatgggatttaggcactgctaatcaagcatgaagaggaacagaggtgatgttaggtctggagcaaaaattcctgaacgacagggagtattctggcctctgaaaggaggtgctgagctgaacagggccatctgttcatcacacacacccccttcctccccctcatcacccataatcgtgggccccttgggcctcttgcccactgtgtgtgtgggtatgtatgtgtgtatgtatgtatccgcatgtgtgcatgtgagtatgtttgcaaaataataaaggatattggagacctgttttagaaggagcctaggctgaatttgattccaagagagcttaggatgacagcacccctgagctgggcaaaggtactcaggacctcataggagtcttaggcagttacctgaaactgccttcattcactcatttgtgtattcattcatttatgtattcatcagacacataccgaacaccctctatttgtcaggctctgtgcttggaatacagagttgaatcagacatgatctctaccctcctagtaaggagatacagtgggttcatgaatgactatagttagctgaatgtcatatgtactttgaatttgagaagtgggtgatcccctctaggcttcctggaggtcacatttaagctagaccttgacaaattggtaggatttggtcaggcactaggagtggagcatgagctctggggacagacagttatgggttctggtcccactttttatcacttactagttgtttgaccttgggcaagtcatttgaccttctgtgcctcagtttcctcatctgtaaaatggggctaacaatattacctacctcataggatttaatgatgtcaagctcctcactggaggccttatcccttcgtggagcccactaggtgccgacccctcagaatataaccctcatgcctggacccctgagagcttctgatcccagctattagggacagaagaagcctccaaatctggaaggtgctgaatgccctgctgactgggaaagtttcagggcactgatggggtctacctggtaagcggagggcctgaggaaacctgtagcttcaatcatgtctggtaaccgggtgcctgagccccaatctgggttgtgaggaaataggggagaggtatcctgggccacatcccagcctaacacctgtgaggttcattttaggaactaacctcattagctataaggatcatgcagaggcagcaaagccgggtgcgatgagctcagcctttactcattcacatacaccatcacactttaattccaatctgtatattgctttttaaaagttaagtccattctaattacccaaatatgcatgaattcattctccttttgagaagttagattgttaaagatagtctcattcagctaccaaccactccttgatccttcccttcttagtggctgttgtttgttgtacttccgtttagactttgttttaatgcttgtacgtacatatgtgaactcattggaaatattgtgtgtttaatgcaaatgatatattgaattgtttagcaatttgttttctttgcttaacgatgtttttgagatctgtgcatgttacttaatgtagctcaatccatcttctgtaattgctgtatagattgtcatcatatgattaccacattttacttacgcatttcttttgtgatggacattaagactgtttttaggttttgctattacaaaatactacacaggagcatcactatgcctgtgtgaaagtatatgtatgaaagtttacctagggttgattcctagaagtggaattgcaaagtcataggatatttatatattggtttttaataatacttccaaattgccctcctgtactatttactcagtatttttcttgaggttgatctgaggtctaacattgttatcctatatcattttcatcccaagtagtgatatctgtgaaatcacaggtttgatgtgtgctaattatgtattcttctaatacatattaaaagacataactatcaaaacaaaataaatttgtctgttttcaaccaaagaagtcacgtaccactggtggtactgtgtgccataatttggcaaatgctggcctttatggacgagcacaattcgggggtcagacctggttcaaattctagctgtagaaacttgtgcaagttacttcacctctgagcctaagtttccacatctgtaaaaggagataataaacacctaccttgcagtagtgaagcaaagagaaaattaaatatatatgaagcaatttggctggcatctagatcattcacagccctttaaaggtcacctttgctgttctccccactttacagataaggaaactgaggcccaaaaaggtttgaacccaggtcttccaagtcattcaagtgctttctccactgtacaggtggttatcaaccttggctgcgcatcagaatcgtttgtaaagctttttctttttcctttttaaaaagtaaagcaatatatacacaggtaaaaaaataaaatagtacagaagggcttataatgagaagcagcagttccctgcttgcacccccacatccaaaggatgtggagctctttaaaaataaattgctctggtcccacctctggaaatctgattcagccagcatggataataacccagataactaacccctacctcacaggataaaaaggattacatgagatgccttaggctaaggccctggcacacaggaacacatgtgctacaaaggagctttggggacttaagtcctgaggatccaggaggtgaggtgacttgtccaagattccactggtttagtggcagagcctagacttccactcggatctatttagtgcttgccccctgctctctcctgtcgtgccccaccacctcctggcatcacagggcaaccgttgtcaaggctatgctcacgggaggctgggcaccacagtgtttccaagagcaagctggatccgagtagattccctagggcttgttggaggaactagtttgactcccttatactgtggacgcagtagccttgctgtagggagttgaagagtactccacaacagtatcttaagtttaactgggcacttccctctggaaatcacagtgttgtgcaccaggaacacaaagatgagtcaaatctttatcctgcctttgaggagctcactgtttagttggggaaaccatttgtaaaacagccattaaccatacagtgtgatcaacactgacaggagcacaggaaaaacatctagcttatgtgaagattcagagaaggcatcctgtagtctaggtggtgatacctgaactgagtcttgagggacgggtaggaattagccagttgaggaagtagaaggaatttccagatattggaaacagtatgcatgaagacatgaaggcaagaaacagcaaaacaaatactgaagcatgaagattcctggggtggggggaaagcagcaagaaaaggtagagaggaaccagattggaagagggtcgtaaatgcatggctacagaattcagatttgttttgtaggacagtgtggttcccaaactggctgtataccacaaacaggtacggcattctgggccccggcccctaaaacattcattaagtctggggtgaagatttggaatcttgaatgcttataaaggttaccacatgactagggtacagccagatttggaaaccatagcttgaaggcagtgagggagccatgaaatggtttttaatagggggactccagatcagatgtgaacttaacctgtttctggctggctagccaaccagcatggaaaacagattaggttagatgttcatgctgtatgtgcccgtgcctgtagcttccctgttaatcagcttcttacactactatatttgcttattttgtctctgaataagctttaggcaccacaagggtgggcctggggatattttgcttaccagtatagcccctgcaaaaaagcacagtgcctgacacaaaacaggcacccagtaaagtttttgaatgaatgaatgcatgagtgaatccatttgtgagagagcgaatggagatgacaagattagctaggagactggaaaaagaccaggaggcctgcactagggcaaaggccagtaggaatagattggaggtgttaaggtgtgaactgttaaggtaagatgataacttaatgactgattattggatgtggagggtgactgagaggatagaatgagtacccatgaatagccatgattcctaccctgtcccagtcatctctttccttatccatctctgaaacaatctgcttacatcctcctcagcaactggaattcctcaagttagttagacattctgtgtgctgtgtggtctctcactgcccccccactccccacccctccacaagccattgattcattcatccagttcaataaatcttggctaagcacctccagtgtgcagtaaggctcttccaagccaggactctgactccctctttcctacctcaagagatgtttttgagggctttcccaggtaagagtcacatctcttatacaataacttatagtgagatacccagaatgtcagacttgtaagggaagactgcccaaaccccttctgaggtcctcagaggggaattaacttcctaaggtccgactgctaggaagtgttggagccagaaatggaagctaggtttcctttctatgtcatctctggagtcttgatcttgatctatcccattgtagatcaggacaggcagaggtggtcagggagaaggtgggacttaggttgaaccttgaaggtcaatgtattggacaggtcaaacaagatggttgccaattacactgcccccttctggaaacccttagcaaacctgccatgcttgcagtcccttctaaggggtttccttagcataagttgccatgctctgtaccatgtgacctcacaatcctggccacagatagctagatgtggatagtgtctggttcaagggcaaccaatctctaggctggccagtggcctgttagctggactggcataaggacttcaccttacaggggtggcatgtatcaaatggcaaatgtatgaaacaaccagatctttcagggaggcagaatgtgagctattcagaagaagtgaacgttaattagaatttaatgaggcattagtggtggtggatgaggggtggccagaaactaaacagcaaaagcaaagagaaagctgcagaaaccataagtaagcagaggtcatgagacatttgtataatgagatcacggagccacagggtggcagaagccatgaagcagcaaggcaacaatgggctagaagccatgaagcaataggagccacgaggaacagaaaccgtgagacaaaactgactatgagatccacaaagcagcagaaggcttgaatagataagatcatgagacagtagaagcgatgagactgcaagaaccacaaggtagccagaaccatgtggcaacatggcaacaggaatggaagaggcagcaggagctacaatgcagaaaagccatggattaataggaactgaagcgccgggagccatgaagctgcaggacccatgaggcagaaaaagccatgggctagcatcgaggggggcagaaagaagttagtcagtagcagtaggaggagtataaatacagccagaaaggagttgagtcaccaatttgggaagcactagagaagggagcaacagatgcctgcagctgagggggtgacaagataagccaggctctagagctgctttggatcatgaaccattttcaagtttctgttcttccatgaggctgcctgtgtagctgttcttgtcttccttatttccctgtgaatgctttaataaatccccatcactaa

SEQ ID NO: 658 - DNA, 5666 bp, Homo sapiens
atgctccgagcgcggcgcccccgacgcggcgctcggctcggctcgggcatttccgcctctttgttttaaactccggacgggcttttttctcctcctcttgggggggacccagagggagcggcgccccctcccccctccggcgcggaccccgcgtgcgccttgctcgcccgcagccccgagaccgcaggcgtcacaatgtagcagggaccccaggcgtcgtgctcagaaaatggaaaaagagccagggccggaaggagggtgcagaagcgagtccgcgtgcggagccaggaggcagcgtcgcgtgggagtgctggcctgaagcctccatgccccggcagagggacggacacgcggacgtctagcggagaagccaaagatgttgaccaggaagatcaagctgtgggacatcaacgcccacatcacctgccgcctgtgcagcgggtacctcatcgacgccaccacggtgaccgagtgtctgcacaccttctgcaggagctgcctggtgaagtacctggaggagaacaacacctgccccacctgcaggattgtgatccaccagagccaccccctgcagtacatcggtcatgacagaaccatgcaagatattgtttacaaattggtaccaggcctccaagaagcggaaatgagaaagcagagggagttctatcacaaattgggcatggaggtgccgggagacatcaagggggagacctgctctgcaaaacagcacttagattcccatcggaatggtgaaaccaaagcagacgacagttcaaacaaagaggccgcggaggagaagccggaggaggacaacgactaccaccgcagcgacgagcaggtgagcatctgcctggagtgtaacagcagcaaactgcgcgggctgaagcggaagtggatccgctgctcagcccaggcgaccgtcttgcatctgaagaagttcatcgccaaaaaactcaacctttcatcctttaacgagctggacattttatgcaacgaggagatcctgggcaaggaccacacactcaagttcgtggttgtcactaggtggagattcaagaaggcgccgctcctgctgcactacagacccaagatggacttgctgtgaatggtgccacacagcgcccacagactgggccctcgcacccttgggtgctcccggccgccgcgcttaagaacattgcctctgggtgtcatgtggaccagacttctgaatagagaatatttataacttttgtatgagagagaattcacactcaacaagacactaccagcaccacgtttacagaggatgaaaacacttcacagtctcccagagccgatcgtcctctcccccgccccaccccgtgcttcagccttgcagggagagtgatgctccaggcaacacggttctgagtcaccttctgacacgagctccctctgcttgctttccaggtcttgaaaatctgaattcacttcagtttagtttatgaattttaggtttcatgataagcctcaagtgtagttggacttttattgaatccttcctaagttattgaaaaaatgtcttttcatggtgaatgacaatatttatgttgcctttagcttcttgaagatttagaagttatataaaaaattaatttaaaagcaaaccaaaagaggtttccattaacattatgatttaaccattgtatttaatttcccaccttatgaaacacaacagcagctccctgactggttcgcctttcattgtgtgaggtcggcacttggactcactcagaactgtcgctcacctgtggctgacacacccagccctggaaacggggccccagacgccacgtcgggatttctgacatgctcagcaggtagaccagaggccgtgtgaccagctcagtgctggtttacggaacaactcttacttttaaaaattacttgttcccccaaattgttgagtgccgccgtttggtttcctatgttttctttccctgttttgattttgctgaagggagaggtggtggtggttaggatcagagctctcctggcatccgtggggaggatttgctggtggtggcttcgggctcatgcccagacacactcactgccccgtctgtccaaggcctccccttcccctttgctggtgggaggagctcgtgtgctccttggccgcttactggaagggcgtttttcagagctgcagggacagggtgagcagctgaagggctaggagggaagccggcccccgctctgcagaagctgcatttcagctgaatctgtgtttcagcctcagttggttgcaccgttagcccctctcctcccggatggtcatgtttttgtcacattagagaataaacagccacacacacatttttttttttcctttaaaacagtaacttggaaatatgaaaaggccagaaggaggagcaagggctgttttctggagtggttgaggtgttgtcctgcagttgtcattgtcttctccaccgggctgttcccatttatttcctgtggaactgaatccctcctccctccactccttgggagcccaggtggtccttggccaccattcaggctttccaagaagccaaccaccttggagattttttttcttgaatttcgctgttttcttctgcttcctttagataaaaagcagctcaagagaccttatcttagggatgagaaaaacatgcatattaattccatctgagtgattgtcagtgtaaggccttttaaaacaaaagcaagttctttgttaggaattggtcaaaattcatctctttctttaagcccatcaactcccaggacggtttgagttactcagttacctaagcttgctattcatccaaatcattttctagagtcactgtataagggtctatgagtagctgtgtatgaataaatattacctgtctacctcaaaatacacatactgctgaagcattctgtacaaccgtgtgttatcacagtgcagttttaagtgtaacgttagaacttaggcattttcctgtgtggcggaataagaaaggattaaacagttacaagcctccaaattcaaataaaattaaatcacagttcagatgaaactgaatatcattgtaataatctcataatatatatttgtaactttgtagctatctttgaaatcacttgactttgcaatggtgctaagctgatagatttaaatacacagacgggcgagtggcgcccgtgtcgatgtcttcagccagtggtgaccctgcttttgtaaccgcgttaacctgacaaaacctcagcagcagaagtccctatttttctaggagttcatcgtgcagacagtcttcactacaggactcggccctggggcctctgcctctcgtctgaccttgcagccttagtcgttggaggctggagcgcaatggccctgccgtctgtggagcctctgggcggccttctttcctttctgtcaacctctcatttcacagaaaaaggctgaatttcattttttccagcatgaaagccaggatcggttagtggttggattctattggttttttttttttaaacagatggagttactgtgaagaagttttcacaactatttatgctggtaaaacaaatgctgttaaatcaccttatgcgtcgttttcaacagcagtggggctaattacccggaatacggtctcaccgatgcagttttcatggacatagaaaattcaaatagaatatataatattgaatttaagatttggggggttaaaaaagaaaacttaactttataaaattatttattctattttaagccttctatcatattttcccatccaattgtttggtttcagtggtccagctttatttacaggcatataaaatgaaattgtgagatgttttgcaagcttctttttactttgagtagcttttaatttgtatgtttttatgtggatgaagagcattttttatgcttttgtgcaataggttccaatatgcatttattagacatctgtttaaatggtaatgtagcatttattttgctaaattgaaagggaacatagatggaattccaaaatatgtacattcagctgtttggtttttcgtttttcattgttattattgtgagaatgctgttattggggttgtgtgtgagtgcccgtcagccagtgatgcctcgggccacgctgtggggccacctcagtcctgcctgggtcctggtgccttggaccccacgtgcttgtggccaggctgcccctgggcagggccatgtggcctcagaccacaagagcggagctgccctggcccaagcactgcagctgcctgcacccccgggcttcgcagccttgcttgttttctctgaacagcaacagaacagtgttcacagcgattcaaagggtggcattgggttggacgttctgggtacaagccaacctagtcccacgttgtacgtgaatgtttaatgtgctctcaaaacatggaaaataagtttagtgcacatagctaaatcacaaaacatccaatttctctgtttcctcaggaagtcattactgcgccaccacatcacatgaccttaacatgatcaatgtatttctctgccttgacatttaaatacataaattgagataagtagattagaaaatcattcaaatgataccataatttgtacgggacagggtgcgggcaatggccacgtggccaaggccctgcaggaacgcgccgaggtctccctcaccctccaggtgtccttcgcacccaacagtgcgtctgaggaacgagctgcagtttgagcgttcccctgagatgtgcgtagcctccgtgtaaatgtccactcccatggcttaattgcctatcagacgcattttcccagacgaaagcaatgttgggttggggaagacagtgcagccacccagcctttaccagcagcgtacggcagacgaaggcagtcgaggtgtggaggtgatcacgaagatacatgtgtttgactgtttaatttgaaagtttacattttttatgctttgtgttggtgtgtaatttttgtactcttggtggctagtttttgtcaaatcttttttggaatattgcttaaatgttttgattttatgatagtgaagcttgtattcagtgttttgccaattaatattatatgcttgtaataaaagcaaaagaaaagcttaagtgaaagtgtttctggctggaaatgtattacataaatcatttgtatgagcatgagagatgacttgctcatgggatgagcaatgctgtgggtattggatggaccactcaggcagcctggccgcacacacacacatgcatgctacatatgtgtacgctcagaccacatgcctgcacatatgtccacacaccagcccacggctcccttcctcaccccagccctccccactcccaggttaaccaatgtcccgatttgcttcaggcggcatttgtaaactgtcaccctgcttgcaaaccctcatttaaattggtccagcatttgctaccagagtttaggccacaaactttgtaaagctcagtttgtctccttgcagaaagaggttgctgcagtttggagctggttatgccaaggaaaatacggctaaaaaagaacttactgattcccataggtgtgtcaactgacaaatgaatgttccatctccctacgacaatttgctgcccctccccaaaaaaagcactatggccaaaatttcagtttttaaaggttaagtaaa

SEQ ID NO: 659 - DNA, 6668 bp, Homo sapiens
aggctggcgtccccgccccgaaagcactgggcccgccgcgtcgcaccgtcctctttcctttccttctccctccccttttcccttccttcgtcccttccttccttcctttcgccgggcgcgatggagccggggcgccggggggccgcggcgctgctagcgctgctgtgcgtggcctgcgcgctgcgcgccgggcgcgcccaatacgaacgctacagcttccgcagcttcccacgggacgagctgatgccgctcgagtcggcctaccggcacgcgctggacaagtacagcggcgagcactgggccgagagcgtgggctacctggagatcagcctgcggctgcaccgcttgctgcgcgacagcgaggccttctgccaccgcaactgcagcgccgcgccgcagcccgagcccgccgccggcctcgccagctatcccgagctgcgcctcttcgggggcctgctgcgccgcgcgcactgcctcaagcgctgcaagcagggcctgccagccttccgccagtcccagcccagccgcgaggtgctggcggacttccagcgccgcgagccctacaagttcctgcagttcgcttacttcaaggcaaataatctccccaaagccatcgccgctgctcacacctttctactgaagcatcctgatgacgaaatgatgaagaggaacatggcatattataagagcctgcctggtgccgaggactacattaaagacctggaaaccaagtcatatgaaagcctgttcatccgagcagtgcgggcatacaacggtgagaactggagaacatccatcacagacatggagctggcccttcccgacttcttcaaagccttttacgagtgtctcgcagcctgcgagggttccagggagatcaaggacttcaaggatttctacctttccatagcagatcattatgtagaagttctggaatgcaaaatacagtgtgaagagaacctcaccccagttataggaggctatccggttgagaaatttgtggctaccatgtatcattacttgcagtttgcctattataagttgaacgacctgaagaatgcagccccctgtgcagtcagctatctgctctttgatcagaatgacaaggtcatgcagcagaacctggtgtattaccagtaccacagggacacttggggcctctcggatgagcacttccagcccagacctgaagcagttcagttctttaatgtgaccacactccagaaggagctgtatgactttgctaaggaaaatataatggatgatgatgagggagaagttgtggaatatgtggatgacctcttggaactggaggagaccagctagcccacagcaaccaaagagacttcctcttggcgttcaggaaacacagattctttgtccttttcccaacagcccaggctgttgatacctcagagccttctctttactctccaaagtgaaagggaagcccccgtctctctaactgcatgtcatcaggggtgagcctgcctttcctatcttcacacctgccacctcatgttcacacctatctttctcaccttttttttgagatggagtctcgctctcttgcccaggctggagtgcaatggcacgttctcagctcactgcaacctccgcctcttgggttcaagcaattctgctgcatcagcctcccgagtacctgggattacaggcatgtgccaccacgcccggctaattttgtatttttagtagagacggggttttgccatgttggccaggctggtctcgaactcttgacttcagatgatccatctgccttggcctcccacagtgctgggattacaggcgtgagccaccatgcccggcctctttctcacctttacacctgtcttcttatcctcacatctgttttcacaccttcatccctgtcttcctcatgttcacacttgtcttccccatgttcatagctgcctttcttaccattttggtttgaagggcagtcttctctggcttgtttttttgtttttcccagaaaatcagtattattttttaaataagaaaaacattcctagaagatgataattgtgaaaacctcctttggcttatttgcttttccagattttagtctcctttctccccatccgggaaagatggtggaagacataggctaaatttctccagcctcacaatggtcttcacttggtctgacttgtaccaattctagcacccactgaaaaacaagttgagtagagagtgtagagtgcagaaatgtggcttttgccccactttgcatctccaaaattacaacggttggccgatcccatttgaggacaatgcttagttataagtctccgagttggaaaaggaagaaagccagagctgtctagtttcattcattctttcagtaaatatttattgagtacctactgtgtgctaggcattgacctgggaactagagatacttcacagaataacagggaaagttccctgtgctcatggagcttacattctacagggagaaagagatagccaatacataggaataaatatatacaaggtatcatgtagtgataattgctgtggagaaaaataaagcaggggagggagtaagaaatcctggagatgaggctgcagttttaaatggggcctcactgggaatgtgacgttgagcagagacgttagggaagtggatcctggacaaggcattccaggcagaggaacaggatgtgcactgccccaaagtgagaacttgctctacgtggtcaggaaagagcagggagaccaagcagagtcgtgggcaggggtagaatggaaggagaggcggctggggaggacaggtggtggagggccttggcttctgctaagtgagatgggaaccactggagggtttgaacagaggagtgccttgattgatttatattttgcaagggtcattctagctgccatattgtgaaaaactttagtggacaagggcagaaggaagagggaagacctgttaggaagctactgcaaggttccaggcttgggcctgggccacagcaacagcagtggtcaaatatctagatttattttgaaaagagccaataggatttgctgagagtttgaatgtggagtgtaagagaaggaagagttaatgatgacattaaggtttttggcctgaatagcaggaaagatggagttaccagttactgaaatagggaaggatgggctgggtaagtatggaatttggtgcaaagcaggctgtctgtggttggaatgggaggttctggctgcaaatcaaagtggagagttctctcaggtcaggtctgcagcagagctcgagacagggatctgaatgcacttggtttattgttgggggtgctctcagaaggaacctgtgaaagcctttatcagtcatttattggctgtgagaagttctctgggagtgtgggtacatttgaaggcaagtgacttcagttgagggcaagtctctggaaaagaggctgtaggcatctggcagctaccatgcatggtagtgtgttgggggtgggggtcctgggcactggctgtgtgaagggatctggcagggcaccacagcgccccctactgaaccatcagcatgtcagtggcatttaaagccatgcagctggaggggccactgagattgtctctgagtattactgagaagcaacagaaaagagccatggatggagcccttgggctctctgggaaatgggaaatcagccaaaggactgagaaggagttaccttaaggtcagagaaaaccaagagagtgtggtgttctggaagctgagctttctttattcaacctcattcccttctccaaataagccacttgtgtagttgggcccctccagggttgaaggcaagaggagaaaggcacagcgtttgggaaacaagacttttcctgcaatagcctgggaaggaataaaaggatagagtgtttgggtttttgtgtaatggtggttaattggggtggaacactcacacgttgtgctttttctgggcttcccttatcccccagaacactctaccaacctcggggaactcgggcacatccttctgtttctccttcagctctatcctgctttcctcatcccttctgacaccacgtcctcactcacctgcacaagaatccctgcatcaggttctcctttgagggtacccacccaggacagtcccctaccacttctgtcttgggctgaagttgcccacgtccacaaaatctgtactcccagcgggggtgtttggcccgaggagtcagtgttattactggtggatgcaccgtgtccacagcagcccccaatcccagcgatgcgtcagatcttacgtggcttcctgctgggggagatggccttcacccacgggatgccgggttctcctttctttcctcaccccaacctttactccaccagagaaacttccttttgaactcagtggggaagagggtgatgagacaggactagaaagtagtgggggacccagcgagtggacgccctgctccgggattcctgagtctgtaaatagtgtgcccagcagctgtgaactccccttatagcctcaggctgcagtgtccttcccagctgtgtgagaaaatgaaagccgacgtccacagggacccaggcagggttgggtgttgtgactcactccacctctgtgccctgcagaggtactgttgggtccttgtcttgtgagcctggggtgagctctctgtacatgttgttgttccacgtatgggttgacttggcatgctggggggtcctcgttcactctctgaagttggcctcctttcactggggattgaaaagcacctccacccctaccctagtgatgtcccctgaggacccgggtgatagtacagtcaatattgtcagtactttgctttgattgaaggctgtagagctgagttaccaaaatttctatttcaaaggaaaccaaaccttaaaaaaaaaaaacaaaaactgggctgggtcttccaaacctaccatgaaaccctggtgtgcaggctgcactcaatgacctcaacccaacacctccctgagtgtgcttcttggaagagcctagaagattcctggatggagaccccattggttcagcctcaagtctggcccgtcttcgaaaaaacaaacacatttgtaagctttgtgggagcttccaggcctgctctaagatgccttgcttgtcctttgacccatcagcatggagctcagtggttgctgtttggttctgcaggctggtggggaggccgcccatcgtggtggggcatctgtccagccccattgccactcagggcatccaaacaggaggcacccgctgggaagggtctaaagatactccttgtggccactgctactgttcacacttgacttgtggagaagcgaagggctgaggggaggtttgtgtacacccatgtatttaaaagtgactgactgactgaaatgagcacataccgacatatgcaacatactaataccttcctgattttcgagactttctaattactacaactaacctgttgtgctcacctctggaattcagaaagagagccactgcgagcactgaccacaagggctgccttaggaaggaaatgtgtgctttcaggagttcttattaggggaattttaagagcacaaaaattttattgaacccaccttagtgacaaacagaaaatgatttgttagattgtcagttggaaggggtttattatgactgctggtgaaataaacagtgaccagtttctgccaacatttatggaaataacgtttctaggttttaaatgtgagccgtaaactgaagctacttcagttaaaaaaaaaaaaatcaatacttaaactgtagggaaaaggtggattggtgccagagaaaacattatttaatagtgtcagaacatggaactgcaacacagtttgtagcaaggcactgagaaaaacccacaactaatccttcatcgcagctgtctgaactcttgatcatctgccatcccccaaacagtgacttctttttttctggtgactccaggcctgaatgacctagtgtggagagtttaaactatgtacaagggaggaaagaaaaaaaggaaaggaaccttaagtaagcctcagccaaaggttttatgcattggacttcctgtgcctgcccccaggggcaagactgatccccatgcctgtgcccatgacatctccctgaaagaggacaccatgacagcccggctttgccttgactgacccactgctaccccagaaataagaatcaagagcagctattgttatccttagagtgttttccgtctagggccggctcgtgaacagccacatatccttgcacctgacactgtccccacacaaatagctggctttcgttgcttgttgaatgaatgagtgagttggctctatatccccttggagctggccggtaagatattagtgcctcattttacaagaagagaataggaaggaattaagcaatttggccaacagatacaagatagattccagagttttatctcccactttagggtggcagccagtaggccaaactccaaagaccgttgctgatgtctttttctgcctcccctctttgggttagtgtggtatgtacaagctcactcttgttgaaaattagaaaatagttgaaaacaaaaggtttttgtttttctttttaaatcacattaaatgttttacattgcttaaaaaaaaaaaaaaaaaa

SEQ ID NO: 660 - DNA, 6499 bp, Homo sapiens
acacgcagccccgcccctgcagagatcagcgctgggacggaacccgggttcctctcgaaccgggattgtgacgcttttggcctggctggccgctgttttctgtcccactttttactcgggcctgcgtccgctgccgccgtccctcagtttgcccccggaggaggcagggcggccgtgccttctgccgtgcgcccgcgtggctgccaccgcccctccgaatcctccggggccgcagaggggttcgctacggagggaggtgggggccttcgggaggaggaggcggaggaggcggaggaggagggaaggaagatggcggccgtggaactagagtggatcccagagactctctataacaccgccatctccgctgtcgtggacaactacatccgctcccgccgagacatccgctccttgcccgagaacatccagtttgatgtttactacaagctttaccaacagggacgcttatgtcaactgggcagtgaattttgtgaattggaagtttttgctaaagtactgagagctttggataaaagacatttgcttcatcattgttttcaggctttgatggatcatggtgttaaagttgcttcagtcttggcctactcattcagtaggcggtgctcttatatagcagaatcagatgctgcagtaaaggaaaaagccattcaggttggctttgttttaggtggctttctttcagatgcaggctggtacagtgatgctgagaaagtttttctgtcctgccttcagttgtgtactctacacgatgagatgcttcattggtttcgtgcagtagaatgttgtgtgaggttgcttcatgtgcgaaatggaaactgcaaatatcatttgggtgaagaaacatttaaattagctcagacatatatggataaactatcaaaacatggccagcaagcaaataaagctgcactctatggagaactgtgtgcactcctatttgcaaaaagtcactatgatgaggcatacaaatggtgcatcgaggcaatgaaagaaattacagcaggcttaccagtgaaagttgtggtggatgtcttaagacaagcttctaaggcttgtgtagtaaaacgtgaatttaagaaggcagaacagttaattaaacatgcagtgtatttggcacgggatcattttggatccaaacacccaaaatattctgatacactgctagattatgggttctacttactcaatgtagataatatctgtcagtctgttgcaatttatcaggcagcccttgacattagacagtcagtgtttggtggcaaaaatatccacgtagcaacagctcatgaagatttggcctactcttcttatgtccaccagtatagctctgggaaatttgacaatgcactatttcatgcagaaagagctattggtatcattacccacatcctacctgaagatcatcttcttttggcttcttcaaagagggtgaaagcacttattttagaggagattgcaattgattgtcataataaggaaactgaacagaggctgcttcaagaagctcatgatttgcacctgtcttcactccaactagctaaaaaagcttttggggaatttaatgtacagactgcaaaacactatggaaaccttggaagactttatcagtcaatgagaaaatttaaggaagctgaagaaatgcacatcaaagcaattcagattaaagaacaacttcttggtcaagaagattatgaagtagccctttcagtgggacatctggcttctttatataattatgacatgaatcagtatgaaaatgctgagaaactttatttgcgatctatagcaattgggaagaaactttttggtgagggctacagtggactagaatatgattatcgaggtctcattaaactttacaactccattggaaattacgagaaagtgtttgaatatcacaatgttctgtctaactggaaccggttgcgagatcggcaatattcagtgacagatgctcttgaagatgtcagcaccagcccccagtccactgaagaagtggtgcagtccttcctgatttctcagaatgtcgagggaccgagctgctgagggaggacctcagttaaccaattaccttttcccggattccagggaattcatactgtgaaatcaaaaccatgttgttttggggggctggaatttgcattgaaacactggtccagtccattgaagaccctattttgggtgatccctatcttgcagaatgtctgtaggaataagcatatattcagttatattcagcatgtaccgcatgtgtaagtagtctggcccacattttcaacctagtagaacaaacaacaggaaatcttttttttgttgtttttaaaaaattcattttgcagaaagcctgaaagaaaaaaaatacccctaaataaaactatttaagagtttaaaagagttgcattcttattatgtaaggatgattttaacaactttttaatatgtaattcttccatgtggaggtattcaatactgtagtgtaaagaaattttatgcggaaaatctttatatgcagtatagaaaagttaacacaagtactaataaaagagggacatcccgacttacgtttttctaccttgcccagataagtggatacaaccactctatattacaaggaaaggactgtcagattcatctgaactggaccagtgttgatctgtaatgtaatagaaaatctgatagaccagcacttctgacttttttttttttggtacaacaatgcaagatgctctgatagcatttgctaacaggaccaggaggatctaaaaaggaccagcctaatgtagaaggtggttatttggaccagaggctttagattattattttagatcctacatatacttttatcagtagaatgatttcatttagatgtataatgaaaaaggataatgcaaaaattatgtaatagataccaaattagggaagtttggcaatttcaatggcatatttttagtcaaggtacacagatggcagtgccataagcaagtctataaatatcggctgcagccatccccctcattttaaatgttgccctaataatcaatgcagttaacaagtatattggctgtgtgtcatgaaatagttcatgttcagatggaaatgttaggttactgtatggtttatggagattaatgaaaatgaatgcccaaaaataagtcttagaaaatcctccatttttatggtaaatagtaatacaactaggtcatttcatttgaaatctaggagtcaaatggaaagatcccctaataatacacctatttcactaacttgtctttctgtttattgggttttgatttgattttttgtaagccagtcaggttatttaatgatgaggtaataatcaaatttaagaatttgtgacatgtagcaattcaagaaacaaaaaggtattttgctgttacctcaattcttactgtagtagcccatctgatgcttctatagttaagaatctgggttccccccctattttcaggggttcatgacttggctgttaaagatgttgctcctagctaatgcttggagtagtctgtgggtgaatggatgtgtgttgaattttagttttcttttaacatgcatgttgggtgagaggggaaaaaaatctaagctgtctgccacattgagtacagaaaagttgtagatttcaaattttattaatattttaagcacttttttgaacttcccaaccttgtttgaagctgttatttgcagtcctattagttttgagccattgcatttaagttccctaggagggggttggttgggggatgtactgaaagagatgaagcaaacccacaccctaagatggtaactgtgtgatttagaaacctgagtttactcctcaaatcgaattattttctttttaaattttggaaagagtaaattgacgtacttgcagtttatgaagctgccccccacccctcagttaattgcagtctaatgtcaagaggcacttctttattaattaccaaatagtctttgtgaccaaggactaacatttttaagttactcagctctatcctcatgggcctatatatttaatacctccaaagatattttcaggataggctttgtatacttttattggttatttagaatccagtggtatgtttgtggtataggaatgtcatggtaaattgtttttcaataaatattttgaaacatgtttccatatgaagtttttttttcaatctgtattttttggttttgtgcacatacagcatttcctaggataaaaataaacaaatgacttacagcctcatcctccctaactccatttgaactcaacttagctcacactcagtgataaaacaacatggtatgtagaagcctaggatcacagggtgataatgtcaattggcagccagttgtgtttttttgaaacatcattattggcagtttctccttatcaccactgctttaatgtagtttttttgtaaatccatatactttaatgcatacactctagcttaagaaaacattgccattttggttagggatatgacttaatgtgctattatttctggttctaatgaagaataataccctatgactttaagtgtaagattcatcctttaagtagggatgtttaggataagttagatgtgtgccactatgatttattgggtttcttaaaaatcttgaagaaaataataaaatttatctcacaataagttaacttgcgcaaactttttacatatggtgaggtgcgtaaggaagccctggccaacttaaagatttttctggaggttcagcaaagttatgttaaattaggggcctttggtctcatccttctctgactcttctacccagtcttttcctaaagttcggtgctactccagttgggtgcatcagggagctccgtcagcactcgcatgtgtcgctcaggtggccactcatgcctgcattccatttaatagagtcaattggaatttttagagcataatctttatggatcctcaaagctgactttgccaaagggattgagacccttactaccatcaaatctctgtctctgcttggttaaaaattggctcactattgctttgtagtaacccctgcccaggtattttttcacttgtgaaaataatttgagaaagacctttgttcctagcctgttgggaaaagtttataattttatgaaaattaagtacagaggctgcgatcttagaaataatgaaggtgccatttggctgctccttaatagtgcagacagaaaactgcagtgaacacatgccaaaacatgattgaagcctttggctgaaactttatacatagaaataatgatttgctcataacaggtatcattaactgccactttttatgttttccctagaatttgtagccttgctgcttgcttttcttctgggtggcaaagttactactggaaaaacactataagtacaaagtttttggggttttatctttgctttagaagtggatgtgtacttcacctcttggctgtggaggaacttagttgccaggaaattttttttttttttttcagacggagtttcgctcttgttgcccaggctgggagggcaatggcaccgtcttggctcactgcaacctccgcctcccgggttccagcgattctcctgcctcagccttccgagtagctgggattacaggctcctgccaccacgcctggctaggaaattttttgttgttaatatgacatttggattaatctccagcttcaacagtacttcttttgtccataaatctcaggaatgttttaggcagaaaactggttttaccctgttgataatcagaaggagtgtgctttaggatttattgcataatactattctttaattgcaatcctaggtatctatagcatgagtggccttagtgagtttgttgaagtgcacatgtttttcaagagtaaaatttaagattaaaaatatatcctatatatagatatctagaaaacttggtttgtggtgcacagttaagtgttggatcactaaataaccattgcaggtaccgtttgtgtaacattactcatttctgtatattccttttatgggaagatattttgccatggtaactaaaacttttcagttctacttttatgatgtgaatgaatgctacgttttattaaatattaccaggtcagtactatttttatactttattaagcaacaggggattttagtttaataggctcaaaataaaaagttcttaatggaacagttaaaaacaaaacactaacaatctttacgtgaaaatccccactaatagtgccacaataatttctatagaaatatctaaggtcattaaatagatttttgaagacggttcttcattgtgtcaggatgacctttcatatcattctcaccaacttgtagtgcccaccgttatttgtaactattaaaccatactaagtatgtttgtaaccagcattgtgatatattctgtacttgtattgctaaaaatgaattattgacctaataaatatagtgttcctgcattcatagtg

SEQ ID NO: 661 - DNA, 2935 bp, Homo sapiens
ttttcctacatgctggccatggggaaatcaccactgggcactataagaagcccctgggctctctgcagagccagcggctccagctaagaggacaagatgaggcccggcctctcatttctcctagcccttctgttcttccttggccaagctgcaggggatttgggggatgtgggacctccaattcccagccccggcttcagctctttcccaggtgttgactccagctccagcttcagctccagctccaggtcgggctccagctccagccgcagcttaggcagcggaggttctgtgtcccagttgttttccaatttcaccggctccgtggatgaccgtgggacctgccagtgctctgtttccctgccagacaccacctttcccgtggacagagtggaacgcttggaattcacagctcatgttctttctcagaagtttgagaaagaactttccaaagtgagggaatatgtccaattaattagtgtgtatgaaaagaaactgttaaacctaactgtccgaattgacatcatggagaaggataccatttcttacactgaactggacttcgagctgatcaaggtagaagtgaaggagatggaaaaactggtcatacagctgaaggagagttttggtggaagctcagaaattgttgaccagctggaggtggagataagaaatatgactctcttggtagagaagcttgagacactagacaaaaacaatgtccttgccattcgccgagaaatcgtggctctgaagaccaagctgaaagagtgtgaggcctctaaagatcaaaacacccctgtcgtccaccctcctcccactccagggagctgtggtcatggtggtgtggtgaacatcagcaaaccgtctgtggttcagctcaactggagagggttttcttatctatatggtgcttggggtagggattactctccccagcatccaaacaaaggactgtattgggtggcgccattgaatacagatgggagactgttggagtattatagactgtacaacacactggatgatttgctattgtatataaatgctcgagagttgcggatcacctatggccaaggtagtggtacagcagtttacaacaacaacatgtacgtcaacatgtacaacaccgggaatattgccagagttaacctgaccaccaacacgattgctgtgactcaaactctccctaatgctgcctataataaccgcttttcatatgctaatgttgcttggcaagatattgactttgctgtggatgagaatggattgtgggttatttattcaactgaagccagcactggtaacatggtgattagtaaactcaatgacaccacacttcaggtgctaaacacttggtataccaagcagtataaaccatctgcttctaacgccttcatggtatgtggggttctgtatgccacccgtactatgaacaccagaacagaagagattttttactattatgacacaaacacagggaaagagggcaaactagacattgtaatgcataagatgcaggaaaaagtgcagagcattaactataacccttttgaccagaaactttatgtctataacgatggttaccttctgaattatgatctttctgtcttgcagaagccccagtaagctgtttaggagttagggtgaaagagaaaatgtttgttgaaaaaatagtcttctccacttacttagatatctgcaggggtgtctaaaagtgtgttcattttgcagcaatgtttaggtgcatagttctaccacactagagatctaggacatttgtcttgatttggtgagttctcttgggaatcatctgcctcttcaggcgcattttgcaataaagtctgtctagggtgggattgtcagaggtctaggggcactgtgggcctagtgaagcctactgtgaggaggcttcactagaagccttaaattaggaattaaggaacttaaaactcagtatggcgtctagggattctttgtacaggaaatattgcccaatgactagtcctcatccatgtagcaccactaattcttccatgcctggaagaaacctggggacttagttaggtagattaatatctggagctcctcgagggaccaaatctccaacttttttttcccctcactagcacctggaatgatgctttgtatgtggcagataagtaaatttggcatgcttatatattctacatctgtaaagtgctgagttttatggagagaggcctttttatgcattaaattgtacatggcaaataaatcccagaaggatctgtagatgaggcacctgctttttcttttctctcattgtccaccttactaaaagtcagtagaatcttctacctcataacttccttccaaaggcagctcagaagattagaaccagacttactaaccaattccaccccccaccaacccccttctactgcctactttaaaaaaattaatagttttctatggaactgatctaagattagaaaaattaattttctttaatttcattatgaacttttatttacatgactctaagactataagaaaatctgatggcagtgacaaagtgctagcatttattgttatctaataaagaccttggagcatatgtgcaacttatgagtgtatcagttgttgcatgtaatttttgcctttgtttaagcctggaacttgtaagaaaatgaaaatttaatttttttttctaggacgagctatagaaaagctattgagagtatctagttaatcagtgcagtagttggaaaccttgctggtgtatgtgatgtgcttctgtgcttttgaatgactttatcatctagtctttgtctatttttcctttgatgttcaagtcctagtctataggattggcagtttaaatgctttactcccccttttaaaataaatgattaaaatgtgctttgaaaaaagtcaaaaaaaaaaaaaaaaa

SEQ ID NO: 662 - DNA, 4253 bp, Homo sapiens
ttccggtgcgggccccgccccggctgtggcccccggctgcggaggagtccgagacgcagctgccgcgccggggcctgagctgccgcctcctccgccgcccgaaaacccggagtgccccgcacaggtttagacccagtgtgcctggtgggctgtgcccaggttcagagtcatgccactctgtgggtgaagcttgaggcaaaaatggagccacttcagcagcagcagcagcagcagcagcaacaacagaagcagccacacctggctcctctgcagatggatgccagagagaagcagggccagcagatgagagaagcccagttcttgtatgcccaaaagctggtcacacagccgactctcctttccgccacagctgggagaccttctggcagcactcccttaggtcccttagccagagttccacccaccgcagcagtggcccaagtgtttgaacggggcaacatgaactcagagcctgaggaagaggacggaggtttggaagatgaggatggggatgatgaagttgcagaggtggctgagaaagaaacccaggctgcttcaaaatattttcatgtgcagaaagtagctcgccaagatcccagagtggcacccatgtccaatctacttccagcaccagggctcccaccacatggacaacaagctaaagaagaccataccaaagatgcttccaaggcctcaccttctgtctccacagcaggacagccgaactggaatctggatgagcagctcaagcagaatggtggtttggcctggagtgatgatgcagatggaggccggggaagagagatctctcgagattttgccaagctgtatgaactggacggtgatcctgaaaggaaagagttcctggatgacctcttcgtctttatgcagaagagggggacccccatcaaccgaatccccatcatggccaaacagatcctggacctgtacatgctgtataagctggtgaccgagaagggaggcctggtggagatcatcaacaagaagatctggagggagatcaccaaaggcctaaacctgcccacatccatcaccagcgccgccttcaccctcaggacgcagtacatgaagtatctgtatgcctatgagtgtgagaagaaagccttgagttccccagccgagctccaggcagcaattgatggcaaccgcagggagggccggcggcccagctacagctcctccctctttggctactcacctgctgcggctactgctgctgccgctgccggggcccctgcccttctctccccacccaagatccgctttcccatccttgggcttggctccagcagtggtaccaataccagtagccctcggatatccccagcaaccactctcaggaaaggtgatggagccccagtgacaacagtgcctgtgccaaatcgtctggctgtgcccgtgaccttggcaagccagcaggctggtactcggaccgccgcactggagcagctgcgggagcggctggagtcaggggagcctgctgagaagaaggcatcgaggctgtctgaggaggagcagcgcctggtgcagcaggccttccagcgcaactttttcagcatggcacggcagctccccatgaagatcaggatcaacggcagggaagacagagcagaggcctcggctgcagcactgaacctgaccacgagtagcattgggagcattaacatgtctgtggacatcgatggcaccacctatgcaggtgtgctgtttgcccagaagcctgtggtccacctcatcacggggtctgctccccagagcctcggcagcagcgccagcagcagcagcagctctcactgttcaccaagtcctacctcatcccggggcacccccagcgcagagccctccaccagctggtccctctgatgggcaggacccagcttcccacttgccactctcctgtcgagagtgaaggaagttgatgcacagaatttacctcatctcacagagcccacgtcgacgagcaccatttggccagacattgagagtttggacgtgtccgtctgtccaggctccattcaggtcctgctgtactctgggggcagggagaggctagaggggcaggacagacagcgttgtccaatcagggattgtcctggagaactgggtgggggtctgtgggtgtccagcttcctccagggttccccagccacctcccagctcagggcacagtgtatcgacaatctgtcagccgacgcagggctggaggccctccatttccctccccttttaatttatttccctgaccctgccttctgccatgaccccagggccactagtctcttcccctgtttttaagtcccatgtggggctgccaggagccaagagcatgccttcatgcccttctctgcagagcatgggatggggcccttccagcccactttgcctactgttaggttcctggggtacgggtccctcaaacacaagtcttgaatcagtcctcagggccccagatcccccttctaatagtctgaaggaagaggctgtgagggcagttcagggccagggcccacagggcatctgctgatgggaaggcagagcctcggggctgcccagccctggcacctgcttcacacggaccattctctgaccgcccccgccaaacctcatgctccccacttgcccttattggcctgctttcccaaaaacagcccactcatcctttccccagccctcttcagccctccccagtcctccccagccttcttcagccttcttcagctcagccctcttctatttcttatggggccatcttggcctcaccatccccacacgtgccgatgtcaggttcattgaaatacctcagatttgtaattgttgatgtttgagtcttcaggaagtatttgcatctctgaaatcttttttatatgtgttttgctgacttttgttttttttttattttaaaatttttatcgtagcaccaaagaaatgaaaacagatcacccccaaagccaagcaagtgattgggtaacccggcccctctggcccttccctcaagcccagtgaggaggtgggtggaggcatgcaggggagacgactcagggatcgcgggggcggggaggtggagtggagaggcccgctctcacaccgggtcgggccctgaaactgtaccagttctgaagaccgttttctgccacacccccacccccagctgaccagggaggcagaggacacctccccatcactcagcattcccagctcagggcacaggcaggctggggtcctcgctggccttgccagaggttgagccgccccagggtatgaggagatgaataactccacagctcctcctggaccctgcgcgggagcaggcagctcctgtgctgtaaagaaaattgattcgcttgcggctcacctcagtcgaggaagccctggaatgttcagcagaacaccaccactgtgacatggggctgtggcagtgggagacaccgcgcgtggcgtgggtgtgtgtggcagcgtggctcgcattcagtcctgtgtaggagaggaaagggaatcaaaagcttgagcacaaacagatacctcagcccggtaagctgcagctctgctcaactgcgtcttctctcagccctccacacacactcacccccactcccacacacatacacacacacacacacataccccatctcccgagggctgacctcctctggcctcagcctgcagggtgtgggcagagaagggcatctgggacgtggtgccagtgaggagcccagttggctggcactgggcccatttgaaggtgtctcagacatttggccagtatgtctttctcaggggtttggtcacaaaggatggactcttcccacccagaggatgcagggaaagcacactgtgtctttccggtcattggatcctctccctttccccaggcagctcgcctggccacaccgttggagtgaaccctcactgccctcaaggacaacagcagggtgtcacccagagcccgatgaggggtgccagcaggtgcccccacgagtggggccttggcccaagcagagcttcccctgaaggtgccatcagccagggcagctctgtcccctcctgctctccatcttatatgtattctaaccaggaaaaatgtgatagcacatgggtagcctaggcagtgagtaaatacctcagatgtcctcctgcagcaagtgtctatatgttgtggttattttctatcttacatgttctcgaatgtttatatttcaataaacctctacctcttcacacaaaaaaaaaaaaaa

SEQ ID NO: 663 - DNA, 4168 bp, Homo sapiens
aagacttaggaagactggtggatgcgtttgggttgtagctaggctttttcttttctttctcttttaaaacacatctagacaaggaaaaaacaagcctcggatctgatttttcactcctcgttcttgtgcttggttcttactgtgtttgtgtattttaaaggcgagaagacgaggggaacaaaaccagctggatccatccatcaccgtgggtggttttaatttttcgttttttctcgttatttttttttaaacaaccactcttcacaatgaacaaactgtatatcggaaacctcagcgagaacgccgccccctcggacctagaaagtatcttcaaggacgccaagatcccggtgtcgggacccttcctggtgaagactggctacgcgttcgtggactgcccggacgagagctgggccctcaaggccatcgaggcgctttcaggtaaaatagaactgcacgggaaacccatagaagttgagcactcggtcccaaaaaggcaaaggattcggaaacttcagatacgaaatatcccgcctcatttacagtgggaggtgctggatagtttactagtccagtatggagtggtggagagctgtgagcaagtgaacactgactcggaaactgcagttgtaaatgtaacctattccagtaaggaccaagctagacaagcactagacaaactgaatggatttcagttagagaatttcaccttgaaagtagcctatatccctgatgaaatggccgcccagcaaaaccccttgcagcagccccgaggtcgccgggggcttgggcagaggggctcctcaaggcaggggtctccaggatccgtatccaagcagaaaccatgtgatttgcctctgcgcctgctggttcccacccaatttgttggagccatcataggaaaagaaggtgccaccattcggaacatcaccaaacagacccagtctaaaatcgatgtccaccgtaaagaaaatgcgggggctgctgagaagtcgattactatcctctctactcctgaaggcacctctgcggcttgtaagtctattctggagattatgcataaggaagctcaagatataaaattcacagaagagatccccttgaagattttagctcataataactttgttggacgtcttattggtaaagaaggaagaaatcttaaaaaaattgagcaagacacagacactaaaatcacgatatctccattgcaggaattgacgctgtataatccagaacgcactattacagttaaaggcaatgttgagacatgtgccaaagctgaggaggagatcatgaagaaaatcagggagtcttatgaaaatgatattgcttctatgaatcttcaagcacatttaattcctggattaaatctgaacgccttgggtctgttcccacccacttcagggatgccacctcccacctcagggcccccttcagccatgactcctccctacccgcagtttgagcaatcagaaacggagactgttcatctgtttatcccagctctatcagtcggtgccatcatcggcaagcagggccagcacatcaagcagctttctcgctttgctggagcttcaattaagattgctccagcggaagcaccagatgctaaagtgaggatggtgattatcactggaccaccagaggctcagttcaaggctcagggaagaatttatggaaaaattaaagaagaaaactttgttagtcctaaagaagaggtgaaacttgaagctcatatcagagtgccatcctttgctgctggcagagttattggaaaaggaggcaaaacggtgaatgaacttcagaatttgtcaagtgcagaagttgttgtccctcgtgaccagacacctgatgagaatgaccaagtggttgtcaaaataactggtcacttctatgcttgccaggttgcccagagaaaaattcaggaaattctgactcaggtaaagcagcaccaacaacagaaggctctgcaaagtggaccacctcagtcaagacggaagtaaaggctcaggaaacagcccaccacagaggcagatgccaaaccaaagacagattgcttaaccaacagatgggcgctgaccccctatccagaatcacatgcacaagtttttacctagccagttgtttctgaggaccaggcaacttttgaactcctgtctctgtgagaatgtatactttatgctctctgaaatgtatgacacccagctttaaaacaaacaaacaaacaaacaaaaaaagggtgggggagggagggaaagagaagagctctgcacttccctttgttgtagtctcacagtataacagatattctaattcttcttaatattcccccataatgccagaaattggcttaatgatgctttcactaaattcatcaaatagattgctcctaaatccaattgttaaaattggatcagaataattatcacaggaacttaaatgttaagccattagcatagaaaaactgttctcagttttatttttacctaacactaacatgagtaacctaagggaagtgctgaatggtgttggcaggggtattaaacgtgcatttttactcaactacctcaggtattcagtaatacaatgaaaagcaaaattgttccttttttttgaaaattttatatactttataatgatagaagtccaaccgttttttaaaaaataaatttaaaatttaacagcaatcagctaacaggcaaattaagatttttacttctggctggtgacagtaaagctggaaaattaatttcagggttttttgaggcttttgacacagttattagttaaatcaaatgttcaaaaatacggagcagtgcctagtatctggagagcagcactaccatttattctttcatttatagttgggaaagtttttgacggtactaacaaagtggtcgcaggagattttggaacggctggtttaaatggcttcaggagacttcagttttttgtttagctacatgattgaatgcataataaatgctttgtgcttctgactatcaatacctaaagaaagtgcatcagtgaagagatgcaagactttcaactgactggcaaaaagcaagctttagcttgtcttataggatgcttagtttgccactacacttcagaccaatgggacagtcatagatggtgtgacagtgtttaaacgcaacaaaaggctacatttccatggggccagcactgtcatgagcctcactaagctattttgaagatttttaagcactgataaattaaaaaaaaaaaattagactccaccttaagtagtaaagtataacaggatttctgtatactgtgcaatcagttctttgaaaaaaaagtcaaaagatagagaatacaagaaaagtttttgggatataatttgaatgactgtgaaaacatatgacctttgataacgaactcatttgctcactccttgacagcaaagcccagtacgtacaattgtgttgggtgtgggtggtctccaaggccacgctgctctctgaattgattttttgagttttgtttgtaagatgatcacagtcatgttacactgatctaaaggacatatatataaccctttaaaaaaaaaatcactgcctcattcttatttcaagatgaatttctatacagactagatgtttttctgaagatcaattagacattttgaaaatgatttaaagtgttttccttaatgttctctgaaaacaagtttcttttgtagttttaaccaaaaaagtgccctttttgtcactggattctcctagcattcatgatttttttttcatacaatgaattaaaattgctaaaatcatggactggctttctggttggatttcaggtaagatgtgtttaaggccagagcttttctcagtatttgatttttttccccaatatttgattttttaaaaatatacacataggtgctgcatttatatctgctggtttaaattctgtcatatttcacttctagccttttagtatggcaaatcatattttacttttacttaagcatttgtaatttggagtatctggtactagctaagaaataattctataattgagttttgtactcaccatatatggatcattcctcatgtataatgtgccccaaatgcagcttcattttccagataccttgacgcagaataaattttttcatcatttaggtgcaaaaaaaaaa

SEQ ID NO: 664 - DNA, 3290 bp, Homo sapiens
cttcttccgagtggggaggagaatagctcactctccctagagggcctaagaaagatcagtttacaggttccagcatggggtgggacccttcctccttcccccgtcttggcactggcacttggtctggtgaccaccactagcccacagttgggtcagaaaacgttacagaactcctctctcccccacccgaaacacactcagcccttgcactgacctgccttctgattggaggctggttgcttcggataatgacctccaggaccccactgttggttacagcctgtttgtattattcttactgcaactcaagacacctgcagcagggcgtgagaaaaagtaaaagaccagtattttcacattgccaggtaccagaaacacagaagactgacacccgccacttaagtggggccagggctggtgtctgcccatgttgccatcctgatgggctgcttgccacaatgagggatcttcttcaatacatcgcttgcttctttgcctttttctctgctgggtttttgattgtggccacctggactgactgttggatggtgaatgctgatgactctctggaggtgagcacaaaatgccgaggcctctggtgggaatgcgtcacaaatgcttttgatgggattcgcacctgtgatgagtacgattccatacttgcggagcatcccttgaagctggtggtaactcgagcgttgatgattactgcagatattctagctgggtttggatttctcaccctgctccttggtcttgactgcgtgaaattcctccctgatgagccgtacattaaagtccgcatctgctttgttgctggagccacgttactaatagcaggtaccccaggaatcattggctctgtgtggtatgctgttgatgtgtatgtggaacgttctactttggttttgcacaatatatttcttggtatccaatataaatttggttggtcctgttggctcggaatggctgggtctctgggttgctttttggctggagctgttctcacctgctgcttatatctttttaaagatgttggacctgagagaaactatccttattccttgaggaaagcctattcagccgcgggtgtttccatggccaagtcatactcagcccctcgcacagagacggccaaaatgtatgctgtagacacaagggtgtaaaatgcacgtttcagggtgtgtttgcatatgatttaatcaatcagtatggttacattgataaaatagtaagtcaatccaggaacagttatttagaattcatattgaattaaattaattgctagcttaatcaaaatgtttgattctcctatactttttctttctattactcttatattttcccgtcattctctctgctaaccttccaccttatgcacacactttccctatattttaagataagtctgctaggatgtagaaatatttgtttgtgatttctatatagctattagagattatgacatagtaatattaaaatgaaatgatacttaaacagaaagcaatttccaaagaggccagggaccctaatctttgaagagatgaagaaacttacttttctccctggcttttggttcactttttgtacttttaacaagtgggtgaattatttgataattttgaggaagattattcttttaaattcaaactagtatgtcaatgcctaccattactctgattatattaaaacagaaaaaggaaataacaacttcgtataccagccactggtgagagttaaagacaagagctgcccccccacccccaaatgtcaaaggcaaatgctaaattgatactggagctcgtggtgactttctacctcactaacaacataagggatctccatattatttcaccactattctagctttgctgatatattgccaaatgattagactacagaatagttcaaccagagaatttactcatttattgattaaacatccaaatactattgtaatatactatgttaaaattcatcaattcaagtgcccacacaccactgaatcatcagcaccaagcaatatattagacatatggcaaaattcaacaaatatattttgatataaataaataaacgttcacgactttacttaaaaaatcaatgttgcggctgggcacggtagctcgcgtctgtaatccccgcactttgggaggccaaggcgggtggatcacgaggtcaagagacggagaccatcctggctaacatggtgaaaccctgtctctactaaaaatacaaaaattagccgggcgtggtggcggtgcctgtagtcccagctactcgggaggctgaggcaggagaatcgtttgaacccaggaggtggaggttgcagtgagcggagatcgcaccattgcactccagtctggcaacagagcgagactccatctcaaaaaacaaaaataaataaataaataaatattcttcataaaatgtgggttttggggaaaatatagaattacatatacatttaacgaagtcgctaatgacatttcattcatattcataatgtaaccatcttgaatttttttaattgtagcgattttaaaaatgtttgtaaaatttaatttccagttttctaattacttgtcagtcacattaataacattagtacctttatggtacccttgcagtacctgaaaagaatatcaacctgaaaagaatatcaactcacccagaaattagttctttgaaaaaaaagaaattaagttgtgaatttctaaagaccttgaaataagtgtttcaaatttaaagaacaaagaatgatgtgaaaatgagattatgattcctactacatgaattaacgtttcgagattgctgtttattacttcccagagtatctttaacagtattctctgaagcagttccaatctagttggagaattaacagcaattgatttaactatctcatttttattaactgtaatttactttaaaaatatttgcaaatcatactcattagttatttgatcattgttctatgcattttaaaattaattttgtgttgttcctctcaatatttgtttttaacatttattcccatttttattttatactattgtctgtcatgctttatgtattccaataagtgtcttgaaatccttgtggggaaaggcaggacaaaaataattagttaattagatttgaaaaatgtaatttttccattttaaatatttcatttgtataagaaaatatttcagagaaccatgatgataatggatatgtgtgactgttttgaatttttttctcaattaaaacattttgtatgtaatgggaaaaaaaaaaaaaaaaaa

SEQ ID NO: 665 - DNA, 10870 bp, Homo sapiens
ttttattaatatgctgatctgttttatcttctcaggccataaagaatgctgatgggagaaccattttcctaattttcaaattgttgagctgtttgccataatggatgatcagcaagctttgaactcaatcatgcaagatttggctgtccttcataaggccagtcgaccagcattatccttgcaggaaaccagaaaagcaaaatcttcatcaccaaaaaaacagaatgatgtccgagtcaaatttgaacatagaggagaaaaaagaatccttcagttccccagaccagttaaactggaagatctgagatctaaagctaaaattgcctttggacagtctatggatctacattataccaataacgagttggtaattccattaactactcaagatgacttggacaaagctgtggaactgctggatcgtagtattcatatgaagagcctcaagatattacttgtaataaatggaagtacacaggctactaatttagaaccattgccatcactagaagatttggataatacagtatttggagcagagaggaaaaaacggctatctataataggtcctactagtagagatagaagttctcctcccccaggttacattccagatgaattacaccaggttgcccggaatgggtcattcactagtatcaacagtgaaggagagttcattccagagagcatggaccaaatgctggatccattatctttaagcagccctgaaaattctggctcaggaagttgtccatcacttgatagtcctttggatggagagagctatccaaaatcacgaatgcctagggctcagagctacccagataatcatcaggaattttcagactatgataaccctatctttgagaaatttggaaaaggaggaacatatccaagaaggtatcatgtttcatatcatcatcaagagtataatgatggtcgtaaaacttttccaagagctagaaggacccaggggaccagcttacggtctcctgtgagtttcagtcctactgatcattccttaagcactagtagtggaagcagtatctttaccccagagtatgatgatagtcgaataagaagaaggggaagtgacatagacaatcctactttgaccgtaatggacatcagcccacccagccgttcacctcgagctccgaccaactggagattgggcaaactgcttggccaaggagcctttggaagggtctacctctgttatgatgttgatacaggaagagaattggctgttaagcaagttcaatttgaccccgatagtcctgagaccagcaaggaagtaaatgcacttgagtgtgaaattcagttgctgaaaaacttgctacatgagcgaattgttcagtattatggctgtttgagggatccccaggaaaaaacactttccatatttatggaatatatgccagggggttcaattaaggaccaattaaaagcatatggcgctcttactgagaatgtgactaggaaatacacccgtcagattctggagggtgtccattatttgcacagtaatatgattgtccatagagatatcaaaggcgcaaatatcctgcgagattcaacaggcaacgtcaaactaggagattttggggccagcaaacggcttcagaccatctgtctctcagggacaggaatgaagtctgtcacgggcacaccatactggatgagccctgaagtcatcagtggagaaggctatggaagaaaagcagacatctggagtgttgcatgtactgtggtagaaatgctaactgaaaagccgccttgggctgaatttgaagcaatggctgccatctttaaaatcgccactcagccaacaaacccaaagctgccacctcatgtctcagactatactcgagatttcctcaaacggatttttgtagaggccaaactgagaccttcagctgatgaactcttaaggcacatgtttgtgcattatcactagcagccagtaacctctcctgtgcctctacctagctcccatctattcattcaccttctctctgactgcacttttcttttttataaaaaaagagagatgggggagaaaaaagacaagagggaaagtatttctcttgattcttggttaaatttgtttaataataataatatcctaaattttttatatttaatctttttttcccttacaagaacttgaagtttttttttttaatttttataatgtactgatgtggttcagagagataaagcactttagtacatagtcactctttttagtacaaacaaatcatttggaatacctaaagattgtagagtcattccctctatcactgacacatcagtgacgatgggaagacatggaaaacaaggagaagaaaatgatgtataatttgtagtttttagtgatagtatttaaaatatatcctcatttgtggggttgagccctaaactttagtttagggtaggtactcaacttaaagaatataggtttcttcttatatctgtattctttagatcctaacctctgtctaccaacctttttgctcagtaggagtcttgatagaagatatgaatctctgagaggtatgtttatttgttaatcctaaccagtataataagcaaatacactataatagatccacgttactggaatctgtaaaccttgagggatagctttctgcttaaaaacacacacacacacacacacacacacacggaaaacctttattttaaagtcaagttgtgagcaaatagaaataaaagacaaaaggacatcactcttatcaaatgtgtgagcagtagaagagaccacatttacagtcaatagaaataatgaaaaaaaattaggtgtttagtgtattttaaacagttttgttttgttttacttgagggggacgtcccaaaattaaaggaatggagaaataatcaaaatcatgtataccatcttctatttccagctcctgattccccataggtaacatcccttaggagcgaagagttcaattagtaatgtttatgtgttatgtcaggagatgaaacccttgttcttaggatcacagaatactaaagcacctcaaaaaaacaggtatcatgtgaaacagtggttgccaaaagtggagcgaggatgatttcactaggcatttggcaattcttagagacatttccggttgtcacaattggagggatactagtaacatgaattgggtagaggccagggatgttgctaaatagattataatacacaaggaaagcagcctcaaagaattacccctcccaaaatgtcagaagtgctgaggctgagaaaccctgatgtaaagatcagtcccagttataaactgaaaacagctatttacaaagcagtaaatgcaagaaagaaaaggaagtcgcaaagagaaagtgatgtaatgcaaattgaggattttacaagatcagatactgctgctttaagtcaagggtgaataatctcaacaaacagcaaatagcaatcactttaccagctgcatattgcacccacataggtaactcttcattttaggaacaaactgaatttgaacactgagccttttgaactcagccatctctatatattctttccttaaaattcatgattttgggcaaaaaaaaaaaaaaaagcatatcaaaacaaaattttaactactaatgggaaggttaaaaagctgccacgtatttctagtacaatgtatccaataagagcaaggacattgttaaatggaacaagacagctgggaaaggccccactatctctaatagaattgtgctactataaaacatgaagatatcagcaatttggccacttgcagtttttttcagcatgttaaagcaagtgctaagtactttattagtactttatttagtactttattttaaaggtctagaaaacaacagtcttcctggaggccccagaatccctttcatgggattcataagggactcaggtattcttattttctgccaaaaggtgtgcttatttagggactcttttacgatactttgtttctgaagttaggtagatcttggtttactgtgccaaggtcctacctagcattccctgtaggaatatttgaaattccactagctagtctaagaagtcaaagcacaaaattaattgtcaacgcttctctcatattcttaaaattgaagcagtttgcagggaagaacaagaatgaggtgtccctgccttggtaaagcaactgccaaattttgttctagaaagaatccccaagtgtgtggatctattataatttctttatcttttatgaatgagggcatcttttctacttgagcaagatcatggtccttgaccagtgggcttttccttcatatctgtcttgtgtagttgtgcttttcctttggctcgtttttggtctgtcagggtaaccagcagtgcacaatatgagacaaatgctctttagagagaaatctggtgagactgtagaacccagagcaaaactgtttttttttcagtctctgttttcttttctaaatgctatagaaaataaaggcacctgaaaagaaactactactttaacactgctgtggaaggcctttgctttataagaaaaatattattagctatgggaaagtaatgttctttatgtaaagacttaaaaatagactaatagtttacagagttattatataaaatacgatgtgaatttatttcaaacaagttgtgaaggtaccaaaaaccacaataaaagttaatatatataaaaactactagaacaaaaaagcttgaaggtgtgggggtggagggtatggaagaccaaaagtaaatttaaaaaagaaatttttgaaaggaaacagctttatcaggggaagttaaatataacactccgtttttttcttctttctaataatgatatggatcaacaaatgcaatttgaactttttaagataactctaaatgtgttttgtttcttaaatgcacaattgattcttctatactgtaatgcttctttgctgacgctggaaaatggtcagactgctgactttgtgcctttaaaatgcattctgctttgacagtggcagactttttggtgctggagaagattcactagcagtcttatatgtgcttttcaggaaatatctttctacttaaggccttgagagattcaaagtggcatgacttaggcttggaccaaatataagatcttttacattgcaaacaaaatgttgtattgaataaaagggttaaaaaaatcataatgactagtggaaattttgatgggttgttaattatttaaaatgtatttgaaagtatacagactgaaaatttcagtatgaatatcttgaaaattttcagcacttttccttgtttacaaaacatctttctaacttaaaaaaatgactattgccttagaaagttttaaaaggcacagttacccttacataacatatataaggaattaaaatattaatgcatttgctgaactgtaaaagaaaattttaaaccttgatttcagagtgaattggattggctttcacttgagagagtctttaccttattcccaaagaaactgcattaaaaagatgaaactatttctttagactaagtctctgctactccagctcatatatatgtcagatctgctctgtagtatttctgacatggagttgttataagatatgtgaaatcacttagaaaataaaatcagatgtgaatagtttagcaggatgaccaagccagatgcagactccttggcctatggcaaagttctgtgccagtgattttatttggagtctgggaactgatagcttgatataaaatcacctggtgtcaattaaatatacaaatctatcttttttaatagaatgaatcttctttgtttgttcaataattgtaacttattatgtcaggtactaaattaacatccttaaggaggtcacaatctaggaggaacatgggcaaacagttacttattttatggcatacgctaactctgaaagttcagcaatgatgttttaaaatgttattttttattaagggaaaagcaattttaggtaatcattggctgttataaacggaaatgtcactgacaacagggattagagtaaaagtatctccaaactagagggatcccctccccaaccaggtcacatagcatctctctcaggaccccctcttactgcaaaacccagcctctactcaacagttctggtgatggggagcatttattccataacagtgtttttttgttcttttttttttttttccccagtgtctcttttaaagaaaacatactttattttggtctaaattgtgaaaatacccaaaacatttgatagaaattgaactctgtcaacagtgttatttatactaagatcaggacagttccttgagatcatactgttttattactaagtttggcctttgttttacaaatgtaatgttcatatttatttgaattttaagattggttaaatgttaatgaaaagcaatccaattgttaatttttagtagtgccttttctctgtatgccttaattttattttatattaataattcaagttacccaccaaaatgaagattttttccaaaatcagtaggcttcacaagttcatttggccttagactgtgtattggtccttaaatgtttcttaatgcctgcctcctcctacccttttctacctcctttttaaaaaaataaataaataaataaataaatgttaggagagaaacattaggatttgtctgtgatagacatgctgcagcttccactagacatgaattcccaacacaagcatagaaagaggtattctcgttctaaagagacatgtaaatgttttctgggttgaatatttgattttcaatcacattggcactgtccaagttcttggcatattatagttcagttatgattttcatggtagagttacaatacttgtttttgccctaaagaagtcattcacatggtttacaaatgttaaggcaatgagataggacagtgagtaggaaatccagggatagcagattctagtccttaattctcagctaacattttgggtaatactcacagaaaagttacttttctgtgaagtgtgtgcatgtgtgcatgtatgtgtgcgtttgcatgcatgtgtgtgtgtgtgtgtgtgtggttagagttggaggcagggatgggaaggaagaaggggaaaggtatgagtgttcaattaggtcagtttctggttttggaagaacaactcaaatgtatgacctactgatgacatacagtgagtgtagtcatccttgggtaggaacaccagtacattttccagaagtagctagtacaaatgattgtataataatattgattgtaaattgccatactcttggttgctaaaggtagattaaaattcaatttgtgtatatgtaaaataatcttatatataattcttaaatagaaagtaattgattttacatagttcttcctgaactttttggaactgaaattctgccaaacattatcaaaataagcttccttagcttaccaagtattcacaaggaaattctcttgtacctctttttggttggctaggggaagcatgctgtgaagcagctattcctacttatagttgtctttggcttggctttgacttctgccatggtttggacaggatgccatggtaggtgtgggaagtatcagggcctcccatcttcccatactcaccttccagagctgttgatggaaatgagctcttgggggagcctagagattcttttttcagtggtcctgtaagcattcaaggttgagcttcagaaagatgagggaggagtcatagctacagtaaagaaaagaatagattttatctgttgcctgtatacagtctcatagaattcttatttttcataattgtgcattttaattgatagtcatatggtatttttgttaataacagcaaaggcattaaatcagtaccattgttccttctgcctgatgacttcttgtttgtaacacaatctgtattatcagaatcactttaaaccaaagcttttatattccctgtacacatagccaaaataattagcactgttacttctgtccacttgtaagctaatagtataaaaattataaagcagatactagtagaatttgtattctggtatatccttcaaggaaaaggacaggtgatcagtgcatttagacatccagaagttacttccactattgaggaactatgtagacatgaatttaagcttgtacatgtgccaatcttgttaatgtcacttgaccactgattcacatagacagacattaacgtctgatgcctcaggttgatggcgaactttcttcctagtgtcttaacatttatgaacttatgtttgacttgaggggcatttcagcaaagctgtgaggaaaagtaggttctggactgatgtctgctttgtgccatagacattttggaacataaggaagtatctgcttctactatatgtacaggacttgtccccaaataatttctgaatcccttaatgcagttgagaatcccttaatgcagttgagaacagtaaagttcatgaccataccgaaaagcacttttaagttcacttctttttaaatatttttttagaatttattttttaaaagcatatgtaactagtgatgattttagcattagctttacttggaggggagaagaaacaaaattacaccttaaactctattagatagactacaaaatggatttgatgtattcttacttttccaaagaattttttccacctggaataagaagagaggactagttgaaacatttgagctggagaggcttatgggcaatatgaagtgggccaaattcttgcaatacaccctattcaattgaaagtacagtgtctaaggataagaatacttctttaaagaccaacaattgttttaatgcaatcttaattagtaaatggtttacattttttctattgttattggttttaaaatttgctaccctgaattctgaaatattataagagttaataccaaaaatacttttaatgtctgacatctcttacatttcacatggttctttttattcattgtaaataaaagtaaacttggataaatttgagaataaactttgaattgttgcaaactatgattatcaatttgtaaatttaccctttgacataataatgtacatttttaaatgtagccattaaattctctatatttaacctattggtttctctctaaatgtttttaatctcagttgaatgctgggcagtttataattatgtacaaagggtttttttcctattaagattgacatttttgcacatttttggaaatgtttaatttgtacactgatttactactctgaccaataattgttgatgagtgtatgagcatcatgaatgcgtgcattgaactactgtctgtgtctttatgttttaacttctttcaagatgtagccatcagttactgcactgctattactgacttaaatggacctttttgcttttacaaactatacttatctatggttctttgttgaagaactcaggagttcgacattaatagaaattagaaaattttataatgtattataaaatccattactaagttgaaagtatgcttttaactgtgtatcaggggatgtatgtttgtgtggagatgtttttttctgtctgtaggcacatgtatatatcccagtaagttcttattttcatttcatttctacatttttatgaacttgttttataagggtactgtttagttgtgataattaaatatatataaaagctttctgagagattatttactatatgaatatattttcagctggctgatcaaaagtatttttaaaattttgtttttagccattcaaaatgtatttgtattttcagaattgaatgcaagtcatacttagagctcaattaaaatactcttgcaagaaaaagcattaaattctctttgagaattccgtgaaatgcaaattaagggaaaaataggttttaagcagtagcaaaaacacaccgctaaaaatggcctttgaattctcagagctatggaaaaatgtgagaaactaaattgtctcgagatgtcaagatttttctatctccagttgctattggcctgtcctactgttgtctttgaatatttcctgtattccaccccaaaagatttcaacttttagtttttctatcactgggcaaggtcagactgggtttataaaacaatatattggcatattgtgattctttgtaattgactataaattggttttgaaatgtccaaacatacgttgtgtgtctttatattgtactgtgtgttttaagtaactggcagaaaaagaattggaaatgaaatttccaatcagacaatgtagtattaaagaaaactttgttttaaatatgcggtaccatgtaaaattactcgtgttaggaataaagtccactgttgaagttgaatgtcactaagcttattatgttaaaaggaaccagtgtgattaggaaaacctaccagaagccagatacagtgtggtacgtgcaacatttcatgcacattttgattttgtttgtcattcaaaattgtgcttgtaaaaatgtatacaatttctgagttttataatttctaggtacttgttttttcttgctggtaaatagcttttttttaaaaaaaaatctaatataaaagaaaccatgtttatattttgttagtgatcaatgactttgtttatatggaaatttgtatattgttggcacacattttgttgaggtttacgtgcatgaaggcctgcaataattagcacaatgaaaactgctttttcttacatgttcatttttttgaaagattgtggtgcaaaggcttactctaataagtaaccttctggactatggaatgaatataaatgaatggcactttgagtgttaataaagctaatatttatttccactgtg

SEQ ID NO: 666 - DNA, 5162 bp, Homo sapiens
gccattttcgcgggcggaggcggcccggcgggccctgggagagctgggacgggcggcggccgggtggcctcggccacccgctaattgcatcttttcccggcgtctcgtctgcagagggagcactatgtctgcggaagtccccgaggcagcctccgcggaggagcagaaggaaatggaagataaagtgactagtccagagaaagcagaagaagcaaaattaaaagcaagatatcctcatctgggacaaaagcctggaggttcagatttcttaaggaaacggttgcagaaagggcaaaaatattttgattctggggattacaacatggctaaagcaaaaatgaagaacaagcaacttcctactgcagctccggataagacggaggtcactggtgaccacattcccactccgcaagaccttcctcaacggaagccgtcccttgttgctagcaagctggctggctgattaagaggctgaactgcatgaatctgctaaatctcattatttctccttaatatgttacttatctactttttatttcctttcattcactagtcatttgagactgacagctttgcaggtagcagtagtgtgtgctgctattgtggaatatacgtgtgtagagtttttgattagtttaacagtgcactggtgaagaggacatgttagagcaacataagtaaactacttgaaaatagttgtatatattacctaacttctagtgtagtactggttctaacaagtaacaagcaagttttaaaattttaatgttttggctttcattacttcatcttaattatagctttgtatgttactcttatttaatataatctctattgtattgatttcttctgtatttaccttttggattttgtaaaacagaagtttaagaccacaagttagaagaaaggtcacatatttcaaacacaactagatggggctctgaaagatttgtatctctgtgcttgaacttgaatggccttaaacctgtttcagctttaacagtagaattttacttgggcaatatttgcccattctggtgtaacttatgtgactctagtgcttaacagctgccgttgaagctaatattcagttctgtagagttagaataccttttgttgttgaagatgtgaatgaagtatgcatgtgcattaactgttgaattcacttttgtgccatttttgtaaatacagtagttttgcacaacctctcacaaatgtctgtattaatttcacatacttaaaaagtagataatgtgccaaccagaagcacaagagttcctacacaaaactctgtaaatcattatagcttttgtataataagagtagtttacaatctcgggcttatagaataccaaactgaaatcttagttcaatctgccatagacttaagcttttcatttgttactaatatccatgacattcagtggccttgtgcaaatacgatatgttgcttaggcatatcttttgtcctatgcagaacctttcattttgatttttatgaaagttgcaattcatgtaatttatataaactttttaaatgtagaaactttttacttccacactcagttttggagaccctagaataaaaggcttcaatactctgcattccatgccctctgccacctgcttttttttcccctttgttctttgactcaaatggtattgagctgtttgttgtatatggaagcataggtgtctatatccttactcttttatataacacaataatggcgttttccttctaatttctcagttgttaacttctttctcttttttttttaggatagggccttgctctgtcacctgagctctagtgcagtagtgcaatcacagctcactgcaaccttactcctaggctcaagttaactattcttgatcctttattattactaatattctacaattgtttaaataaaaggaactttataatgaaacggttcggaatactggctcaagaacctatgtcaagatgagctgaattttggtaaattattttaggaattatgacaagctaattgaattaggcttgtgacaattagagtaatttacatgacaggtaaaactcctattaaaaatgtttagatgtttgcttctgtagatgtcactttagtaaaataccaatttagttttacttgtggcttatctagttagaacttagcagactttactgggacaagtttactgctcttgtaggagctcctctcacaagtagttgtaatgctgtagcatgatactcaggatcagtagcttgagatgctactatttttctcttcatctttgacttgcagagagcctcccgtttttggatccaggcatcttttctgaatcctggttccatcagtatacctgctctcctatgaccccaaatcatagtcaatggtgcctcaaacatagcaccttaagttaaaggctgcctagtgctctgaggaaagcttgctgattatcttcctgatctactcaccccaaaaggcagaaaagcaacacagtcactgctgtggtcatttgtaatgtaaagatcagttatatatatatatttgtaatgagagcaagtatatactcattatagaatcaatttaagaagtttaaaataacccagagtagaatttctatatctagtcttggtttttttcatgaatatttgcaagtaattaccattaaattcacacatgaaagattaatctgaaagatcagagaccatgttattcctgaccacgatagaactgctcctgtggtttgggacaagtaataaaacaactgcttgagttttgtttgtaaaatacataattaatatttgacctacctcaaaatgtattgaggatctgtgaaatgctaagtgcccaaaataaaatattgctgattgtctttttattaaaagtaaatttcctcattaagccaacctgccttctgtaagtcacagtgcttaaatctcaggatttttcattaggagagacctgtcgttaaggatttgtaggtataattgcttagcctccattattggtgcttgggatagagaggttttagatttttgttttttttttgttctgcctcaaagctcagtttattgaagacatttgtaagctattggatcatcacttgaatcaagattttgactagtgagcttaattgtccatttcttacaatttcaaagttacagtctcagaaatggttaattttaataactgtcctatcataaattaatgttggaataaattgaagttgttgataaatacttcatgaaaactaaagtctgaaataaattacttgttttatgtccaatagctactacatttgatagaacagttttgaggaacatttcattcttgaacgcagcatctgacatggttctcagcaagttggaatagtaaggattattggcttgtttcgatgagtggaagcggcatgtttgtagcatacaagttattcaataatcttgtgctgatgacctaaaaatatgtcttaactattcatcaaggaaagcctggtgaagcctttacttgttactacttcaacagttggaattagttgctctttttacttgatgaaacaaaactatacctctgaatatttatggatactttttactaaatcaggcttgtgttcttaatccaaattagtaaagttttatggaagctgaaatgtaatacagtagtctccccttatctgtaagagatacattccaagacccctagtggatgcctgaaacctcagatagtactgaaccctttatcaactatgttttttcagtctgacaaccaaggcggctactaagtgactaaggggcaggtagtatacagtgtggataagcaggacaaaggggtgattcacatcccaggcaggacagagcaggagatcatgagatttcatcactcaggatggcttgtgatttattttattttattcttttttttttttgagatggagtctcactcttgcccaggctggagtgcagtggtgcgatcttggctcactgcaacctctgcctcctgggttcaagcagttctcctgcctcagcctcccaagtagctgggattacaggcgtccgccaccatgcccagccaatttttgtacttttagtagagatggggtttcaccatgttggccaggctggtctcgaactcctgacctcaggtgatccactcgcctcggcctcccaaagtgctgggattataggcatgcgccaccatgcccggccggcttatgatttaaaacatgaattgtttatttctggaattttccacataatatttttggaccaaggttgcctcaggtaacaaactacagaaagtgaaattgcagataaaggggattactgctcctctgctctaaaattggtgtttgggtgatcagaagcaggtagccaatgggaagagcacttctgagtgataactaaagcagtttggtggccttttcacattctccaatgttcaaacatattttccactttccattttctctttcacctcattttgcctctctatcccccatccctgcttatttcttaagcccattgatggcactcattaaattgtatttagggctaatgagtcattgttccttaatatcgttttcaatatgccacaatttaggacacatttaaaattttctaaaacaatatcctaatcaatattgactaatttgagccacattcccaactctaactcagcacacactgccagtcttccccaatatctgtctcctctcaattccccaccacaccttataaaattgtaatcaaagatatctcactctgtcattgttaatctaagaataaaaacactgactttaatacggttttactaagtttcaaccttctaattaggtaggcctctaggtattctgcagatcactgctggtcttgatagccattaatatatgtttgtattatgttatttttcaactaaatcgcagttggaaaaaaacatatttaatattatgcccttggatctgttactgcatcactagcacttgtgatgcaatagaacacttcgcctgtactgaaagggccaagagtaaatgccttgttttgtttttttgttttgttttgttttgctttttgttaaaacatgtctatagagttggcagttaatgctgaatttgtcaaataccccttccaaaattatacttgtatttaaaaaataaatggatctacctaatttctattg

SEQ ID NO: 667 - DNA, 1931 bp, Homo sapiens
tccccggctagtctttggccgccgccgaaccccgcgcgccactcgctcgctcagagggaggagaaagtggcgagttccggatccctgcctagcgcggcccaacctttactccagagatcatggctgccgaggatgtggtggcgactggcgccgacccaagcgatctggagagcggcgggctgctgcatgagattttcacgtcgccgctcaacctgctgctgcttggcctctgcatcttcctgctctacaagatcgtgcgcggggaccagccggcggccagcggcgacagcgacgacgacgagccgccccctctgccccgcctcaagcggcgcgacttcacccccgccgagctgcggcgcttcgacggcgtccaggacccgcgcatactcatggccatcaacggcaaggtgttcgatgtgaccaaaggccgcaaattctacgggcccgaggggccgtatggggtctttgctggaagagatgcatccaggggccttgccacattttgcctggataaggaagcactgaaggatgagtacgatgacctttctgacctcactgctgcccagcaggagactctgagtgactgggagtctcagttcactttcaagtatcatcacgtgggcaaactgctgaaggagggggaggagcccactgtgtactcagatgaggaagaaccaaaagatgagagtgcccggaaaaatgattaaagcattcagtggaagtatatctatttttgtattttgcaaaatcatttgtaacagtccactctgtctttaaaacatagtgattacaatatttagaaagttttgagcacttgctataagttttttaattaacatcactagtgacactaataaaattaacttcttagaatgcatgatgtgtttgtgtgtcacaaatccagaaagtgaactgcagtgctgtaatacacatgttaatactgtttttcttctatctgtagttagtacaggatgaatttaaatgtgtttttcctgagagacaaggaagacttgggtatttcccaaaacaggtaaaaatcttaaatgtgcaccaagagcaaaggatcaacttttagtcatgatgttctgtaaagacaacaaatccctttttttttctcaattgacttaactgcatgatttctgttttatctacctctaaagcaaatctgcagtgttccaaagactttggtatggattaagcgctgtccagtaacaaaatgaaatctcaaaacagagctcagctgcaaaaaagcatattttctgtgtttctggactgcactgttgtccttgccctcacatagacactcagacaccctcacaaacacagtagtctatagttaggattaaaataggatctgaacattcaaaagaaagctttggaaaaaaagagctggctggcctaaaaacctaaatatatgatgaagattgtaggactgtcttcccaagccccatgttcatggtggggcaatggttatttggttattttactcaattggttactctcatttgaaatgagggagggacatacagaataggaacaggtgtttgctctcctaagagccttcatgcacacccctgaaccacgaggaaacagtacagtcgctagtcaagtggtttttaaagtaaagtatattcataaggtaacagttattctgttgttataaaactatacccactgcaaaagtagtagtcaagtgtctaggtctttgatattgctcttttggttaacactaagcttaagtagactatacagttgtatgaatttgtaaaagtatatgaacacctagtgagatttcaaacttgtaattgtggttaaatagtcattgtattttcttgtgaactgtgttttatgattttacctcaaatcagaaaacaaaatgatgtgctttggtcagttaataaaaatggttttacccactaaaaaaaaaaaaa

SEQ ID NO: 668 - DNA, 2138 bp, Homo sapiens
atgagccccgggctgctgctgctcggcagcgccgtcctgctcgccttcggcctctgctgcaccttcgtgcaccgcgctcgcagccgctacgagcacatccccgggccgccgcggcccagtttccttctaggacacctcccctgcttttggaaaaaggatgaggttggtggccgtgtgctccaagatgtgtttttggattgggctaagaagtatggacctgttgtgcgggtcaacgtcttccacaaaacctcagtcatcgtcacgagtcctgagtcggttaagaagttcctgatgtcaaccaagtacaacaaggactccaagatgtaccgtgcgctccagactgtgtttggtgagagactcttcggccaaggcttggtgtccgaatgcaactatgagcgctggcacaagcagcggagagtcatagacctggccttcagccggagctccttggttagcttaatggaaacattcaacgagaaggctgagcagctggtggagattctagaagccaaggcagatgggcagaccccagtgtccatgcaggacatgctgacctacaccgccatggacatcctggccaaggcagcttttgggatggagaccagtatgctgctgggtgcccagaagcctctgtcccaggcagtgaaacttatgttggagggaatcactgcgtcccgcaacactctggcaaagttcctgccagggaagaggaagcagctccgggaggtccgggagagcattcgcttcctgcgccaggtgggcagggactgggtccagcgccgccgggaagccctgaagaggggcgaggaggttcctgccgacatcctcacacagattctgaaagctgaagagggagcccaggacgacgagggtctgctggacaacttcgtcaccttcttcattgctggtcacgagacctctgccaaccacttggcgttcacagtgatggagctgtctcgccagccagagatcgtggcaaggctgcaggccgaggtggatgaggtcattggttctaagaggtacctggatttcgaggacctggggagactgcagtacctgtcccaggtcctcaaagagtcgctgaggctgtacccaccagcatggggcacctttcgcctgctggaagaggagaccttgattgatggggtcagagtccccggcaacaccccgctcttgttcagcacctatgtcatggggcggatggacacatactttgaggacccgctgactttcaaccccgatcgcttcggccctggagcacccaagccacggttcacctacttccccttctccctgggccaccgctcctgcatcgggcagcagtttgctcagatggaggtgaaggtggtcatggcaaagctgctgcagaggctggagttccggctggtgcccgggcagcgcttcgggctgcaggagcaggccacactcaagccactggaccccgtgctgtgcaccctgcggccccgcggctggcagcccgcacccccaccacccccctgctgagggggcctccaggcaggacgagactcctcgggcaagggccgtgcccgcccacctctgctgcccacggccacccacccttctcccctgccccgtcccctgggccacccttcacgctggcttccagcgggccctctgccgaccgcctgcttcacacccctcagcgctccctgtcgcctgcggactccatggcccttcctggactggcccttgcccaactcccagccaccaccactgtccctaccactgagcccttgcacaggccacttgctcagacgagacaccctaactcttgctcactccctaaagccctcttcaggggtcacctcctccaagaagccctccttgccaccccccgccggcaggggcccctcctctgtgctccctcggtcacctgtgctacctctaacaccacactgaccacactgtatcgtgagtgtccgttgacgtgaccaattgccctgccaggctgtcagcgcctcaagggtagggtctgcgtgtgatttgtctctgagccccctgtgcccacccagggcccggcacagagtcgatgctcaataaatgtgtgttgactgcaaaaaaaaaaaaaaaaaaaaaaaaaaaaaaaaaaaaaaaaaaaaaaaaaaaaaaaaaaaaaa

SEQ ID NO: 669 - DNA, 3522 bp, Homo sapiens
gccccatcacgtgaccgcagccccagcgcggcggggccggcgtctcctggctgccgtcacttccggttctctgtcagtcgcgagcgaacgaccaagagggtgttcgactgctagagccgagcgaagcgatgcctaaatcaaaggaacttgtttcttcaagctcttctggcagtgattctgacagtgaggttgacaaaaagttaaagaggaaaaagcaagttgctccagaaaaacctgtaaagaaacaaaagacaggtgagacttcgagagccctgtcatcttctaaacagagcagcagcagcagagatgataacatgtttcagattgggaaaatgaggtacgttagtgttcgcgattttaaaggcaaagtgctaattgatattagagaatattggatggatcctgaaggtgaaatgaaaccaggaagaaaaggtatttctttaaatccagaacaatggagccagctgaaggaacagatttctgacattgatgatgcagtaagaaaactgtaaaattcgagccatataaataaaacctgtactgttctagttgttttaatctgtctttttacattggcttttgttttctaaatgttctccaagctattgtatgtttggattgcagaagaatttgtaagatgaatacttttttttaatgtgcattattaaaaatattgagtgaagctaattgtcaactttattaaggattactttgtctgcccaccacctagtgtaaaataaaatcaagtaatacaatcttaactgttgtggccttttttgatcataagagttggtactgtttaaggccaaaagtaacagtttttatagatcttttagtttcaactcagcttttacaataaaaaggatttgtattgcattgagtttataaacttttggtttgtgaacttcatatttgatcttttctcttccaatcaaatgtctaggcttgtttgacttccacccccaatggtttttcactctttttatttacttcattttcctttaataacttaatctcttcatgttcagtttttacttcactctttattcttttctttgattatggtatgcttatttggaaagtcagtgaaactgtcaaaatgttatctcaataagatacttatatgagaactacaatcaccgaatctactgtattcaatattagcagatctaatttgataaacaacatggcttgtgtgaaaactgagcaggtgtttgtttacccatagtgttctgtgtagttattgcttagtctgcagaaaataatgacttagatgagatgtctgacttgctttcacttattaaacatgttcaccatgggatgatgtctgtaacatcagatattgttcaactagactaggatttaataaaaattgtgaaagcttactggcctaacattttattttataatattgggtatgaattatatgtagccagagatgtcattaagctttactgttatagtaggtaatatggttagtttgtagggaaaagagcatatgagcacatgcttgtgtattttggcctttgccccagtagaacagaccaatggcattctagacttgatgatactaagttttagcagacactagtaagtggtttgtatttaaccatactgatgaagcagacagattgaggcacagattttagtggctttgtggcaataaatagggcatggtgtgccttaggaaaagaatgtttataaagggaattataactgaaattaaaggaggcggcagtgaagaggaaataattctcttctatctaaatgatatacatatgatattttgagatttttataacagcagtggaacacaattctaggtagagtagaaaaaggaaagttttaaagacatataaaagattcttgttgacaaattatttttggtagcaaatctcaaatggttacctgctattaaggtctgccatattagagttttgcactattttgctaccaagtttgattcatacatctaaaacattttgtagttacttgtcaaggacttaatttgaaaatcatttgccaggccacatagttatcaatttttttttctatcagctattctgttgtatttctaaaacattttttagatgactttttaaagtatatttagcagtaaccttatgaggttcaaattggtaaatctcttgtaatttagccttcatcgaataataggtaccagtgtattaaaaatgtgtattttttgcagccccttgaaccagagtaggttcagagaaactcccaaagtttgtactttagacacatcatgcttgattggtaacttccctccttttttggggaacatgtttgtgtcctattaacttaattggatagatttttaaatatttcttatttttggcacacggaaagggtagttcgagtacagaactttgatttttggtgtagatgcagagggaatgatgggtaaatttcctaggtttatgtgaatttagggggtgtatgcattttgaaacaatctactaacagatggtgctgaaatctattacctacatgttttctagttgttcagcattatgttaatgaagcctccatataaggagtgtttctctggcacagttggtaagttgactgctaacttcatttaaatgtgttactggatatgcagtatactgaaattattaatcagtttgtgtataggaaaagagaactgggttaaaagcaaattaacttgttctgaaaagaaagtatagattaattttgttttctgtttaaattttatctccttggtaaagatttttttttcctgggcagaaaacttggcatttttaggcgtagataccttaccttacaatgccaaaatgaatttaattccagtactcaggtttttccctttaacagactctatgtgtatcagggctttctaatgggtttttcctcttcgtttttaaaatgtgagtagcatttgaccaatttccagtgctcttagcattttacttaaagaacaaccactacaaaagaaaatctttgtaatttgattgtcttttgctttgcttcattaatgcctaagaacttaagaatactcctacctcattagctactcaagatgctgtgacgatcaaatctattctacataatgcgtttagaaacaaagacttgggtgaaaaatgaaataagtatattctgacttggctattgaggggaaaattcagtattaagtgttcctcacaggagatatgttagcagaatactataaaagtttgaaatttttaaaaagtaaaagtacttaaatttaggtatctctcctgaaattctttgcagttcattttttatggcagttaatccagtgaaacactcaaaagtttttttttttttaaaagtgtttttccagataaactgtagggtgaacattcacataatcacaaatatgtaattctgtaattgtggaatgcttgtatgctttgttttcgtacatcttccatggagatgtctgaatataatactccatctgtgaatattttaaatgttgaaataaaagtaagaaatgtgaaaaaaaaaaaaaaa

SEQ ID NO: 670 - DNA, 2718 bp, Homo sapiens
cagggtaacgctgtcttgtggacccgcacttcccacccgagacctctcactgagcccgagccgcgcgcgacatgagccacgggaagggaaccgacatgctcccggagatcgccgccgccgtgggcttcctctccagcctcctgaggacccggggctgcgtgagcgagcagaggcttaaggtcttcagcggggcgctccaggaggcactcacagagcactacaaacaccactggtttcccgaaaagccgtccaagggctccggctaccgctgcattcgcatcaaccacaagatggaccccatcatcagcagggtggccagccagatcggactcagccagccccagctgcaccagctgctgcccagcgagctgaccctgtgggtggacccctatgaggtgtcctaccgcattggggaggacggctccatctgcgtcttgtacgaggaggccccactggccgcctcctgtgggctcctcacctgcaagaaccaagtgctgctgggccggagcagcccctccaagaactacgtgatggcagtctccagctaggcccttccgcccccgccctgggcgccgccgtgctcatgctgccgtgacaacaggccaccacatacctcaacctggggaactgtatttttaaatgaagagctatttatatatattatttttttttaagaaaggaggaaaagaaaccaaaagttttttttaagaaaaaaaatccttcaagggagctgcttggaagtggcctccccaggtgcctttggagagaactgttgcgtgcttgagtctgtgagccagtgtctgcctataggagggggagctgttagggggtagacctagccaaggagaagtgggagacgtttggctagcaccccaggaagatgtgagagggagcaagcaaggttagcaactgtgaacagagaggtcgggatttgccctgggggaggaagagaggccaagttcagagctctctgtctcccccagccagacacctgcatccctggctcctctattactcaggggcattcatgcctggacttaaacaatactatgttatcttttcttttatttttctaatgaggtcctgggcagagagtgaaaaggcctctcctgattcctactgtcctaagctgcttttcttgaaatcatgacttgtttctaattctaccctcaggggcctgtagatgttgctttccagccaggaatctaaagctttgggttttctgaggggggggaggagggaactggaggttattggggttaggatggaagggaactctgcacaaaacctttgctttgctagtgctgctttgtgtgtatgtgtggcaaataatttgggggtgatttgcaatgaaattttgggacccaaagagtatccactggggatgttttttggccaaaactcttccttttggaaccacatgaaagtcttgatgctgctgccatgatccctttgagaggtggctcaaaagctacagggaactccaggtcctttattactgccttcttttcaaaagcacaactctcctctaaccctcccctcccccttcccttctggtcgggtcatagagctaccgtattttctaggacaagagttctcagtcactgtgcaatatgccccctgggtcccaggagggtctggaggaaaactggctatcagaacctcctgatgccctggtgggcttagggaaccatctctcctgctctccttgggatgatggctggctagtcagccttgcatgtattccttggctgaatgggagagtgccccatgttctgcaagactacttggtattcttgtagggccgacactaaataaaagccaaaccttgggcactgttttttctccctggtgctcagagcacctgtgggaaaggttgctgtctgtctcagtacaatccaaatttgtcgtagacttgtgcaatatatactgttgtgggttggagaaaagtggaaagctacactgggaagaaactcccttccttcaatttctcagtgacattgatgaggggtcctcaaaagacctcgagtttcccaaaccgaatcaccttaagaaggacagggctagggcatttggccaggatggccaccctcctgctgttgccccttagtgaggaatcttcaccccacttcctctacccccaggttctcctccccacagccagtcccctttcctggatttctaaactgctcaattttgactcaaaggtgctatttaccaaacactctccctacccattcctgccagctctgcctccttttcaactctccacattttgtattgccttcccagacctgcttccagtctttattgctttaaagttcactttgggcccacagacccaagagctaattttctggtttgtgggttgaaacaaagctgtgaatcactgcaggctgtgttcttgcatcttgtctgcaaacaggtccctgcctttttagaagcagcctcatggtctcatgcttaatcttgtctctcttctcttctttatgatgttcactttaaaaacaacaaaacccctgagctggactgttgagcaggcctgtctctcctattaagtaaaaataaatagtagtagtatgtttgtaagctattctgacagaaaagacaaaggttactaattgtatgatagtgtttttatatggaagaatgtacagcttatggacaaatgtacacctttttgttactttaataaaaatgtagtaggataaaaaaaaa

SEQ ID NO: 671 - DNA, 4215 bp, Homo sapiens
cgctatgcagagaaagcccccctggctcttctctctcaatccataatccagcgatgctgcagctgtaaaagcattaatagaaaatcaatccacaacctcgcggggcagcgatcgtcgagcgccgtttccaggctgccttccctggggtcgggagcggccccgctccccccgtggctggcgcggaatgtggtgatccgtcccggggcggggatgacttcatgcagccggagctccgcggcgggagcggaggctgctgctggcaggtggggcgcgggccggcgcgagctgaccgagcactcggcgggcgcggcgggactgcggcccgtggcggcgtgcgcggggacctgcgctgactaggtccggggaagtttcctgactttctgagaagccctggtttccccaaagaagtgatttctgatagaaatctgaaggtcatctccaagaaaaaagagatctagtatagtcaatgaattaaagacaagaaggtttccaatcagtccctgctatgtggatatttggtagcaatgactgatgtggaaactacatatgcagattttattgcttcaggaagaacaggtagaagaaatgcaatacatgatatcctggtttcctctgcaagtggcaacagcaatgaattagccttgaaattagcaggtcttgatatcaacaagacagaaggtgaagaagatgcacaacgaagttctacagaacaaagtggggaagcccagggagaagcagcaaaatctgaaagctaacaccccactttgaccctcgaccacacctgaaaatgtctcaaatctccaggagtatctggaatgcatttgtttccatgagtgaaaagaggaaaaagaaaatggctgtgctgcattgcaggaacctgctcattatcatgttaaaaatgagggcagaggctgtggctgcaggcagacttttccctacctctgtcattagcaatggttgaaatcatgtggcttgtgtttgggcgtcatttttgtatggatcctttcacttgatcatatgacgaaatgcttatagagagtagctccgacctagatgatgattcttcctgtagcatctggcccctcacaatgtcagaggatttaattgtgtctaattgcgaagggttgattgaaccccagagtttaaatatctctggctcaagtgttcacccagtaaaagaaagatccagaaagcactgtttttagcattacgtatctgtgtgttactgctgtgttatttacactgttttgtattgtacaatatatatgctcagcactgcccccttctctgattgcttatgaaaaacaaaatgatgtacattactgtgaatttttataccactcatttttaaaagggctgtcttttcattttagttttccatactgtggtggtgtacacaggatagaacacccttttttaaaacacagtctttccccttgctcattgtatgttgatgagttgattaagtctaacagattcatcaagactccattgctttattatagagacatttgaaaatatccattaatgtgaatatcacctgaattcagtctgtttggtgtctgcacagactggaattcaatctgtcaaatttgttttattctcaagtggagaacttctcccacataatatatatatatatatatattttaatttatgagaattttggacaattggaaaggtagaaaagaaaagccaagatcatactaaggactggaaatattttgttctatggaatcaaatttctcacaatgctgtatgatactatttaaatttggaggacaacttatcttcactaagctgaatcaggtggagaaagtaatctccttgcaatcatgtggacaccaatcacaaaagtaaagccctggtgttgtgttttcatgtcttttttcagccctctcagatccaaatgttattatgcactttttaatgtttgtaaacttttactaataattagtgtgaattgcattctgatacaataatgattatcattagaagctaacaaaattctcattaatactgtgtttgatggcctctgctgtgttttaacatcgtgcttcttatatggaaagtttttgtgagctgtgtaatccctctggtcagtattatgaaatcatttgtcagtggtaataaataaggaaccagtaatatgccaatggttcatgaattactggacaaatagcagacaatgggagtccctttacaataacgagcccacttagctgtccttgagggcttagataccttgccacgtgaagtaggtagagcagcatttcaataggtaatttgtgtggttgtgccagaaactcagcccttctatgtaattacatacaggataaaaggtaagtctgctcacttctccttctacagggcatttcaactgactggaataagggcatggttgcatttagtactcaatcagatattactagaaaaaaaattaataatgtgagcctttccgagagcagaacgaggaaagattaaattttagaatgcttccttctgtctaatccatcaggggccaaaatgcccagtaaaattcaaacacatcacctattaatagacttacaagtgagaaaagaggttcctagggttattttaggcaatccctggtaaactgtttaaaccatcaaacccctacagtcagttttcagtatcctcatttaatattttaataggtttcttgtgaatttaaacttctcttctttcttaaggttgtgaaattccaaactgattttatgtgattttgaaaagtttagaaccagtgctgagtctatgtggagggtttatattcctatgtgatatactgttattaatgcatgtggtgccatgcttgtctttaaatatataaatagtgctaaattgcaaagtcatatggagctttggatttagtttgacttcttactactgctttgtctgctatattcaaacccaaaggcattcccaagctagggagataaaaattaattttctaaaatgtccacatcctatacattttgcttattcatggcatctttcaaattttattttagtttcctttatttgccaagaatacatatggatttgaatttttaaggagagaaggaaagggtaggaaaccagggccttgggtttagtaacaggcattggatgtctattaaccaactattcttacgctaatggctttgcagctcctattctcccatttgatcctcaaacaattctattagagtggtatttttatccaatttcacagattaaaatataagcactcaataaaatataacctttagaagcttaaaaagctagtaagtgatgaactgaggatttgaacccatgtttgtcaccaaggagctttccagggcacatgtcataaaattagagccaactgcagagctgtaagggaacttttagagatgaacttcttcagcctccatattttacagaaggaaactgaatcccagaaggagaaattgccgttctcaaggctccctggatgggtaataacacagatatgagtaggtcacataaagtatatcttttttaaaaaaaagaaattcaattatgtcttatttggggggtatatttcccagaagatatttttctggcatgtggtctgtaaacacagcatgattcatattttttatgtttcatgctactcattttgtttaattaccaacaaacatggggactttggctttttgacttatttgcaacaagcatgaaattgttaaatttaccttttatcaattgtaatcatcctatgccaacatattatcataaattcatagaaatatttttaaaaataaataacagacattgaaatccaattcttagataatactcccagaacagccaatggtaaatgccctatacttgagtcttacttagatgctgtggtaatgcaccattttagaagatgaatgatactgctatttctcttcagggaaacaataatggataaagaaatgtaactgccgggcagcaaagcttctaagtgaaacctgtagtagcagtagtagtagggagaaaatgtgtagtcatcaagtgaaaataggaaaggatctatgatttatgatgtcttaatagaccctaaattgttctttaattacaagagtggcagtctctgaagtcatttgtgagcttgtatgacttttgtatttagcaatgttgcatgctcacataattgaaaattaaaagtaacacatttttctgaaatgtaaaaaaaaaaaaaaa

SEQ ID NO: 672 - DNA, 2077 bp, Homo sapiens
gcggcgggcggggcggcgctcggggctcggctggcctcggctcgcctcggctgcgctcggcaggctgcggtaaatccgggcttgcggccgctggcgtagtctgtggccgggtggtcgttgctgcgcgccccgagccccgagagccatgcagatgtcctacgccatccggtgcgccttctaccagctgctgctggccgcgctcatgctggtggcgatgctgcagctgctctacctgtcgctgctgtccggactgcacgggcaggaggagcaagaccaatattttgagttctttcccccgtccccacggtccgtggaccaggtcaaggcgcagctccgcaccgcgctggcctctggaggcgtcctggacgctagcggcgattaccgcgtctacaggggcctgctgaagaccaccatggaccccaacgatgtgatcctggccacgcacgccagcgtggacaacctgctgcacctgtcgggtctgctggagcgctgggagggcccgctgtccgtgtcggtgttcgcggccaccaaggaggaggcgcagctggccacggtgctggcctacgcgctgagcagccactgccccgacatgcgcgccagggtcgccatgcacctcgtgtgcccctcgcgttacgaggcagccgtgcccgacccccgggagccgggggagtttgccctgctgcggtcctgccaggaggtctttgacaagctagccagggtggcccagcccgggattaattatgcgctgggcaccaatgtctcctaccccaataacctgctgaggaatctggctcgtgagggggccaactatgccctggtgatcgatgtggacatggtgcccagcgaggggctgtggagaggcctgcgggaaatgctggatcagagcaaccagtggggaggcaccgcgctggtggtgcctgccttcgaaatccgaagagcccgccgcatgcccatgaacaaaaacgagctggtgcagctctaccaggttggcgaggtgcggcccttctattatgggttgtgcaccccctgccaggcacccaccaactattcccgctgggtcaacctgccggaagagagcttgctgcggcccgcctacgtggtaccttggcaggacccctgggagccattctacgtggcaggaggcaaggtgcccaccttcgacgagcgctttcggcagtacggcttcaaccgaatcagccaggcctgcgagctgcatgtggcggggtttgattttgaggtcctgaacgaaggtttcttggttcataagggcttcaaagaagcgttgaagttccatccccaaaaggaggctgaaaatcagcacaataagatcctatatcgccagttcaaacaggagttgaaggccaagtaccccaactctccccgacgctgctgagcccttccctcccctaatctgagaagtcagcctcttggctcctcaggccaccatttaggcctgactggggtaagaaatgtcgctccactttacagaggtagctgtggtgttgaaacactggacttggatatggggtgctgggatcgattcctagctttaccactaactagctgtgtggccttgagtaaatcccgttacctctctgagcctcggttaccctgtctgtaaaaagggaggtgagaatacctacctcacggaactgttgggaggctcagatgagatgctatatgtgaaaacattctgtaagcttcgtacaaatgtgaagtattaatattatcgcagtattattgttgttattattattgttattattaacaatcttgggtgggtagtaggagagcaaaaagtatgaatgggatggagctaagaagtctgaatacttaatgaaatggactttttggaaagaaatcagatgaaggcataaaatttagttcttagctcttgaacagaagcctaaaattcctggttctctcagggcttcgccttcaagggttctggaggagggaagggtctgcaggttccatgggtgacagcctgagatctgtcccttcaacgggctgggctgggtatgtgcctaccgatgacaatgtgtaaataaatgcgtgttcacacccacaaaaaaaa

SEQ ID NO: 673 - DNA, 4268 bp, Homo sapiens
gatacggcgcaccatatatatatcgcggggcgcagactcgcgctccggcagtggtgctgggagtgtcgtggacgccgtgccgttactcgtagtcaggcggcggcgcaggcggcggcggcggcatagcgcacagcgcgccttagcagcagcagcagcagcagcggcatcggaggtacccccgccgtcgcagcccccgcgctggtgcagccaccctcgctccctctgctcttcctcccttcgctcgcaccatggctgatcagctgaccgaagaacagattgctgaattcaaggaagccttctccctatttgataaagatggcgatggcaccatcacaacaaaggaacttggaactgtcatgaggtcactgggtcagaacccaacagaagctgaattgcaggatatgatcaatgaagtggatgctgatggtaatggcaccattgacttccccgaatttttgactatgatggctagaaaaatgaaagatacagatagtgaagaagaaatccgtgaggcattccgagtctttgacaaggatggcaatggttatatcagtgcagcagaactacgtcacgtcatgacaaacttaggagaaaaactaacagatgaagaagtagatgaaatgatcagagaagcagatattgatggagacggacaagtcaactatgaagaattcgtacagatgatgactgcaaaatgaagacctactttcaactcctttttcccccctctagaagaatcaaattgaatcttttacttacctcttgcaaaaaaaagaaaaaagaaaaaagttcatttattcattctgtttctatatagcaaaactgaatgtcaaaagtaccttctgtccacacacacaaaatctgcatgtattggttggtggtcctgtcccctaaagatcaagctacacatcagttttacaatataaatacttgtactaccttaatgataaggactccttaaagttccatttgctaatgattaatacactgtttgggctggccagtttttcatgcatgcagcttgacgattgagcacagtcaggcctttgtattaaaaatgaaaaatgaaaaaacaaattcaaaacctattcaaatgggttctagttcaatttgtttagtataaattgtcatagctggtttactgaaaacaaacacatttaaaattggtttacctcaggatgacgtgcagaaaaatgggtgaaggataaaccgttgagacgtggccccactggtaggatggtcctcttgtacttcgtgtgctccgacccatggtgacgatgacacaccctggtggcatgcccgtgtatgttggtttagcgttgtctgcattgttctagagtgaaacaggtgtcaggctgtcactgttcacacaaatttttaataagaaacatttaccaagggagcatctttggactctctgtttttaaaaccttctgaaccatgacttggagccggcagagtaggctgtggctgtggacttcagcacaaccatcaacattgctgttcaaagaaattacagtttacgtccattccaagttgtaaatgctagtctttttttttttttttccaataaaaagaccattaacttaaagtggtgttaaatgctttgtaaagctgagatctaaatggggacaaggcaggtggaggggaggccagtgtacatgtaaatgcccacagcccagcattgggtttccctcccaaggccccagcaccaacctctgagcccaagaccttgcctgaaaacaagcagataccgattgcttcatcctatttatggacatgtaggtctagttgcattttcactggggggaggggggaaggtgaattatggtaacttttaatgatctattcaggcagtagagctcttaaggaaaaaaaaaaacccactttctctcaagcatgtatttaggggttgttctcaattgtgctgctgattacctgtcttatgtaactacttgagaccatctgcaagagacatgatttagtgtgtctgtaattcaatcttcgctgtgtgtggtagaagcagtagtcacttttgtaagccagtctcttcatgcctaaaagacactaccagtcacctttgattcgcgacttttaatttatgattatacttagcctcctcctcctttttttttttttcccaagttgacttgactttgcttttttccccccaagtagaactaatgctagcttccagcttgaaagtaaaactccagtgtggagtgaattttgtgtctaattataaacctgtaaccaaaactcagacatctggtactggtctttgcattgagattggtccctgtaaaaccccctttaaaagcatattgcatttagtacagagctcttttttgaaatgaaggctggagatgtgcatttttcacggtgttaactggttgtatcttattagcaaggagattggggttttgagtgtttgcgtgggtggtttcaatttgccagggaacagtggcaggctgctagcaaggcagtgagaagctcttggcagccaaatgggtgcattcagggctgatttatagagacccttggcttctccttctcctactccctgtctttctggcattttgtagcttgttagattttctgccagaggggtgggtcagagcagtggaggggagacatcgcccatgtgcttctgctactggtccttgggctgggtggttggtagaggagatgttgacactatgagctaagggttggcttttgtaattacctgaatctgaaaggaatgcctaaggttaccttggggtttctcttctggtgagatagggttcctggtttgagtaagttaatgtcctggatatttcttgtggcagggggtggtcaaagagcctgattgctgacccagtctcaggcctgtggtcgatgacctctcggtagtttcaaagggggctggagggggatatttgacttgttttttcgaaatgtagccttctaaccctcaagtctttagaagctgggtggactcttagtggtcctgcagcgtatcctaaaagactacctttgaaacaggattcttgtatggccaggatcctgtctgggaaccagaaaccctacaccctccccctccagggaatgctgagttccagttttgagcagaggtgaggcagaatccactgtagccttccgccctggtatttggggggatgaccagcccaggcgttgggtgttagtctgcatgagtttgtgagaggaaatagctgggtgtcctggcagtgcccttgaagttggttaggaccttcctgtaaactcttgcccctacttctaactactctataaatatatacatatatttatatataaagtgattagttgaactggcatcctgctttagcctgagacttgccataagaaactgctgagtacttggcaaaccctttcatagttttgttctccatctgtttggggtaggtgttgagcgaggcaaatggatctcgatatttcagatgggcttttgatgcactgttgccaaggaaggctttttctgattttttgacaaatgaatttttgcacactttcattggtgtctttcggcaacttacacacattgaaaatgagctattgtacatatttttatattctctttataaatgcatgtctgattgtacttgtaacaatattgtaatgaacggctgtgcagtaggcccagcgctgctgtgtctcgtcagaggaatagcttaccacgaacccctcagcatactgggaatctcttcctgaacaacgaatgtaaatttggtcaagtctactcttccgttcattcaattattttaagcatttgaattatttattgtatatcctaaatatatttctcctttggcagtgactagatttccactaatgtgtcttaatctatccctccagctggcagttactgtttttttaatcccctgaagttgtcctgtaggagacagaaattctttgctgtctgtatcccttggagtaagaaggtagtggcatgggtggagtgtgtgttctttctccaaatctattatgatgtttattaaacacttctgtagcaaagatggtggtagttcttttgttactgaagttgcccttcaccatggctatttgaaaaggagatgtacttggacgtttctgtaaatcttgagataaactgtttggagatttaaccacctctctgatgggggaccaactctatggaaattgtaaatacgttttatttataaacctggcactgtattcaataaacatttctgcagcctttcatctctaactgcgaaaaaaaaaaaaaa

SEQ ID NO: 674 - DNA, 4071 bp, Homo sapiens
tgattcgagcgggaagaggggggtgggtgggatcggtgggggagaccatgacctccagctacgggcacgttctggagcggcaaccggcgctgggcggccgcttggacagcccgggcaacctcgacaccctgcaggcgaaaaagaacttctccgtcagtcacctgctagacctggaggaagccggggacatggtggcggcacaggcggatgagaacgtgggcgaggctggccggagcctgctggagtcgccgggactcaccagcggcagcgacaccccgcagcaggacaatgaccagctgaactcagaagaaaaaaagaagagaaagcagcgaaggaataggacaaccttcaatagcagccagctgcaggctttggagcgtgtctttgagcggacacactatcctgatgcttttgtgcgagaagaccttgcccgccgggtgaacctcaccgaggcgagagtgcaggtgtggtttcagaaccgaagagccaagttccgcaggaatgagagagccatgctagccaataaaaacgcttccctcctcaaatcctactcaggagacgtgactgctgtggagcagcccatcgtacctcgtcctgctccgagacccaccgattatctctcctgggggacagcgtctccgtacagatcctcgtccctcccaagatgttgtttacacgaggggcttcataacggattctaacggaagacactgaaaagcgccatggctacttattctgccacatgtgccaacaatagccctgcacagggcatcaacatggccaacagcattgccaacctgagactgaaggccaaggaatatagtttacagaggaaccaggtgccaacagtcaactgaggaaaaaaaataattaaacaggcctaagaagaaatcaaaaaccataagacacctatcctgctctgttatttcttcatctgctggggggaaaaagtaaattacaaacaaacaaacaaagcagaactaaaatattgggaccatggcagagaaaagcaggagaggagcaaaatgaaaattagttaacaaatgttcctcctccctctgggataccaccaccacttgtttctgtgtgtgtttattttgtttttctttcattcatgctttgcttaatgtactccaggcttcttcagataggttcagcccacccacccccatgattgtatgaagttttaaaaaaaactacagcagccaaagaaactatatatatatatatatatatatatatccagaatgattgcctctactgtcctcattgacttgtttgaaccttagtgccttaccctgtcctcttcccagttctctttatagaagctctaggagctttcgaaaagccaaagtctttctgaagaatctgtgctggacagacataattccctttctcattgtctccatctttgttggtcatggtaaggtttttccatcagcctctgaaaaaatagttgtgcacaacatctgctcactggactgtctgatccaatgtaattggctgcgtctggctaattctaagcactaaagtctacatctaagctatagatttaagcttgaagctacagattatatcactatcaccaccacccctcaccctatgcaatcaatcaatcaatcatcttaagttaaagatatttgttgtctttgaatgatttgctgtcacagactatttggtagaagaaatatttttcacctgagagaggaagagaaatttctctagtaacacaaagagtgagttctaaaaggcatgcccacatctctttcgtgccttaaggatagtgagatgcacacttatatatatactgtatatatttatatatttatatatatatttcatatatatatataatattgcaagcttaagtttgcaatttcccaaacaatacaaaaagcaaattacacaccctcaccactgttcttatctctatagtgatgaaacattaattagggatcttgctgcttttctttttctacacgaagttttcattaaagccacagaataattgatagggcagctgtttgagaacaggtcccattttcacattagggctttaaatgaattagaaactatttgaggctataaaaatgtccttgagtttggagcctgagctctggtgaaatgctgatacatctgatctatcatgggaattgcagttagagagagtaaggaataccatttagtcatctatccgttcttcacttagcaggaatatgaaagaaaggcacatgtttaagaggaatacctaaaggtttttctaaattccaacatttaaaaggcaattgtgggctatttttattttttaatattttgaaataaagtttagtgtctagggctgggagccaggactgatcttccatttctttttctttgttcccagccatgcttttgtaacttgccaggtggacttgaccaactacattaccatgctgtgcctcagtttacccatttgtaaaatgggattaataatacttacctacctcacaggggtgttgtgaggctctattcatttgctcctttattctttcctgtattctctgtatgtccagcactttgtagccatgggaggaaagggactataaaagtgtacaatgttaatggaatgatacggtacctgaaagccttgttttctagtaagaaaatgctaccttgctgtacatacttataaccttgtatttggaaatgagaaataggtttatattttcagatctctcaaaaatcacatcatttgaccaaagaataatttaagacacatagaacagatttttttaatttatattttcatcctgaccagcttagttctaataatttttagttgtgagtgattaaaaaactttggatcaattttggtcaaacatgccaactttgtagtctgagtgacaggcaaggatttttgggtttaagatgcacttttagcacacatttgtatttcccttggcatatcagattgagctaatggtgatgttatttcaatctaacagccaccaatctgaaattgtatttcaaatgttgattctgtagttctttaaataataatgaagctcatcttatacattttgctttcaccaattgattccttcttcttttagcccactattaaaacatttcttactgaatggttcatgtaggcttgctgaacagcacgcattacttgcttcctgaagagttcccccattcatccatttgtcccattagttgctgtggattatcaagttttgaaggaactgtacatcccaacagactgaaacattctaagtgaaatgagtataatccaagtaactggtgaactttggaggtttggagcttgaagagaatggctaagaagatttgaattatagggagggaacagaaatcatacatgaaaaggttttactgagaaggggaaaaccttagatagagggacatgtgaaacaaaatcatttgaaattttgattcagacatccatttccagtggcaaacagcaaagcctgaacccataaacccaaatgataggtgaagttgggtggttttatccaatgtctcaagcaagcaatgtctgggaatatcatagagtaacaagtgctggtcagccaaagaaacattcactgctggtgaaccaataccataagcatgtattatctaagcacttgatcaagaaatatacatgttgtacaagctctcaattttgttcatttattatcaaatttttaaaatacaagtttggtatgtgatttggaaaagatgccttctggatcttaagccagttgtcagtggaggtcctcagggctgcaaatgtcaagacataaccctgttcctcaccatcatgataccagatacaggtgaatacataggaactatctgcctgtgtcctcaatctcccttcaaacaagatgctgatttgtagggtacttggcaggttaaattaaaccagaagaggtgacttaataaaaaagggaatgacatttagggtataaagatctcataagaaatgtaatatgtaaattatatcttgctttatgttgtaaaatatacattgtttgcgctagaatagaaatgatttcttttcaataaaaagaaagaaggactcta

SEQ ID NO: 675 - DNA, 1176 bp, Homo sapiens
aatagtgattaggaaaccttgaagcctgcccaacgatcgtgggcaggaggtggtttctggtttgttggggcgtgtgtatgtgtatttggggggactgaagggtacgtggggcgaaacaaaaccggccatggcagcagcggaggaggaggacgggggccccgaagggccaaatcgcgagcggggcggggcgggcgcgaccttcgaatgtaatatatgtttggagactgctcgggaagctgtggtcagtgtgtgtggccacctgtactgttggccatgtcttcatcagtggctggagacacggccagaacggcaagagtgtccagtatgtaaagctgggatcagcagagagaaggttgtcccgctttatgggcgagggagccagaagccccaggatcccagattaaaaactccaccccgcccccagggccagagaccagctccggagagcagagggggattccagccatttggtgataccgggggcttccacttctcatttggtgttggtgcttttccctttggctttttcaccaccgtcttcaatgcccatgagcctttccgccggggtacaggtgtggatctgggacagggtcacccagcctccagctggcaggattccctcttcctgtttctcgccatcttcttctttttttggctgctcagtatttgagctatgtctgcttcctgcccacctccagccagagaagaatcagtattgagggtccctgctgacccttccgtactcctggacccccttgacccctctatttctgttggctaaggccagccctggacattgtccaggaaggcctggggaggaggagtgaagtctgtgcatagatgggagagccttctgctcagaggctcactcagtaacgttgtttaattctctgccctggggaaggaggatggattgagagaatgtctttctcctctcctaagtctttgctttccctgatttcttgatttgatcttcaaaggtgggcaaagttccctctgactcttcccccactccccatcttactgatttaatttaatttttcactccccagagtctaatatggattctgactcttaagtgcttccgccccctcactacctcctttaatacaaattcaataaaaaaggtgaaatataaaaaaaaaaaaaaaaaaaaaaaaaaaaaaaaaaaaaaaa

SEQ ID NO: 676 - DNA, 6311 bp, Homo sapiens
cagcccgcgccgggggcttctgggaaaaggcttgtgaacggcgtttctgcgtctgccgtggacagcgaagctgctgcggttcctgagccggaggtttgcgccggagtgcctgtgaagaaaacggggtattgccctgaggcttatattctgcctcagttgtcttttcttgaaatattataaatcagaatgtctgcacagtcagtggaagaagattcaatacttatcatcccaactccagatgaagaggaaaaaattctgagagtgaagttggaggaggatcctgatggcgaagagggatcaagtatcccctggaaccatctcccagacccagagattttccgacagcgattcaggcagtttggataccaggattcacctgggccccgtgaggctgtgagccagctccgagaactttgccgtctgtggctcaggccagagacgcacacaaaagaacaaatcttggagctggtagtgctggagcagtttgttgccatcctacccaaagagctacagacttgggttcgagatcatcatccagagaatggagaggaggcagtgacagtgctggaggatttggagagtgaacttgatgaccctggacaaccggtttctctccgtcgacgaaaacgggaagtactagtagaagacatggtatctcaagaagaagctcagggattaccaagttctgagcttgatgctgtggagaaccagctcaagtgggcatcctgggagctccattccctaaggcactgtgatgatgatggtaggactgaaaatggagcactagctccaaagcaggagcttccttcagcattagaatcccatgaagttcctggcactctcaatatgggtgttcctcaaatttttaaatatggagaaacctgtttccccaagggcaggtttgaaagaaagagaaatccctctcgaaagaaacaacatatatgtgatgaatgtggaaaacacttcagtcagggctcagcccttattcttcatcaaagaattcacagtggggagaaaccttatggatgtgttgagtgtgggaaagcattcagccgaagttccattcttgtgcaacaccagagagtccacactggagaaaaaccttacaaatgtcttgaatgtgggaaagcctttagccagaattcggggcttattaatcatcagagaatccatactggggagaaaccttatgaatgcgttcagtgtgggaaatcgtatagtcaaagctcaaatctttttagacatcagagaagacacaatgcagaaaaacttctgaatgttgtgaaagtttaagaaattgaaaaaaaaaaaagaatcagcactcaggtctttttcttcagaaatgaagacaaaatttaaaatatgaaatgatgcagaatagttttttccctattgactgtcagaaaatccactgggaaatgtaaaaatcttcactcaccattatgatatttatcttgaaagaaatggtgtcatacctgcctagaaactgaaattttaaacttaattcaggtcttaatgcctaaattttccatgtgatgtttatagtctgtattacttctccaaataatgaactacctgattcattgtccctttcttgaaagtttcttttttaagacaaatacattatttctgcattgatcattgaaatgttctttatatggatacattcccttatatattaaaaggcaacaggaattacaaagtctgaaaaccattttaaaccatcttttaaaaatttacccttatttccttttacctaatttgaatatgcatttgagaaaataagaggataaaggatggctaagagcctcaaaatgaaccataagatctcagataagaagtgatggtgataaaacatcaaaaagtgaatggaacaccttgattggggaagatatgcaaatactttgatctaagaattgaaatgtatcaagaatttatattttgcctgcaggaaaattcaaaagctactcatcctctctataatttggagtcatcttactaatgaaaataatgttttcccatatattattaaaaagcatacagtctaaataataaacagttgtaaaataatgaaggtagaaattataacactagggaaaaatttgtagcggatggcagtgttgaaggcaaatgtaaacataagggtaatggtctgtcatggcttttagaaaaagatgatagagttcatcattattttgccttcatctttgttaaggacagaaaattccctgacaggtgggcaagtatcaggttacctattttttattcctttggtacaaaagggttgaacgtcaggctaaaaaagcagccatgcatttattattaaacattttctaccgacaaggcactgtgctaggtactgtaatcctaccataagtaggtaggtatttcttccactgtaaatcataggggtttgctgttttatgtgagttagcctcttccccttgtctgagcattcctcaggggaggtcacctgtgaggttcccagaactgtagttttttttaccagggtgttgtatttggagggggaggaggactcggctcaaaagagctagctggctctccagtgttcagaggtgagtccacgatactcttaccacaatttggaagtttgtgaatctttttaaagaactaatcaatctctaatagcattgaggttgtacctacatattaagttgaatggactgttctatttaaaaaataaacaactagacaattaactagtttattaacctatcacaattgaatttttttttaattttcagtcttaacacattttttaaaatgtattaaagtaatacattgtagtagtaggattatatactccttggctgagaattccaagtactgtggttctactgtttagtggaaaactctggaagttaaaatatagaatatgagaggaggcttttttataatgggcatcattgtgtggaaaatgacccatgtgaatacaaatatttcctagttcagagattttggttatatctggtgcttggatcaagtttaaaaatggaaggtgagattttgcatgagcctattaaaaagcatagtaataaatgcaaggccagctggtggaaaagtgaggcagaatggagcttgtttataggttttctgataacaattataaaaaatgtgctttatagattaagatttattgaagtataaatatgtagtaatgatataatgtattttaagttatacaagaaaatgtagggacttttgtttgggtctttttctctttgtggctgaggggaaacaagtcagtgtccaataaagctgtaaactcctctgctctaagataaatgatgtgatttatttatttataactggcttctttccaagtaggttttcaggtggcatatttggaagacggctggaatgacagaattcttgtatcagagtaggtaagaagggagcaacctctcaatggctattatgtcatgctttttaagatcgtatgcggttcctatatacaaggaagcttccctgtggtagatttgtcataaatgccaaagatatttggtaatgtgagtgtagaaaaagtagtatgagggttggcaaatactgtttttgtcttggcagctctaatatctgcattgttcagaaaggattctgaggctaaggcaaagctctgtgggaaaaagggactggaccaaaaaaaactggatggtggcacacaagaagaggaaatgatgagatgtgtactttctatctctggttaggcttagtccccactagacaaattgattttaaatactatgtagtgatttttaaattccatccacacattcattacccacacagataatcatagaaatttgggggagtgcctagcttctgatgaagtggtgatatggcagtgccaagcagtggcatcgccagagtatctgtttggttagcaaatgagcagtcattttaggtcatgcagattgctgatatctgcccagtagccactgagcatttgctggttttttcttctggctttcttggaggttaagctctctgtagtcatacccagttggtacttgatctttagcaatatgtctcatattcatgtaaattgaagggagggttacatgtactgaaataatctgcatgctaggcattggcttagacaccgtacctatctcacttagatttgtggactaggaaagcaagattcagagatcatgtgacttgcatgtggcctagagataaaattcaaatctggttctgtagactccagggacatattcaccatgccatgggtggtggctattaaaccttgataaatttgtgtttatggttaacaaatgtgaaagctattaaacattgctggtttgaattttttacagtgcagaaatgtaaaatgaaaaaggatatttcctttcacagtgttaccgagaagtcatgataatttcgtttgttcttccagatttaggcatatacttatttaatcaataatgtgttaacagctgacacctgtggttgctgtgacaggcactatttgaagtgctttatcatggattaactcttaatcctcagctaccgtataaagtaggacataaccccatttcacatgcactacactgagacttgcctcctctccccccacattgaagatgttcttttttcataactatatactattccattgcatgaatattctgtaatttatttaatcccctatggattgataattaggttcattatagatagaagtgtaattaacattcctgtacatgtattttgctacttgtgtgggtatttctgtaggatgaataactagaaatttattggatcaggtttcacatttgcagttttgaaaactactaccaaaaagatttcaccaatttacaactccatcattagtaagaatgcctgtttgcctatagtctgccaaccctgaatccttaaaaatttttgccaatctggtaggcaaaatttctttcttttctttgaatattaatgaggaggaacatcttttcatgtttcttggccatttgcatttcctattatgaattgcttttgcccattttcctttttttaattatgaaagtctaatgactaccttctcattgtataaaaaacacagttctttgaatagagagacccttttctccaatgctaccaatcacattccacttaccacagtttaacatacatcctctagtcacctttccgtacgaatatacatacacataaaaacactttttacataaataggatctcatattctgtagctttttaaaattttggtctcaaaaaaagataacaggtctttaaatttctttaatggttgaatatgattaaatactatgaaaatgccattatttattcccttaatttttttcctctcgctattacattgccaaagtaaacatcctattcagatgtctttgtgcatgtgtgtgaatatttctttagtctggagtccagtaaggtggatttttggatcaaagggtttgttctctgtccaccttcagtcttcccaaaggccttcataactgtattttcaccaagtgtatggagaatgttcatttccccatataaccatacctacacttgatagtttttatctgttgggcgaaaaagaaccttttcttattttgcatttccctgattataaaaaaaaatggtgagattggggttattttcatgtttattggccatttatagtttactgtggattgtttgtatcccttacctgctttctattgggttatgtgtggatatattgtttttatttgttcagcatctccttccccatcttctggtaacacaacctttatttatttgtggggaacctattccctgtggcttaggtgagcatgtgaccaggcctggcctcctgagtcccacagcttcctagccacagtgataaaagaatgggtatataacttaagccaggctaaggaaagcccttaacagaacttctgctggaactactggaaagaaggctttatggagatcccaggaaccaaggaccatgtaagcctgaatttgtgccatgtggagagagtctgtctgaggagaaactcggatgctagcagaaatggaaagagaactaagttctgatgtcatttttctggaggccctagatccagctgtgcctaaagcctgccctacctccggactttaaagttttgtgagccaataaagtccctttcttgtttaagataattgaattgagtttctgttctgattaatataggttatttgtattttcttattgatttgtagaaaacctttgtaattttaaattctagactttatgcactatataagttaataaaattagcatggccttccatgatttggcctgtgtc

SEQ ID NO: 677 - DNA, 4670 bp, Homo sapiens
gcactcgctggaaagcggctccgagccaggggctattgcaaagccagggtgcgctaccggacggagaggggagagccctgagcagagtgagcaacatcgcagccaaggcggaggccgaagaggggcgccaggcaccaatctccgcgttgcctcagccccggaggcgccccagagcgcttcttgtcccagcagagccactctgcctgcgcctgcctctcagtgtctccaactttgcgctggaagaaaaacttcccgcgcgccggcagaactgcagcgcctccttttagtgactccgggagcttcggctgtagccggctctgcgcgcccttccaacgaataatagaaattgttaattttaacaatccagagcaggccaacgaggctttgctctcccgacccgaactaaaggtccctcgctccgtgcgctgctacgagcggtgtctcctggggctccaatgcagcgagctgtgcccgaggggttcggaaggcgcaagctgggcagcgacatggggaacgcggagcgggctccggggtctcggagctttgggcccgtacccacgctgctgctgctcgccgcggcgctactggccgtgtcggacgcactcgggcgcccctccgaggaggacgaggagctagtggtgccggagctggagcgcgccccgggacacgggaccacgcgcctccgcctgcacgcctttgaccagcagctggatctggagctgcggcccgacagcagctttttggcgcccggcttcacgctccagaacgtggggcgcaaatccgggtccgagacgccgcttccggaaaccgacctggcgcactgcttctactccggcaccgtgaatggcgatcccagctcggctgccgccctcagcctctgcgagggcgtgcgcggcgccttctacctgctgggggaggcgtatttcatccagccgctgcccgccgccagcgagcgcctcgccaccgccgccccaggggagaagccgccggcaccactacagttccacctcctgcggcggaatcggcagggcgacgtcggcggcacgtgcggggtcgtggacgacgagccccggccgactgggaaagcggagaccgaagacgaggacgaagggactgagggcgaggacgaaggggctcagtggtcgccgcaggacccggcactgcaaggcgtaggacagcccacaggaactggaagcataagaaagaagcgatttgtgtccagtcaccgctatgtggaaaccatgcttgtggcagaccagtcgatggcagaattccacggcagtggtctaaagcattaccttctcacgttgttttcggtggcagccagattgtacaaacaccccagcattcgtaattcagttagcctggtggtggtgaagatcttggtcatccacgatgaacagaaggggccggaagtgacctccaatgctgccctcactctgcggaacttttgcaactggcagaagcagcacaacccacccagtgaccgggatgcagagcactatgacacagcaattcttttcaccagacaggacttgtgtgggtcccagacatgtgatactcttgggatggctgatgttggaactgtgtgtgatccgagcagaagctgctccgtcatagaagatgatggtttacaagctgccttcaccacagcccatgaattaggccacgtgtttaacatgccacatgatgatgcaaagcagtgtgccagccttaatggtgtgaaccaggattcccacatgatggcgtcaatgctttccaacctggaccacagccagccttggtctccttgcagtgcctacatgattacatcatttctggataatggtcatggggaatgtttgatggacaagcctcagaatcccatacagctcccaggcgatctccctggcacctcgtacgatgccaaccggcagtgccagtttacatttggggaggactccaaacactgccccgatgcagccagcacatgtagcaccttgtggtgtaccggcacctctggtggggtgctggtgtgtcaaaccaaacacttcccgtgggcggatggcaccagctgtggagaagggaaatggtgtatcaacggcaagtgtgtgaacaaaaccgacagaaagcattttgatacgccttttcatggaagctggggaatgtgggggccttggggagactgttcgagaacgtgcggtggaggagtccagtacacgatgagggaatgtgacaacccagtcccaaagaatggagggaagtactgtgaaggcaaacgagtgcgctacagatcctgtaaccttgaggactgtccagacaataatggaaaaacctttagagaggaacaatgtgaagcacacaacgagttttcaaaagcttcctttgggagtgggcctgcggtggaatggattcccaagtacgctggcgtctcaccaaaggacaggtgcaagctcatctgccaagccaaaggcattggctacttcttcgttttgcagcccaaggttgtagatggtactccatgtagcccagattccacctctgtctgtgtgcaaggacagtgtgtaaaagctggttgtgatcgcatcatagactccaaaaagaagtttgataaatgtggtgtttgcgggggaaatggatctacttgtaaaaaaatatcaggatcagttactagtgcaaaacctggatatcatgatatcatcacaattccaactggagccaccaacatcgaagtgaaacagcggaaccagaggggatccaggaacaatggcagctttcttgccatcaaagctgctgatggcacatatattcttaatggtgactacactttgtccaccttagagcaagacattatgtacaaaggtgttgtcttgaggtacagcggctcctctgcggcattggaaagaattcgcagctttagccctctcaaagagcccttgaccatccaggttcttactgtgggcaatgcccttcgacctaaaattaaatacacctacttcgtaaagaagaagaaggaatctttcaatgctatccccactttttcagcatgggtcattgaagagtggggcgaatgttctaagtcatgtgaattgggttggcagagaagactggtagaatgccgagacattaatggacagcctgcttccgagtgtgcaaaggaagtgaagccagccagcaccagaccttgtgcagaccatccctgcccccagtggcagctgggggagtggtcatcatgttctaagacctgtgggaagggttacaaaaaaagaagcttgaagtgtctgtcccatgatggaggggtgttatctcatgagagctgtgatcctttaaagaaacctaaacatttcatagacttttgcacaatggcagaatgcagttaagtggtttaagtggtgttagctttgagggcaaggcaaagtgaggaagggctggtgcagggaaagcaagaaggctggagggatccagcgtatcttgccagtaaccagtgaggtgtatcagtaaggtgggattatgggggtagatagaaaaggagttgaatcatcagagtaaactgccagttgcaaatttgataggatagttagtgaggattattaacctctgagcagtgatatagcataataaagccccgggcattattattattatttcttttgttacatctattacaagtttagaaaaaacaaagcaattgtcaaaaaaagttagaactattacaacccctgtttcctggtacttatcaaatacttagtatcatgggggttgggaaatgaaaagtaggagaaaagtgagattttactaagacctgttttactttacctcactaacaatggggggagaaaggagtacaaataggatctttgaccagcactgtttatggctgctatggtttcagagaatgtttatacattatttctaccgagaattaaaacttcagattgttcaacatgagagaaaggctcagcaacgtgaaataacgcaaatggcttcctctttccttttttggaccatctcagtctttatttgtgtaattcattttgaggaaaaaacaactccatgtatttattcaagtgcattaaagtctacaatggaaaaaaagcagtgaagcattagatgctggtaaaagctagaggagacacaatgagcttagtacctccaacttcctttctttcctaccatgtaaccctgctttgggaatatggatgtaaagaagtaacttgtgtctcatgaaaatcagtacaatcacacaaggaggatgaaacgccggaacaaaaatgaggtgtgtagaacagggtcccacaggtttggggacattgagatcacttgtcttgtggtggggaggctgctgaggggtagcaggtccatctccagcagctggtccaacagtcgtatcctggtgaatgtctgttcagctcttctgtgagaatatgattttttccatatgtatatagtaaaatatgttactataaattacatgtactttataagtattggtttgggtgttccttccaagaaggactatagttagtaataaatgcctataataacatatttatttttatacatttatttctaatgaaaaaaacttttaaattatatcgcttttgtggaagtgcatataaaatagagtatttatacaatatatgttactagaaataaaagaacacttttggaaaaaaaaaaaaaaaaaaaaa

SEQ ID NO: 678 - DNA, 4338 bp, Homo sapiens
agtattctcggctcggccattattctgtgcctcggctgccggaagggctcgttcctgtgtcatctcctagcggcctggcgccgaggcggcggtacgcaaggctggagccgcagcgggagcccccgatgatactctccaagctgtaaggaagaagtcaaggattaaggagacctggactggagaggagcctttttcaaaaaacaacaatgacaagagaaaatgtagcccacaatgctctgagacaagagggccttgtgaaggggaaggatgatacctggaaatggggaaccagcttccaaggaagtagctcctctgtttgggagacctcccacctacactttagacaattacgttaccatgagacatctggaccccaggaagccctgagccggctcagggaactctgtcgccggtggctgagaccagaagcacgcaccaaggcacagatcctggagctgctggtgctggagcagtttctgagcatcctgcctggggagattcggacctgggtacagctccatcaccctggaagtggcgaggaggctgtggccctggtagaggagctgcagaaagaccttgatggaccagcaatacaagttccagtccttgtcaaggatcaggacactctccagaaggtggtgagtgccccaggaacaacacttcctcctgtacttcctggcagccacatagcagctgaaatttgcccgcatcctcctactgacctagtggcattcaacctccaggatcctcagcatgattctcctgcccctgaagcttctgccctttcccaggaagagaacccaagaaatcaattaatggcacttatgctcctaacagcccagccccaggagttggtgatgttcgaggaggtgtcagtatgcttcacttcagaggaatgggcatgtctgggcccaatccagagggccttgtactgggatgtgatgctggagaattatggaaatgtgacctccctagaatgggagaccatgaccgagaatgaggaggtgacatcaaagccaagtagttctcaaagagcagactctcataaaggaacatcaaaaagacttcaaggaagtgttccccaggtccttgattttgaagaagagtgtgaatggcaagttttggcaagtcagtggggaaatgaaacagatgaaagggcagatacagtgaagaaagtttccctttgtgaacgagacaagaagaaaaggactccaccagagaaacaaggccaaaagtggaaggaattaggagacagcttgactttcggttcagctatttctgaaagtttaataggtactgaaggaaagaagttttataaatgtgatatgtgttgtaaacattttaataaaatctcccatcttataaaccatcggagaatccacactggtgagaaacctcataaatgtaaggaatgtggaaaaggctttattcagcgttcgagccttctaatgcatttacggaaccattcaggggagaaaccttataaatgtaatgaatgtgggaaagcattttctcaaagtgcttaccttctaaaccatcagaggatccacactggggagaaaccttataagtgtaaggagtgtggaaagggcttctataggcactcaggcctaattatacatctaaggcgccattcaggggagagaccttataagtgtaatgaatgtgggaaagtcttctctcagaatgcttacctcattgaccatcagaggctccacaaaggggaagaaccttataaatgtaataagtgtcagaaagctttcattctgaagaagagcctcattctgcaccagagaatccactctggggaaaaaccctataaatgtgatgaatgtggaaagacctttgctcagaccacttatcttattgaccatcagcgactccacagtgcagagaacccttacaagtgtaaagaatgtggaaaagttttcattcgaagcaaaagcctcctcttacatcagagagtccacacagaaaagaaaacctttggttgtaaaaagtgtgggaagattttcagttctaagtcaaacttcattgaccataagaggatgcacagcagagagaaaccttacaaatgcactgaatgtgggaaagcctttactcaaagtgcttacctttttgaccaccagagactccacaatggggagaagccctatgaatgtaatgaatgtgggaaagtttttattctgaagaagagcctcattttacatcaaaggttccacactggagagaatctctatgaatgtaaagattgtggtaaggtcttcggttcaaacagaaacctcattgaccatgagagactccacaatggggagaagccatatgaatgtcgagagtgtgggaaaacctttattatgagcaaaagttttatggtccatcagaaactccatacacaagagaaagcctacaaatgtgaggattgtgggaaggctttcagttacaattcaagcctgcttgtacatcggagaatccacaccggagaaaaaccctttgaatgcagtgagtgtggaagagctttcagttcaaacagaaacctcattgagcataagagaatccacagtggtgagaaaccctatgagtgtgatgagtgtggcaaatgcttcattctgaagaaaagcctcattggacatcagagaattcacacgagggaaaaatcttataaatgcaatgactgtgggaaggtcttcagttaccgctcaaaccttatagcccatcagaggatccatactggtgagaagccctatgcgtgtagtgagtgtggaaaaggttttacgtacaacagaaacctgattgaacatcaaagaattcacagtggagaaaaaacctacgaatgtcatgtatgtaggaaagtccttacctctagtagaaatcttatggtacatcaaagaatccatactggagagaaaccttataaatgtaatgagtgtggaaaagactttagtcagaataaaaaccttgttgtacatcagagaatgcacactggggaaaaaccttatgagtgtgacaagtgtaggaaatcctttacttctaagaggaatttagttggccaccagagaattcacacaggggagaaaccctatgggtgtaatgattgtagtaaagtttttaggcaaagaaaaaaccttactgtacatcagaaaatccacacagatgaaaaaccttgtgaatgtgatgtgtctgaaaaagaattctctcagacttccaaccttcatcttcaacagaaaatccataccattgaggaattctcttggctacaaaacaccaatgagtccaagattgagattcagaaaatctagtgtcatatgtaaaatggaatagaatccctgcctacttaagtaactgttggacaaatgatatatatttcttctaaggaaaaagtttattatttactctttactagacaaatgagtagcatatagaagaaagttaataggccgggcttggtggctcatgcctgtaatcccagcactttgagaggccgaagcgagtggatcacctgaggtcaggattttgagaccagcctgaccaacatggtgaaaccccatctctactaaaatacaaaaattatccgggcatgggggcacacaccggtaatcccagctactcaggaggctgagacaggagagtcgcttgaacctgggagggcggaggttgcagtgagccaggatcgcgccattgcactccagcctgggcaacaagagcgaaactcttgtctgaaaaaataaagttcatcccaactttcaagtctacaaaaacataatccaaatctaataacatagttgtaaatgagagcaacaataaaaagtagacatgggctgggtgcagtggctcactcctgtagtcccaggactttgggaggccgaggtgggaagatcccttgagcccaggagttcgagacaagcctgggtaacacggggagacccgtctttagtaaataaaaataaatttattaataaaactaaaaatttaataataaaaagtggacattgttttttaaaatgtgtatagtatgcattttaaagatagtgtcactgctgtggaaaacctgaacagacagtatgatccagaatgtcaggtgtggagttgggcggacaagagtctgctgatgaggacaacctaaaagagcactggatttggaatcagaagacctacctttgattcctggctttcccttaatggccatgtgatgttattaagtcagcctctaaagctttagtttcctgtcagtcaaatgttgacatgatacctacctcacagggttgttgtgagggttaagtgaaaggatctttgtgaaagtactttttgaaatcattcagttgtcaataaagttggataaaa

SEQ ID NO: 679 - DNA, 1643 bp, Homo sapiens
tcttccccggcccggccgggcgggaccagtgcgcagccggggctggcgggcggcggggtccgcggggccgcaggagatgacggccggcggccaggccgaggccgagggcgctggcggggagcccggcgcggcgcggctgccctcgcgggtggcccggctgctgtcggcgctcttctacgggacctgctccttcctcatcgtgcttgtcaacaaggcgctgctgaccacctacggtttcccgtcaccaattttccttggaattggacagatggcagccaccataatgatactatatgtgtccaagctaaacaaaatcattcacttccctgattttgataagaaaattcctgtaaagctgtttcctctgcctctcctctacgttggaaaccacataagtggattatcaagcacaagtaaattaagcctaccgatgttcaccgtgctcaggaaattcaccattccacttaccttacttctggaaaccatcatacttgggaagcagtattcactcaacatcatcctcagtgtctttgccattattctcggggctttcatagcagctgggtctgaccttgcttttaacttagaaggctatatttttgtattcctgaatgatatcttcacagcagcaaatggagtttataccaaacagaaaatggacccaaaggagctagggaaatacggagtacttttctacaatgcctgcttcatgattatcccaactcttattattagtgtctccactggagacctgcaacaggctactgaattcaaccaatggaagaatgttgtgtttatcctacagtttcttctttcctgttttttggggtttctgctgatgtactccacggttctgtgcagctattacaattcagccctgacgacagcagtggttggagccatcaagaatgtatccgttgcctacattgggatattaatcggtggagactacattttctctttgttaaactttgtagggttaaatatttgcatggcagggggcttgagatattcctttttaacactgagcagccagttaaaacctaaacctgtgggtgaagaaaacatctgtttggatttgaagagctaaagagtctgcagcaggattggagactgacttgtgactgcgggctgggggggcattcccagtaggaatgtgaagccagaggtttcggattcgtgacatccaccccctgggcaagtgagagcatctgcaaaatgcaaagagaactacctcatatgcaggatgagccaatggcagtctcaagaaatgtactcgggcgacaccttacctgtggaaagcaaatcttttcaaaataagccactgggactcggtaggtggagccccagctgctcttctagggacctatggggccttcgtggcatctctgtgctgtgtgctggggaggaggttgatgtaatggtgactcttttctgatcagcaccttggccgtgattcccaaggtcccagccaaagcaaagggccagttgtttcagtttaaacagacatgtctttagtctaataaaattagttaactgccagtaaagttatttgttagctttgatgaaagctatgttggtatctttccctaatcatcaaagtaaataaaaaatcatttctatgtaaaaaaaaaaaaaaaaaa

SEQ ID NO: 680 - DNA, 7431 bp, Homo sapiens
gttttgatgaacacctggctttattcttgcaatgaagaaaggttctcaacaaaaaatattctccaaagcaaagataccatcatcatctcactctcctatcccatcatctatgtccaatatgagatctaggtcactttcacctttgattggatcagagactctaccttttcattctggaggacagtggtgtgagcaagttgagattgcagatgaaaacaatatgcttttggactatcaagaccataaaggagctgattcacatgcaggagttagatatattacagaggccctcattaaaaaacttactaaacaggataatttggctttgataaaatctctgaacctttcactttctaaagacggtggcaagaaatttaagtatattgagaatttggaaaaatgtgttaaacttgaagtactgaatctcagctataatctaatagggaagattgaaaagttggacaagctgttaaaattacgtgaactcaacttatcatataacaaaatcagcaaaattgaaggcatagaaaatatgtgtaatctgcaaaagcttaaccttgcaggaaatgaaattgagcatattccagtatggttagggaagaagttaaaatctttgcgagtcctcaatttgaaaggcaacaagatatcatcgctccaagatataagcaagttgaaaccgcttcaagatttgatttctctgatcctagttgaaaatccagttgtgacccttcctcattacctccagtttaccattttccacctccgttcattggaaagtttggaaggtcagccagtaaccactcaggatagacaggaggcttttgagagattcagtttagaagaggtagaaagactggaaagagacctagaaaaaaagatgatagaaactgaagagcttaagagcaaacaaacaaggttccttgaggaaattaaaaatcaagataaattgaataaatcattaaaagaggaggccatgttacagaaacagagctgtgaggaactcaagagtgacttaaacacaaaaaatgaattgctaaaacagaagaccatagaattaacacgagcatgtcagaagcaatatgagctggaacaggaattggccttttataaaattgatgctaaatttgagccactaaattattatccatcagagtatgctgaaattgataaagccccagatgaaagcccttacattggcaaatccagatacaagagaaatatgtttgccacagagagttatattattgacagtgctcaggcagtacagatcaagaagatggagccagatgaacaacttagaaatgatcacatgaacttgagaggccacacaccactggacacgcaactggaagacaaagaaaaaaaaataagtgcagcacaaactcgactatcagaactgcatgatgaaatagaaaaggcagaacaacaaattttgagagctactgaagaatttaaacaactggaagaagctatacaactaaaaaagatttcagaagcagggaaagaccttctttacaagcagttgagtggtagactacaacttgtaaataaattacgccaggaagctctggatctagaactgcagatggaaaagcaaaagcaggaaattgccggaaagcagaaggagattaaggacctgcaaatagccatagatagcctggattccaaagacccaaaacattcccatatgaaggctcaaaagagcggtaaagaacaacagcttgacattatgaacaagcagtaccaacaacttgaaagtcgtttggatgagatactttctagaattgctaaggaaacggaagagattaaggaccttgaagaacagcttactgaaggccagatagcagcaaatgaagccctgaagaaggatttagaaggtgttatcagtgggttgcaagaatacctggggaccattaaaggccaggcaactcaggcccagaatgagtgcaggaagctgcgggatgagaaagagacattgttgcagagattgacagaagtcgagcaggagagagaccagctggaaatagttgccatggatgcagaaaatatgaggaaggagcttgcagagctagaaagtgccctccaagagcagcatgaggtgaatgcatctttgcagcagacccagggagatctcagtgcctatgaagctgagctagaggctcggctaaacctaagggatgctgaagccaaccagctcaaggaagagttggaaaaagtaacaagacttacccagttagaacaatcagcccttcaagcagaacttgagaaggaaaggcaagccctcaagaatgcccttggaaaagcccagttctcagaagaaaaggagcaagagaacagtgagctccatgcaaaacttaaacacttgcaggatgacaataatctgttaaaacagcaacttaaagatttccagaatcaccttaaccatgtggttgatggtttggttcgtccagaagaagtggcagctcgtgtggatgagctaagaagaaaactgaaattaggaactggggaaatgaacatccatagtccttcagatgtcttagggaaaagtcttgctgatttacagaaacaattcagtgaaattcttgcacgctccaagtgggaaagagatgaagcacaagttagagagagaaaactccaagaagaaatggctctgcagcaagagaaactggcaactggacaagaagagttcaggcaggcctgtgagagagccctggaagcaagaatgaattttgataagaggcaacatgaagcaagaatccagcaaatggagaatgaaattcactatttgcaagaaaatctaaaaagtatggaggaaatccaaggccttacagatctccaacttcaggaagctgatgaagagaaggagagaattctggcccaactccgagagttagagaaaaagaagaaacttgaagatgccaaatctcaggagcaagtttttggtttagataaagaactgaagaaactaaagaaagccgtggccacctctgataagctagccacagctgagctcaccattgccaaagaccagctgaagtcccttcatggaactgttatgaaaattaaccaggagcgagcagaggagttgcaggaagcagagaggttcagcagaaaggcagcacaagcagccagagatctcacccgagcagaagctgagatcgaactcctgcagaatctcctcaggcagaagggggagcagtttcgacttgagatggagaaaacaggtgtaggtactggagcaaactcacaggtcctagaaattgagaaactgaatgagacaatggaacgacaaaggacagagattgcaaggctgcagaatgtactagacctcactggaagtgacaacaaaggaggctttgaaaatgttttagaagaaattgctgaacttcgacgtgaagtttcttatcagaatgattacataagcagcatggcagatcctttcaaaagacgaggctattggtactttatgccaccaccaccatcatcaaaagtttccagccatagttcccaggccaccaaggactctggtgttggccttaagtactcagcctcaactcctgttagaaaaccacgccctgggcagcaggatgggaaggaaggcagtcaacctccccctgcctcaggatactgggtttattctcccatcaggagtgggttacataaactgtttccaagtagagatgcagacagtggaggagatagtcaggaagagagtgagctggatgaccaagaagaacccccatttgtgcctcctcctggatacatgatgtatactgtgcttcctgatggttctcctgtaccccagggcatggccctgtatgcaccacctcctcccttgccaaacaatagccgacctctcacccctggcactgttgtttatggcccacctcctgctggggcccccatggtgtatgggcctccaccccccaacttctccatccccttcatccctatgggtgtgctgcattgcaacgtccctgaacaccataacttagagaatgaagtttctagattagaagacataatgcagcatttaaaatcaaagaagcgggaagaaaggtggatgagagcatccaagcggcagtcggagaaagaaatggaagaactgcatcataatattgatgatcttttgcaagagaagaaaagcttagagtgtgaagtagaagaattacatagaactgtccagaaacgtcaacagcaaaaggacttcattgatggaaatgttgagagtcttatgactgaactagaaatagaaaaatcactcaaacatcatgaagatattgtagatgaaattgagtgcattgagaagactcttctgaaacgtcgctcagagctcagggaagctgaccgactcctggcagaggctgagagtgaactttcatgcactaaagaaaagacaaaaaatgctgttgaaaagttcactgatgccaagagaagtttattgcaaactgagtcagatgctgaggaattagaaaggagagctcaggaaactgctgttaacctcgtcaaagctgatcagcagctaagatcgctccaggctgatgcaaaggatttggagcagcacaaaatcaagcaagaagaaatcttgaaagaaataaacaaaattgtagcagcaaaagactcagacttccaatgtttaagcaagaagaaggaaaaactgacagaagagcttcagaaactacagaaagacatagagatggcagaacgcaatgaggatcaccacctgcaggtccttaaagaatctgaggtgcttcttcaggccaaaagagccgagctggaaaagctgaaaagccaggtgacaagtcagcagcaggagatggctgtcttggacaggcagttagggcataaaaaggaggagctgcatctactccaaggaagcatggtccaggcaaaagctgacctccaggaagctctgagactgggagagactgaagtaactgagaagtgcaatcacattagggaagtaaaatctcttctggaagaactgagttttcagaaaggagaactaaatgttcagattagtgaaagaaaaactcaacttacacttataaagcaggaaattgaaaaagaggaagaaaatcttcaggttgttttaaggcagatgtctaaacataaaaccgaactaaagaatattctggacatgttgcaacttgaaaaccatgagctacaaggtttgaagctacaacatgaccaaagggtatctgaattagagaagactcaggtggcagtgctagaggagaaactggagttagagaatttgcagcagatatcccagcagcagaaaggggaaatagagtggcagaagcagctccttgagagggataaacgagaaatagaacgaatgactgctgagtcccgagctttacaatcgtgtgttgagtgtttgagcaaagaaaaggaagatctccaagagaaatgtgacatttgggaaaaaaagttggcacaaaccaaaagggttttagcagcagcagaagaaaatagcaaaatggagcaatcaaacttagaaaagttggaattgaatgtcagaaaactgcagcaggaactagaccaactaaacagagacaagttgtcactgcataacgacatttcagcaatgcaacagcagctccaagaaaaacgagaagcagtaaactcactgcaggaggaactagctaatgtccaagaccatttgaacctagcaaaacaggacctgcttcacaccaccaagcatcaggatgtgttgctcagtgagcagacccgactccagaaggacatcagtgaatgggcaaataggtttgaagactgtcagaaagaagaggagacaaaacaacaacaacttcaagtgcttcagaatgagattgaagaaaacaagctcaaactagtccaacaagaaatgatgtttcagagactccagaaagagagagaaagtgaagaaagcaaattagaaaccagtaaagtgacactgaaggagcaacagcaccagctggaaaaggaattaacagaccagaaaagcaaactggaccaagtgctctcaaaggtgctggcagctgaagagcgtgttaggactctgcaggaagaggagaggtggtgtgagagcctggagaagacactctcccaaactaaacggcagctttcagaaagggagcagcaattggtggagaaatcaggtgagctgttggccctccagaaagaggcagattctatgagggcagacttcagccttctgcggaaccagttcttgacagaaagaaagaaagctgagaagcaggtggccagcctgaaggaagcacttaagatccagcggagccagctggagaaaaaccttcttgagcaaaaacaggagaacagctgcatacaaaaggaaatggcaacaattgaactggtagcccaggacaaccatgagcgggccaggcgcctgatgaaggagctcaaccagatgcagtatgagtacacggagctcaagaaacagatggcaaaccaaaaagatttggagagaagacaaatggaaatcagtgatgcaatgaggacacttaaatctgaggtgaaggatgaaatcagaaccagcttgaagaatcttaatcagtttcttccagaactaccagcagatctagaagctattttggaaagaaacgaaaacctagaaggagaattggaaagcttgaaagagaaccttccatttaccatgaatgagggaccttttgaagaaaaactgaacttttcccaagttcacataatggatgaacactggcgtggagaagcactccgggagaaactgcgtcaccgggaagaccgactcaaggcccaactccgacactgtatgtccaagcaagcagaagtattaattaaaggaaagcggcagacagagggcactttacacagtttgaggagacaagtagatgctttaggggaattggtcaccagcacctctgcagattcagcgtcatcacccagtctgtctcagctggagtcttccctcacagaggactctcaacttggacaaaatcaggaaaagaatgcctcagccagatgaggaatactgtcttgtgtaaatatattcaaggaaaacacctccactacctcactgacttcataattggaatgtcacatggtttttttaatcaagatgcagtgaactgagattctgaaactccactgtagtttactttgcctgtaccattaatgccaatgtttttataaatcacttgtacatagtacatatgggaatagttgcatatgggaatttaaaccaacatgtggctgagcctttttttttttaatcttcgtaacatgtttaaaaaaaaacagtgattttaactgcatatttgaacctacaaactggtaaatcttattaacaaaaagaatgtacttaaggccctctttatttatagtgtcgagttatttttgaattttgcttaaaatctatttttcatatgaaaataaaagataacaatc

SEQ ID NO: 681 - DNA, 3679 bp, Homo sapiens
ggaagtataaataagaagggctcggcagcccactcggtgcttcccggggtggggaggaggcaggaggcggctgcgcggggctggcgcgggcaggggcggaggacgggcgcacgcgggccggggccagctgctcgcgctcggctcgggggcggcggcgcgggaggagcgggctgcgccagccagaggggccgccgggggagcgctcccgccgccgggccccgcgggccgagtcggccttgcacccgattgattccgcttttcctggagagagcggccgggccgcgctcgggccgccagcacctgcccgcgcctggcgggcttcttccctctcctgcgcgcagccaccgccgcagcccccatgctccccgcccccgccgccccccggtggcctccgctcctgctgctgctgctgctgctgctgccgctggcccgcggcgccccggcccggcccgcagccggggggcaggcctcggagctggtggtgcccacgcggttgcccggcagcgcgggcgagctcgcgctccacctgtccgccttcggcaagggcttcgtgctgcgcctggcgcccgacgacagcttcctagcgcccgagttcaagatcgagcgcctcgggggctccggccgggcgaccgggggcgagcgggggctgcgcggctgcttcttctccggcaccgtgaatggggagcccgagtcgctggcggcggtcagcctgtgccgcgggctgagcggctccttcctgctggacggcgaggagttcaccatccagccgcagggcgcggggggctccctggctcagccgcaccgcctgcagcgctggggtcccgccggagcccgccccctcccgcgaggacccgagtgggaggtggagacgggagagggtcagaggcaggagagaggagaccaccaggaggacagcgaggaggagagccaagaagaggaggcagaaggcgctagcgagccgccaccgcccctgggggccacgagtaggaccaagcggtttgtgtctgaggcgcgcttcgtggagacgctgctggtggccgatgcgtccatggctgccttctacggggccgacctgcagaaccacatcctgacgttaatgtctgtggcagcccgaatctacaagcaccccagcatcaagaattccatcaacctgatggtggtaaaagtgctgatcgtagaagatgaaaaatggggcccagaggtgtccgacaatggggggcttacactgcgtaacttctgcaactggcagcggcgtttcaaccagcccagcgaccgccacccagagcactacgacacggccatcctgctcaccagacagaacttctgtgggcaggaggggctgtgtgacaccctgggtgtggcagacatcgggaccatttgtgaccccaacaaaagctgctccgtgatcgaggatgaggggctccaggcggcccacaccctggcccatgaactagggcacgtcctcagcatgccccacgacgactccaagccctgcacacggctcttcgggcccatgggcaagcaccacgtgatggcaccgctgttcgtccacctgaaccagacgctgccctggtccccctgcagcgccatgtatctcacagagcttctggacggcgggcacggagactgtctcctggatgcccctgctgcggccctgcccctccccacaggcctcccgggccgcatggccctgtaccagctggaccagcagtgcaggcagatctttgggccggatttccgccactgccccaacacctctgctcaggacgtctgcgcccagctttggtgccacactgatggggctgagcccctgtgccacacgaagaatggcagcctgccctgggctgacggcacgccgtgcgggcctgggcacctctgctcagaaggcagctgtctacctgaggaggaagtggagaggcccaagcccgtggcagatggaggctgggcaccgtggggaccctggggagaatgttctcggacctgtggaggaggagtacagttttcacaccgtgagtgcaaggaccccgagcctcagaatggaggaagatactgcctgggtcggagagccaagtaccagtcatgccacacggaggaatgcccccctgacgggaaaagcttcagggagcagcagtgtgagaagtataatgcctacaattacactgacatggacgggaatctcctgcagtgggtccccaagtatgctggggtgtccccccgggaccgctgcaagttgttctgccgagcccgggggaggagcgagttcaaagtgttcgaggccaaggtgattgatggcaccctgtgtgggccagaaacactggccatctgtgtccgtggccagtgtgtcaaggccggctgtgaccatgtggtggactcgcctcggaagctggacaaatgcggggtgtgtgggggcaaaggcaactcctgcaggaaggtctccgggtccctcacccccaccaattatggctacaatgacattgtcaccatcccagctggtgccactaatattgacgtgaagcagcggagccacccgggtgtgcagaacgatgggaactacctggcgctgaagacggctgatgggcagtacctgctcaacggcaacctggccatctctgccatagagcaggacatcttggtgaaggggaccatcctgaagtacagcggctccatcgccaccctggagcgcctgcagagcttccggcccttgccagagcctctgacagtgcagctcctgacagtccctggcgaggtcttccccccaaaagtcaaatacaccttctttgttcctaatgacgtggactttagcatgcagagcagcaaagagagagcaaccaccaacatcatccagccgctgctccacgcacagtgggtgctgggggactggtctgagtgctctagcacctgcggggccggctggcagaggcgaactgtagagtgcagggacccctccggccaggcctctgccacctgcaacaaggctctgaaacccgaggatgccaagccctgcgaaagccagctgtgccccctgtgattcaggggggcaggggccagtcttgtgctcctggacatgcggtactgaggtgcagacaagggtctccactgtggtgactgggtcccttggccatatcaaggcagcacggcccacccaggcctcccattgccgcaacccctccagtactgcacaaattcctaagggggaagaggagagggtatggggcggcagaccctatcatcaactgtccagtggactggaccttgctcgggttcaagtagagggcataggttaaaaggtaaaagtgcacttattgactcagacaggacactcagcgtcagtctgtttgcaaaggactagcaaacttaaatgaaaaaaaaaattctatctggtttccccgataaataatctacctcacaggggaaaaaattagtacaagagaggcgtggggcagggagtcaatggtgaatgtcaaagcaggctccaaagctggaccccaagctgtcttcaagaatgaccacgactgtcttcagtgttaaaatccatcacctaaagggccgcagcgtcgcagggtttggagagccacatgttctcaggctgccacctgcaggggtggatccatttcaagtatttatgcaaatgtgtctctgaactaaagtgtgatcttatgccaaaaaaaaaaaaaaaaaa

SEQ ID NO: 682 - DNA, 9663 bp, Homo sapiens
ataaattcattgttccacctcctcgcatcttcacagcgctcgcgctgctctcggcgctcgcagctgccgactggggatgacggcgggcaggaggagaccgcagccgaagggacacagacacgccgcttcaccagctcgcctcaggctgcccccctgcatttttgttttaatttttacggctttttcccctctctttcttcccttcctcctggtcccagcagagccaaggaaacccacaaaataagaaaggaagtgggccccggagcttggaacctccacagccggcttgtccagcgcagcgcgggggcgggaggctgcgcgcaccagttgccagcccggtgcgcggtacctttccttacttttcttgaaacagcgatcgtgcctgcatttggtggttttttggtttttgtttttttccttttcccgtatttgctgaatctccactatccgactttttttttttaatcttttctttccccccccccccaccccacctctttctggagcacgaatccaaacattttcccaagcaacaaagaaaagttcgcacgctggcaccgcagcccggacaggctggcgctgctgccgggcccccctccctccgacacttgactcaatcctgcaagcaagtgtgtgtgtgtccccatcccccgccccgttaacttcatagcaaataacaaatacccataaagtcccagtcgcgcagcccctccccgcgggcagcgcactatgctgctcgggtgggcgtccctgctgctgtgcgcgttccgcctgcccctggccgcggtcggccccgccgcgacacctgcccaggataaagccgggcagcctccgactgctgcagcagccgcccagccccgccggcggcagggggaggaggtgcaggagcgagccgagcctcccggccacccgcaccccctggcgcagcggcgcaggagcaaggggctggtgcagaacatcgaccaactctactccggcggcggcaaggtgggctacctcgtctacgcgggcggccggaggttcctcttggacctggagcgagatggttcggtgggcattgctggcttcgtgcccgcaggaggcgggacgagtgcgccctggcgccaccggagccactgcttctatcggggcacagtggacggtagtccccgctctctggctgtctttgacctctgtgggggtctcgacggcttcttcgcggtcaagcacgcgcgctacaccctaaagccactgctgcgcggaccctgggcggaggaagaaaaggggcgcgtgtacggggatgggtccgcacggatcctgcacgtctacacccgcgagggcttcagcttcgaggccctgccgccgcgcgccagctgcgaaacccccgcgtccacaccggaggcccacgagcatgctccggcgcacagcaacccgagcggacgcgcagcactggcctcgcagctcttggaccagtccgctctctcgcccgctgggggctcaggaccgcagacgtggtggcggcggcggcgccgctccatctcccgggcccgccaggtggagctgcttctggtggctgacgcgtccatggcgcggttgtatggccggggcctgcagcattacctgctgaccctggcctccatcgccaataggctgtacagccatgctagcatcgagaaccacatccgcctggccgtggtgaaggtggtggtgctaggcgacaaggacaagagcctggaagtgagcaagaacgctgccaccacactcaagaacttttgcaagtggcagcaccaacacaaccagctgggagatgaccatgaggagcactacgatgcagctatcctgtttactcgggaggatttatgtgggcatcattcatgtgacaccctgggaatggcagacgttgggaccatatgttctccagagcgcagctgtgctgtgattgaagacgatggcctccacgcagccttcactgtggctcacgaaatcggacatttacttggcctctcccatgacgattccaaattctgtgaagagacctttggttccacagaagataagcgcttaatgtcttccatccttaccagcattgatgcatctaagccctggtccaaatgcacttcagccaccatcacagaattcctggatgatggccatggtaactgtttgctggacctaccacgaaagcagatcctgggccccgaagaactcccaggacagacctacgatgccacccagcagtgcaacctgacattcgggcctgagtactccgtgtgtcccggcatggatgtctgtgctcgcctgtggtgtgctgtggtacgccagggccagatggtctgtctgaccaagaagctgcctgcggtggaagggacgccttgtggaaaggggagaatctgcctgcagggcaaatgtgtggacaaaaccaagaaaaaatattattcaacgtcaagccatggcaactggggatcttggggatcctggggccagtgttctcgctcatgtggaggaggagtgcagtttgcctatcgtcactgtaataaccctgctcccagaaacaacggacgctactgcacagggaagagggccatctaccgctcctgcagtctcatgccctgcccacccaatggtaaatcatttcgtcatgaacagtgtgaggccaaaaatggctatcagtctgatgcaaaaggagtcaaaacttttgtggaatgggttcccaaatatgcaggtgtcctgccagcggatgtgtgcaagctgacctgcagagccaagggcactggctactatgtggtattttctccaaaggtgaccgatggcactgaatgtaggctgtacagtaattccgtctgcgtccgggggaagtgtgtgagaactggctgtgacggcatcattggctcaaagctgcagtatgacaagtgcggagtatgtggaggagacaactccagctgtacaaagattgttggaacctttaataagaaaagtaagggttacactgacgtggtgaggattcctgaaggggcaacccacataaaagttcgacagttcaaagccaaagaccagactagattcactgcctatttagccctgaaaaagaaaaacggtgagtaccttatcaatggaaagtacatgatctccacttcagagactatcattgacatcaatggaacagtcatgaactatagcggttggagccacagggatgacttcctgcatggcatgggctactctgccacgaaggaaattctaatagtgcagattcttgcaacagaccccactaaaccattagatgtccgttatagcttttttgttcccaagaagtccactccaaaagtaaactctgtcactagtcatggcagcaataaagtgggatcacacacttcgcagccgcagtgggtcacgggcccatggctcgcctgctctaggacctgtgacacaggttggcacaccagaacggtgcagtgccaggatggaaaccggaagttagcaaaaggatgtcctctctcccaaaggccttctgcgtttaagcaatgcttgttgaagaaatgttagcctgtggttatgatcttatgcacaaagataactggaggattcagcactgatgcagtcgtggtgaacaggaggtctacctaacgcacagaaagtcatgcttcagtgacattgtcaacaggagtccaattatgggcagaatctgctctctgtgaccaaaagaggatgtgcactgcttcacgtgacagtggtgaccttgcaatatagaaaaacttgggagttattgaacatcccctgggcttacaagaaacactgatgaatgtaaaatcaggggacatttgaagatggcagaactgtctcccccttgtcacctacctctgatagaatgtctttaatggtatcataatcattttcacccataatacacagtagcttcttcttactgtttgtaaatacattctcccttggtatgtcactttatatcccctggttctattaaaatatccatatatatttctataaaaaaagtgtttgaccaaagtaggtctgcagctatttcaacttccttccgtttccagaaagagctgtggatattttactggaaattaagaacttgctgctgttttaataagatgtagtatattttctgactacaggagataaaatttcagtcaaaaaaccattttgacagcaagtatcttctgagaaattttgaaaagtaaatagatctcagtgtatctagtcacttaaatacatacacgggttcatttacttaaacctttgactgcctgtatttttttcaggtagctagccaaattaatgcataatttcagatgtagaagtagggtttgcgtgtgtgtgtgtgatcatactcaagagtctaaaaactagtttccttgtgttggaaatttaaaaggaaaaaaatcgtatttcactgtgttttcaatttatattttcacaactactttctctctccagagctttcatctgatatctcacaatgtatgatatacgtacaaaacacacagcaagttttctatcatgtccaacacattcaacactggtatacctcctaccagcaagcctttaaaatgcatttgtgtttgcttatttgttttgttcaagggttcagtaagacctacaatgttttgtatttcttgacttattttattagaaacattaaagatcacttggtagttagccacattgagaagtggttatcattgttaatgtggttaatgccaaaaagtggttaatattaataagactgtttccacaccataggcaataatttcttaatttaaaaaatctaagtatattcctattgtactaaatatttttcccaactggaaagcacttgattgtacccgtaagtgtttgagtgatgacatgtgatgattttcagaaagttgttgtttttgtttccatagcctgtttaagtaggttgtaagtttgaatagttagacatggaaattattttataagcacacacctaaagatatctttttagatgataaaatgtacacccccccatcaccaacctcacaacttagaaaatctaagttgtttgatttctttgggatttcttttgttgtgaaacactgcaaagccaatttttctttataaaaattcatagtaatcctgccaaatgtgcctattgttaaagatttgcatgtgaagatcttagggaaccactgtttgagttctacaagctcatgagagtttatttttattataagatgtttttaatataaaagaattatgtaactgatcactatattacatcatttcagtgggccaggaaaatagatgtcttgctgttttcagtattttcttaagaaattgcttttaaaacaaataattgttttacaaaaccaataattatcctttgaattttcatagactgactttgcttttgacgtagaaattttttttctcaataaattatcactttgagaaatgaggcctgtacaaggctgataacctatatgtgatggagatcacccaatgccaagggcagaaagcaaacctagttaaataggtgagaaaaaaaataataatcccagtgccatttgtctgtgcaaagagaattaggagagaggttaatgttacttttttccattttggaaataattttaatcaagtaactcaaatgtgacaaaatttatttttattttttgtggttatattcccaacaacattaaaaaatactcgaggcataaatgtagttgtctcctactctgcttctcttactatactcatacatttttaatatggtttatcaatgattcatgtttccctcaaatagtgatggtttacacctgtcatggaaacaatcctagagagctcagagcaattaaaccactattccatgcttttaagtagttttctccacctttttcttatgagtctcactagattgactgaggaatgtatgtctaaattcctggagaagatgatatggattggaaactgaaattcagagaaatggagtgttcaatagataccacgaattgtgaacaaagggaaaattctatacaactcaatctaagtcagtccactttgacttcgtactgtctttcacctttccattgttgcatcttgaattttttaaaatgtctagaattcaggatgctaggggctacttctttaaaaaaaaaaaaaaaaaagaattcgtctgaaaatgctcaggtttgtaagaatctaatctcacttacataactaagcactccataataagttttattaagtacaaagggagccagaaaaaatgacatttatttcttctagatcagaaaaatttaaattaagccctgccttgctgtttagaaatatgtgggcattgttataatttattcaataaatttatgttcctttgccttcctgtggaaacagttttatcccactaaactaggaattaggggataaatcacaaacaaaaaaaaagttgcagcactgaaaaaaagtaatttattgtttttgcaactggtatgtgaatttgtgtgataaaattatttattcttatttaacaaaaatatgttcaaatttttctatatttaaaatgttttgctgttgtcctactttttaatttatgcttcatgtttgtgtataaagtacacttttacactttgtgagtttacataatatacagcactggttgcttttgtatttttttacagaaagctttctgtgtgaagcaggtgtatatgtatatattcctcatgtattcttattctgatactatcatttttctttccaaggaaattttaatctgtcatgaccaatagtgttcattacttgtgcctatgataataggttttttacatcacattaacactattttttccaagtcacaaataagaaaaacacttattcaatgaaacaaggtgcaagttttaaatttgggtacacaaatagcctagaagcttcctacagacgctaagacacagccaataatcagatcctttcacttcatcgagaaacttggacaagtcgatattgatgtattagatgaaagttgtctacacacaacttctgagggatacaaacgataataaaaccaaatgttgtctgtttctcctttagaaacacctcctaaaattaatatcatttagtctctagtgtctgtaggattctacagatgagcacaaatagattgggtttgtataacaaatgctaatagtcataactgtttctacaaatatggggtgtccattaagagaatgtgatgttttcctactgctgttgaatcccatggggtgattataggacttgaaataggcagagtcacctctgatgacatcagcttgcctctgtgatttcacagtctgatcctggcaacaagacaaagcacccttggacacacagccaatctctggttgtgatatttccccattgattccttccttgttaacaaggtcattttaatggttcaggtgaggacagcagccagattcaaagtccagaatttgtgctgttacatagagttcacactgtcaaataacattgaatttaataatgatcaaatttttctagtagtctttggcagagtgtataatctcattggcatgattggtgaatattactaatctctttataatgaaagatgctttacaaataccttatatttgctaacatttcaaaactactaaataaatgaaatagccatgtgtacagaaatggtcatttaaagctttaatagaaccaaattcaagacaatgtatcatttagacacacagaaaaggaacttgtatgttttccctattatttttctcatttgccaacaatctatagttttaggttatcaaacagatagatcaacttaactggctagtacattgaaaaatcttcctaagaatcctttgttagcataatctatagagataatttctcaaattatatcatcatgatgcatataaactctataatgtataattgtgtttcatttatttaatgtatgagaacatattgaaatacaaaaccatgcattagccaaaaaattggaatacaggtagtgttcagatcagcaaaacattcagtctggtaaatgcctgcctggggctatgatatcattctcaatgcaggttttatggaaaaactaaaagaatatgttgttagatgatgttggttttgaaaaaaaaaagacattaacatacacattagttagcccagttaattgcattctactaatatagttgcacattagcaataattttgctgtctctggtctttattttgtggcttcaactaactggaccatgtggactgtaaaggtcaaatggaaaaaacgagcagtggcccctcatcctgtaaggtactgctacatcagagtgacctaaaagtctaacactgtgaggaaaactgtgatttgtaggaaaaaaaaaaaaaacaaataaaaaacagggcatgctttttaatttttttccactttcctttggcacacccaatgaacaattctaatttttattgaggtgctaacatctttcgtgaccgactgtcaaatgtggtatttttgagttactatttttctacatgattttacagtttgcaagaaagacctctaagctttgtgtcacggtagggcacaacttgatactcaaaatttgaaaaataagcacatccaatgattgttttgaccaacagtggtcagtgacgtaaactgcatgtgcatctgaggacatttaaggggtcattaaaatttgaggagcatcaggccggagtagcagacttttagatgagtcatatttcagcattcactaagtcctcagcattccattcaaactgtcgtgtatatttggcctgattttttttcaagctttgcaataatttatgttattggtaaacacttggtgactatatctcagccttttctttaacaactcacaatatattagaaacacgtctacctatactgagagtatatttacaatagaagaacatactgtatgtgactttgtaaagctagacttttgattaagaaatatataatctctggatgctatttttgcattatacactcaggcacaacgtaaaccttgatggctcatcttgctacaattacgagttgaaaaacactacttacgtatttgtatgacctattagtcagaggaaatcatacatatgctttgtaaatagactttgcagataactaaatagactgaagaaatatgttgcatttgatagaagcaattgcataaatatttggtttctatattagagtctgtgagtaaagtcaagtaataaacctaagtaggtataacagatttttaaaccttgaaacttgctttgatggtagagaaaatcattgaagatttacatactgtatataagatgtaaaatgtacgctgcttattaccctcaattttccagaagcaatggtatataatgcagttgaaaaaccaaaaatcttggaaaactaagacgggtcttgtttaaaatgtctctcagctttggcaaccttcaaatcttaatcaactatttaaagcattactgtgtcttgtagcctgcattccacaacagctctgttattcaggtaaaagacttgaactgagccgtttgggacctatactgtaatattttcattgaggaacaatatcctattttgtaaagcatttccctatgtgtgactttaaactgtaaaattaaacactgcttttgtgggttcagtgggcataataaatataaattgtaaactaggttaaagta

SEQ ID NO: 683 - DNA, 12436 bp, Homo sapiens
gtattgatgtcaagctgaaccatcgtaggaagttgaaagccttagaaagaggacttggtaaagtttttggattatcttgaaactctggcaagatggccaagtatggagaacatgaagccagtcctgacaatgggcagaacgaattcagtgatatcattaagtccagatctgatgaacacaatgacgtacagaagaaaacctttaccaaatggataaatgctcgattttcaaagagtgggaaaccacccatcaatgatatgttcacagacctcaaagatggaaggaagctattggatcttctagaaggcctcacaggaacatcactgccaaaggaacgtggttccacaagggtacatgccttaaataacgtcaacagagtgctgcaggttttacatcagaacaatgtggaattagtgaatatagggggaactgacattgtggatggaaatcacaaactgactttggggttactttggagcatcattttgcactggcaggtgaaagatgtcatgaaggatgtcatgtcggacctgcagcagacgaacagtgagaagatcctgctcagctgggtgcgtcagaccaccaggccctacagccaagtcaacgtcctcaacttcaccaccagctggacagatggactcgcctttaatgctgtcctccaccgacataaacctgatctcttcagctgggataaagttgtcaaaatgtcaccaattgagagacttgaacatgccttcagcaaggctcaaacttatttgggaattgaaaagctgttagatcctgaagatgttgccgttcagcttcctgacaagaaatccataattatgtatttaacatctttgtttgaggtgctacctcagcaagtcaccatagacgccatccgtgaggtagagacactcccaaggaaatataaaaaagaatgtgaagaagaggcaattaatatacagagtacagcgcctgaggaggagcatgagagtccccgagctgaaactcccagcactgtcactgaggttgacatggatctggacagctatcagattgcgttggaggaagtgctgacctggttgctttctgctgaggacactttccaggagcaggatgatatttctgatgatgttgaagaagtcaaagaccagtttgcaacccatgaagcttttatgatggaactgactgcacaccagagcagtgtgggcagcgtcctgcaggcaggcaaccaactgataacacaaggaactctgtcagacgaagaagaatttgagattcaggaacagatgaccctgctgaatgctagatgggaggctcttagggtggagagtatggacagacagtcccggctgcacgatgtgctgatggaactgcagaagaagcaactgcagcagctctccgcctggttaacactcacagaggagcgcattcagaagatggaaacttgccccctggatgatgatgtaaaatctctacaaaagctgctagaagaacataaaagtttgcaaagtgatcttgaggctgaacaggtgaaagtaaattcactaactcacatggtggtcattgttgatgaaaacagtggtgagagtgctacagctatcctagaagaccagttacagaaacttggtgagcgctggacagcagtatgccgttggactgaagaacgctggaataggttacaagaaatcaatatattgtggcaggaattattggaagaacagtgcttgttgaaagcttggttaaccgaaaaagaagaggctttaaataaagtccagacaagcaacttcaaagaccaaaaggaactaagtgtcagtgttcgacgtctggctattttgaaggaagacatggaaatgaagcgtcaaacattggatcagctgagtgagattggccaggatgtgggacaattacttgataattccaaggcatctaagaagatcaacagtgactcagaggaactgactcaaagatgggattctttggttcagagactagaagattcctccaaccaggtgactcaggctgtagcaaagctggggatgtctcagattcctcagaaggaccttttggagactgttcgtgtaagagaacaagcaattacaaaaaaatctaagcaggaactgcctcctcctcctcccccaaagaagagacagatccatgtggatattgaagctaagaaaaagtttgatgctataagtgcagagctgttgaactggattttgaaatggaaaactgccattcagaccacagagataaaagagtatatgaagatgcaagacacttccgaaatgaaaaagaagttgaaggcattagaaaaagaacagagagaaagaatccccagagcagatgaattaaaccaaactggacaaatccttgtggagcaaatgggaaaagaaggccttcctactgaagaaataaaaaatgttctggagaaggtttcatcagaatggaagaatgtatctcaacatttggaagatctagaaagaaagattcagctacaggaagatataaatgcttatttcaagcagcttgatgagcttgaaaaggtcatcaagacaaaggaggagtgggtaaaacacacttccatttctgaatcttcccggcagtccttgccaagcttgaaggattcctgtcagcgggaattgacaaatcttcttggccttcaccccaaaattgaaatggctcgtgcaagctgctcggccctgatgtctcagccttctgccccagattttgtccagcggggcttcgatagctttctgggccgctaccaagctgtacaagaggctgtagaggatcgtcaacaacatctagagaatgaactgaagggccaacctggacatgcatatctggaaacattgaaaacactgaaagatgtgctaaatgattcagaaaataaggcccaggtgtctctgaatgtccttaatgatcttgccaaggtggagaaggccctgcaagaaaaaaagacccttgatgaaatccttgagaatcagaaacctgcattacataaacttgcagaagaaacaaaggctctggagaaaaatgttcatcctgatgtagaaaaattatataagcaagaatttgatgatgtgcaaggaaagtggaacaagctaaaggtcttggtttccaaagatctacatttgcttgaggaaattgctctcacactcagagcttttgaggccgattcaacagtcattgagaagtggatggatggcgtgaaagacttcttaatgaaacagcaggctgcccaaggagacgacgcaggtctacagaggcagttagaccagtgctctgcatttgttaatgaaatagaaacaattgaatcatctctgaaaaacatgaaggaaatagagactaatcttcgaagtggtccagttgctggaataaaaacttgggtgcagacaagactaggtgactaccaaactcaactggagaaacttagcaaggagatcgctactcaaaaaagtaggttgtctgaaagtcaagaaaaagctgcgaacctgaagaaagacttggcagagatgcaggaatggatgacccaggccgaggaagaatatttggagcgggattttgagtacaagtcaccagaagagcttgagagtgctgtggaagagatgaagagggcaaaagaggatgtgttgcagaaggaggtgagagtgaagattctcaaggacaacatcaagttattagctgccaaggtgccctctggtggccaggagttgacgtctgagctgaatgttgtgctggagaattaccaacttctttgtaatagaattcgaggaaagtgccacacgctagaggaggtctggtcttgttggattgaactgcttcactatttggatcttgaaactacctggttaaacactttggaagagcggatgaagagcacagaggtcctgcctgagaagacggatgctgtcaacgaagccctggagtctctggaatctgttctgcgccacccggcagataatcgcacccagattcgagagcttggccagactctgattgatggggggatcctggatgatataatcagtgagaaactggaggctttcaacagccgatatgaagatctaagtcacctggcagagagcaagcagatttctttggaaaagcaactccaggtgctgcgggaaactgaccagatgcttcaagtcttgcaagagagcttgggggagctggacaaacagctcaccacatacctgactgacaggatagatgctttccaagttccacaggaagctcagaaaatccaagcagagatctcagcccatgagctaaccctagaggagttgagaagaaatatgcgttctcagcccctgacctccccagagagtaggactgccagaggaggaagtcagatggatgtgctacagaggaaactccgagaggtgtccacaaagttccagcttttccagaagccagctaacttcgagcagcgcatgctggactgcaagcgtgtgctggatggcgtgaaagcagaacttcacgttctggatgtgaaggacgtagaccctgacgtcatacagacgcacctggacaagtgtatgaaactgtataaaactttgagtgaagtcaaacttgaagtggaaactgtgattaaaacaggaagacatattgtccagaaacagcaaacggacaacccaaaagggatggatgagcagctgacttccctgaaggttctttacaatgacctgggcgcacaggtgacagaaggaaaacaggatctggaaagagcatcacagttggcccggaaaatgaagaaagaggctgcttctctctctgaatggctttctgctactgaaactgaattggtacagaagtccacttcagaaggtctgcttggtgacttggatacagaaatttcctgggctaaaaatgttctgaaggatctggaaaagagaaaagctgatttaaataccatcacagagagtagtgctgccctgcaaaacttgattgagggcagtgagcctattttagaagagaggctctgcgtccttaacgctgggtggagccgagttcgtacctggactgaagattggtgcaataccttgatgaaccatcagaaccagctagaaatatttgatgggaacgtggctcacataagtacctggctttatcaagctgaagctctattggatgaaattgaaaagaaaccaacaagtaaacaggaagaaattgtgaagcgtttagtatctgagctggatgatgccaacctccaggttgaaaatgtccgcgatcaagcccttattttgatgaatgcccgtggaagctcaagcagggagcttgtagaaccaaagttagctgagctgaataggaactttgaaaaggtgtctcaacatatcaaaagtgccaaattgctaattgctcaggaaccattataccaatgtttggtcaccactgaaacatttgaaactggtgtgcctttctctgacttggaaaaattagaaaatgacatagaaaatatgttaaaatttgtggaaaaacacttggaatccagtgatgaagatgaaaagatggatgaggagagtgcccagattgaggaagttctacaaagaggagaagaaatgttacatcaacctatggaagataataaaaaagaaaagatccgtttgcaattattacttttgcatactagatacaacaaaattaaggcaatccctattcaacagaggaaaatgggtcaacttgcttctggaattagatcatcacttcttcctacagattatctggttgaaattaacaaaattttactttgcatggatgatgttgaattatcgcttaatgttccagagctcaacactgctatttacgaagacttctcttttcaggaagactctctgaagaatatcaaagaccaactggacaaacttggagagcagattgcagtcattcatgaaaaacagccagatgtcatccttgaagcctctggacctgaagccattcagatcagagatacacttactcagctgaatgcaaaatgggacagaattaatagaatgtacagtgatcggaaaggttgttttgacagggcaatggaagaatggagacagttccattgtgaccttaatgacctcacacagtggataacagaggctgaagaattactggttgatacctgtgctccaggtggcagcctggacttagagaaagccaggatacatcagcaggaacttgaggtgggcatcagcagccaccagcccagttttgcagcactaaaccgaactggggatgggattgtgcagaaactctcccaggcagatggaagcttcttgaaagaaaaactggcaggtttaaaccaacgctgggatgcaattgttgcagaagtgaaggataggcagccaaggctaaaaggagaaagtaagcaggtgatgaagtacaggcatcagctagatgagattatctgttggttaacaaaggctgagcatgctatgcaaaagagatcaaccaccgaattgggagaaaacctgcaagaattaagagacttaactcaagaaatggaagtacatgctgaaaaactcaaatggctgaatagaactgaattggagatgctttcagataaaagtctgagtttacctgaaagggataaaatttcagaaagcttaaggactgtaaatatgacatggaataagatttgcagagaggtgcctaccaccctgaaggaatgcatccaggagcccagttctgtttcacagacaaggattgctgctcatcctaatgtccaaaaggtggtgctagtatcatctgcgtcagatattcctgttcagtctcatcgtacttcggaaatttcaattcctgctgatcttgataaaactataacagaactagccgactggctggtattaatcgaccagatgctgaagtccaacattgtcactgttggggatgtagaagagatcaataagaccgtttcccgaatgaaaattacaaaggctgacttagaacagcgccatcctcagctggattatgtttttacattggcacagaatttgaaaaataaagcttccagttcagatatgagaacagcaattacagaaaaattggaaagggtcaagaaccagtgggatggcacccagcatggcgttgagctaagacagcagcagcttgaggacatgattattgacagtcttcagtgggatgaccatagggaggagactgaagaactgatgagaaaatatgaggctcgactctatattcttcagcaagcccgacgggatccactcaccaaacaaatttctgataaccaaatactgcttcaagaactgggtcctggagatggtatcgtcatggcgttcgataacgtcctgcagaaactcctggaggaatatgggagtgatgacacaaggaatgtgaaagaaaccacagagtacttaaaaacatcatggatcaatctcaaacaaagtattgctgacagacagaacgccttggaggctgagtggaggacggtgcaggcctctcgcagagatctggaaaacttcctgaagtggatccaagaagcagagaccacagtgaatgtgcttgtggatgcctctcatcgggagaatgctcttcaggatagtatcttggccagggaactcaaacagcagatgcaggacatccaggcagaaattgatgcccacaatgacatatttaaaagcattgacggaaacaggcagaagatggtaaaagctttgggaaattctgaagaggctactatgcttcaacatcgactggatgatatgaaccaaagatggaatgacttaaaagcaaaatctgctagcatcagggcccatttggaggccagcgctgagaagtggaacaggttgctgatgtccttagaagaactgatcaaatggctgaatatgaaagatgaagagcttaagaaacaaatgcctattggaggagatgttccagccttacagctccagtatgaccattgtaaggccctgagacgggagttaaaggagaaagaatattctgtcctgaatgctgtcgaccaggcccgagttttcttggctgatcagccaattgaggcccctgaagagccaagaagaaacctacaatcaaaaacagaattaactcctgaggagagagcccaaaagattgccaaagccatgcgcaaacagtcttctgaagtcaaagaaaaatgggaaagtctaaatgctgtaactagcaattggcaaaagcaagtggacaaggcattggagaaactcagagacctgcagggagctatggatgacctggacgctgacatgaaggaggcagagtccgtgcggaatggctggaagcccgtgggagacttactcattgactcgctgcaggatcacattgaaaaaatcatggcatttagagaagaaattgcaccaatcaactttaaagttaaaacggtgaatgatttatccagtcagctgtctccacttgacctgcatccctctctaaagatgtctcgccagctagatgaccttaatatgcgatggaaacttttacaggtttctgtggatgatcgccttaaacagcttcaggaagcccacagagattttggaccatcctctcagcattttctctctacgtcagtccagctgccgtggcaaagatccatttcacataataaagtgccctattacatcaaccatcaaacacagaccacctgttgggaccatcctaaaatgaccgaactctttcaatcccttgctgacctgaataatgtacgtttttctgcctaccgtacagcaatcaaaatccgaagactacaaaaagcactatgtttggatctcttagagttgagtacaacaaatgaaattttcaaacagcacaagttgaaccaaaatgaccagctcctcagtgttccagatgtcatcaactgtctgacaacaacttatgatggacttgagcaaatgcataaggacctggtcaacgttccactctgtgttgatatgtgtctcaattggttgctcaatgtctatgacacgggtcgaactggaaaaattagagtgcagagtctgaagattggattaatgtctctctccaaaggtctcttggaagaaaaatacagatatctctttaaggaagttgcagggccaacagaaatgtgtgaccagaggcagctgggcctgttacttcatgatgccatccagatcccccggcagctaggtgaagtagcagcttttggaggcagtaatattgagcctagtgttcgcagctgcttccaacagaataacaataaaccagaaataagtgtgaaagagtttatagattggatgcatttggaaccacagtccatggtttggctcccagttttacatcgagtggcagcagcggagactgcaaaacatcaggccaaatgcaacatctgtaaagaatgtccaattgtcgggttcaggtatagaagccttaagcattttaactatgatgtctgccagagttgtttcttttcgggtcgaacagcaaaaggtcacaaattacattacccaatggtggaatattgtatacctacaacatctggggaagatgtacgagacttcacaaaggtacttaagaacaagttcaggtcgaagaagtactttgccaaacaccctcgacttggttacctgcctgtccagacagttcttgaaggtgacaacttagagactcctatcacactcatcagtatgtggccagagcactatgacccctcacaatctcctcaactgtttcatgatgacacccattcaagaatagaacaatatgccacacgactggcccagatggaaaggactaatgggtcttttctcactgatagcagctccaccacaggaagtgtggaagacgagcacgccctcatccagcagtattgccaaacactcggaggagagtccccagtgagccagccgcagagcccagctcagatcctgaagtcagtagagagggaagaacgtggagaactggagaggatcattgctgacctggaggaagaacaaagaaatctacaggtggagtatgagcagctgaaggaccagcacctccgaagggggctccctgtcggttcaccgccagagtcgattatatctccccatcacacgtctgaggattcagaacttatagcagaagcaaaactcctcaggcagcacaaaggtcggctggaggctaggatgcagattttagaagatcacaataaacagctggagtctcagctccaccgcctccgacagctgctggagcagcctgaatctgattcccgaatcaatggtgtttccccatgggcttctcctcagcattctgcactgagctactcgcttgatccagatgcctccggcccacagttccaccaggcagcgggagaggacctgctggccccaccgcacgacaccagcacggatctcacggaggtcatggagcagattcacagcacgtttccatcttgctgcccaaatgttcccagcaggccacaggcaatgtgaagtattcatccggccaaccaatgtttcctgacgtacagtgttgcccttttcagcaaatgccaattccaagttccattaaatcagaagctccatggctccttggcccacgatgttgagtgctgactgtgtgttctactgaaagagtaaaacactgactatccaaagagaaatggatattttgtttttataataaccatatattattgttttcttcttccctttctatgcaagtgtaaattaatgaacagagaggtatttggaaatggtaatacatttgtcacggatttgtataatgtatacagcattgggaaagtgggtgggggctttctaatatgataccgtctttttaataactatgacaaagcttacataagaattagaagaccactttacatttttacattccttctgctgttcatattaaccttgcacaattacttcattttttctttgactcttttaccacaatgttttggttatttataatttatcagccatatgtttatcagccatataaccaactagatcccaaatagatccatgtatttgtttccgtgatttggccacattaataaattcataaatttcaatcaaatatcttatatatacacacatatggtttaagctacagccctgtgtatgccgtttaactttatttgacgttgcccacttacttctttgctgaccacttggataaccgtaataaaaatcctataagcctaaatggcatttcttttgggatatttttcctgcattttattccctttttatataagtaggaattaattatttattttatgtcttaatctatttgataaagaagactacattataataatctcaaagatcatattaccaaaggttgcccacttgagcatattttcattttgacacagaaacaaaatttagtacaacctttcctagttcccatgtcttgattttcatcattacatgcacagcagacctttacctattgtgataccagaacacatcattgtctttggttcccttcaaagagaattttattgttgttttgtattttcaagtccttaatagttcttgaaactcctagttgttttcttgttgaaagcagacacacatttagtgcacggcttattttacctttcgggtgaaagatcagatgtttttatacccttcacttgatcaatatatttggaaagaatgtttatcaaaagtctatgtcactgcttctacagaagaatgaaattaatgcttaggtgatggtacctccacctacatctttttgagtgcattcaattatgtattttggtttagcttctgatttaacatttaattgattcagtttaaacatgttacttaattagcaaatgtagaggaaccaaaaaaaggtgaaaataatatgttttgattcaaacctaaagacataaaaacataaagacattttaactttgggttctctttagctgggatctggccagaaggaggcttaaagttagaaattgctattattttagaataggttgggtgggttggggggcaagggtgtctatttgcagcagagatattttgaaaagaagaaaattgttttatataaaaaggaaagccatgaccacctttctacctcagatccatcttcatccattgcattggaaactgctttatgctgctgcagtctgcaaagtctagagcttttatcaggccatgtcatacccaagaaagcacctatttaaagaaaaaacaattccctgagctctcaactccaagttgtagatttggtgtcttccttgttcttactttaaaaagtcatgtgttaattttttttctgcctgtatttgtatgcaaaatgtcctctatctgctattaaagaaaagctacgtaaaacactacattgtaaccttctaagtaataataaataaaaagaaatatattgcagtaacaatgggaagtaagtatgtagttcttttgaaatatgtggtaaagaactaatcacagactatcatctaatctggttacatattgtatttttcatcctgaataaaagtaattttaacacaaaaaaa

SEQ ID NO: 684 - DNA, 7859 bp, Homo sapiens
ggaagcggctgcggttctcgccggttctcagccggggtttgatagttgtcaggaggattcgacgttcagtgcccagggatgtggagagttcttggagtctctgcggagtccctgggccagatctcacagtgaaagctgcaggatcttccttctgaccccagcagtccccgttgagtccaccgatcccactggaattataaagttgtcagcaagaaagccccagggctgaagtccaagtccgtcgggaacatgccagctaacgaggacgctccccagccaggggaacatggcagtgcctgtgaggtatcagtgtcatttgaggatgtgactgtggacttcagtagagaggagtggcagcaactggactctactcaaagacgcctgtaccaggatgtaatgttggagaactacagccacctgctctcagtggggttcgaagttcctaaaccagaggtcatcttcaagttggagcaaggagaggggccatggacattggaaggggaagccccacatcagagctgttcagatgggaaatttggaattaagccttcccagaggagaatttctgggaaatctacatttcatagtgaaatggagggtgaagacacaagagatgattcattatactctattttagaagaattgtggcaagatgctgaacagataaagagatgtcaggaaaaacacaacaaacttctgagtcgcactactttcctcaataagaaaatattgaatacagagtgggattatgaatataaagactttggaaaatttgttcatccaagcccaaatctcattctttcacagaaaagaccccataaacgtgattcatttgggaagagttttaagcataatttagacttacatattcataataaaagcaatgcagcaaagaacctggataaaactattgggcatggtcaagtttttacccagaactcttcttatagtcaccacgaaaatacacatacaggagtgaagttctgtgaacgtaatcaatgtggaaaagtcctcagcctcaaacactcactcagtcaaaatgtgaaatttcccattggagagaaagcaaacacatgtactgaatttgggaagatcttcacccagaggtcacatttctttgctcctcaaaaaattcatactgtggaaaaacctcatgagcttagcaaatgtgtaaatgtttttacacagaagccactactcagtatatatctgagagttcatagagatgaaaaactctacatatgtactaaatgtgggaaggccttcatccagaattcagaattaattatgcatgagaaaactcatactagagagaaaccctataaatgcaatgaatgtgggaaatcatttttccaggtgtcatctctactcaggcatcagacaactcatactggagaaaaactctttgaatgcagtgaatgtggtaaaggcttctccctgaactcagccctcaatatacatcagaaaattcacactggagagagacatcacaaatgcagtgagtgtgggaaagcctttacccaaaaatcaacactcaggatgcatcagagaattcatacaggagagaggtcctatatctgtactcaatgtgggcaggccttcatccagaaggcacacttgattgcacatcaaagaattcatactggagagaagccttatgaatgcagtgactgtgggaaatctttcccttctaagtcacaactccagatgcataagagaattcatacaggagagaaaccctatatatgcactgaatgtgggaaggctttcaccaacaggtcaaatctcaatactcaccagaagtctcatactggagaaaagtcttatatatgtgctgaatgtgggaaggccttcaccgacaggtcaaatttcaataaacaccagaccattcacactggagagaaaccctatgtttgtgctgattgtgggagggccttcatccagaagtcagagttgattacacatcagagaattcatactacagagaagccttataaatgtcctgactgtgagaaatccttctccaagaaaccacatctcaaagtacatcaacgaattcacacaggggagaaaccatatatatgtgcagaatgtgggaaagccttcactgataggtcaaatttcaataaacatcagacaattcatactggagataaaccgtataaatgcagcgactgtggaaaggggttcacccagaaatcagttctcagtatgcatcgcaatattcatacatgaaagtaatcctgtttcttgaaaatgagagccttataaggctgacaaaagtcaggtctaactatatattataaaattcatccaagacagatcctatatgaatacattgtataaggaaaagcatcaggctatctcacttgagatggaaaaaaattattcagaagaaactctcttaaaaatgcattgaaggagagagaatttgcacagcctcatgaaatatagtaaaagtcatactgggaaaaatgttgtcagtttggtgtgttaggaaaagccttcctatagaaagtattataagttaaattgttaccaaattctttataggaaggagagtgcaaaattatgtaaatgatggtcaggtttactgtgttatattaagcaatttaaagtgataacaaaatgaaaggtagtgcagcaaaataatataactggtgagtagacctactttcagttccatagggtgtttgtggcagaacacagtgcagaacaggaggaatattacattttttttcaaatttagaataattatgtccatcaaatgtttcttactgaatatgtctatcaaatatgtttcttattgaatatttctatcaagtgaatccacaatttaaaagtcactttggttttatatatacacacatctgcagatataattttataagaacacacaaatataatcctgtcattcgtactggtttccatgacatagtatcttgttttctttcattgtggtacaatgcaaagtagccacagattcctcccatcccaagtagcgtctctttgtctactacttgactttgaacttggccacgtgactttctttggccaatggaaattagcaaagagaatcaataagaagcttgagaagtgtgcaaagcctgccttgaagcttaccctctcttgctgctctttgcaaacctgaagaatctcaaattgccctactcgggggtgaggagccaccacatggagcagtggtgagccagccttgctgaggccccttagaccaagtagcctgccaattgtcagaattgggagtgaggttttccaagacctctagccccagctgagccagcctagcccagaagagccataccagttattccagctgatttacagaattgtgagataaataaaatgatgatagttttaagcaacatgagttttggggttagtttgttgtacagaaaatgctaagtaatatttgaaagtatatgtttgggggagggggcatagtggaccaaaacgtgacaagtggcattggctttgggtctgagtggcacgtagaaactggaaaaacagtgaggaaaactgtttttcctcaaataacaaaggttggatagttggcaacccatgttatttagtagggaaagatacagaaaaacagtcatcaccatactctgtgggaagatagagaatggaccaaacgaactggtggatctggctaaggagatttgcagcagaatatgggaagtatcagtttgcttcttttagctgcatatgatacgatacagaaagagagaaatgaactaaagaaataactgtttctttggcaagcagaattcagaagaaatatggaaaagccaaggattgctgggttgaaaaataatgctttcacatcactagtctctccagctatctaactattcgcaaggtaaaaaatggcctcagggtaaagatcaaatcatggttgtgtctgtaagactctttattacagtgtgtgaaatagttcagttggtgcttaggagaccatctcagctaaacttaagggcttctaaaaatcttcatgacgttgtcccatagaagcctgacatactactcaaagtggagagagacctatcttaaaaagaattgctgatgtggcatttggggaaaggagtagatccaaaccagattcataggaaactcacaaagtttttaatagagttttactagtaaaactacctccaggttggacttccagggactgaaacagttcaaaatgaaaagtggcctctggattcccctccctaacttctatgaataggatacaagctgagaaagttactcagatgcaaacacggtccatttcttatggaaaatgaagggcatctcagagggaagacccaagaacaatatattaaaatgagctggggagccgttcccagggagaactgtgccctaatcaagaaacgtatctgcccctggagccaagggaaccgacaacatttgctctgtgggatttcagaatcgttatggaacagtgactgatatgtgcctcatggtcctcctctttttgaatgggagtgtctattacagttatcctgtacctatcccaccattgtatatattgggtgtatgttggggggcatgtaacttgtcatttagctcacaggtatctggatcaagaaactgaaaaactgtacccaaggaacctcagccacacctgaacctgatacagaagacttgagattctggattggagcttgatgccacaattttggatgagaaatttggaggtcctggaataggggtgaacacattttgcatggggtggtaatgtgaatactttgtgaccagaagacacactgtgttaggtagaaaaatgctacagatgtcttcatccctgtatatgtgtccttcttcagtctttatttctctttgtgtttcagttaggataatttctattgatctgtcttcaaattcactgatgttttttctctcaccctggctttgtcaagtctactgctgaacccattgaaggcattcttcaactcagttatgttttatttttatttgtaatatttccatttgattcttacaattttcatatatctgctgaaattccccatcttttcatgcatgttcatgttttcccctttaccctttgtcttagtcagtttgagctgctataataaagcaccatagacttggtggcttataaacaacagaaatttattcctcacagttctggagcctggaagtctgagatcagaatctagcaaggttaggtcttggtgacggccctcttcaaggttgcaaactgctcacttcttgcattttcccatgtctacagctagagaactctttgggatcccttttataagggcaccaatcccattcatgagttctccacccacattacctaactaccacccaaaggctccacctcctaataccatcacattgaggattaggattttaacatatgaattttgggggggatgcaatcattcagcccataataccctctaacatattaatcatagttatttttaactccctgtctgatagttccaactactaggtcaactgagtctaggtctgttgttgtcttctcttgctcttttgcatctaataatttttggctgaatgtcacagatgttgtatgtaggacagtagaaactgaggtaaatagtaattattcctggaaacagccatggttgcccttttgataggccattagcatggggagattgaatccatctaatcaggagttgggctgagtttgtgtttctttgttgccagtgttacctttgctgtaccatagacttaaaattcctctattgttatcttatgcttgaggtaggcactggtttgcccagagaatttttatttttcccagaccacacttgcctttaggcctgtaggcctttcctgtgtgcctgcatctcagggagggtctctctccatgttgttgcctctatgttagtagtagacaactgttattacttggttcttgctgacctggtgagttggggggcaggggttgtcttgggccagcctcagtttttgtcaggccatgaatccctgggtcttgagggtgggattttttagtgatcctgccctcttccactggtagaaggcctttaatgatctgggcccaggatgatttcctgcccttttatcatgggtggaatttttttttccatttccctcactctagtcacagtgaatctttaactgtgtcctgagggcaacagggtttgctgcacttcttttagtggcttaaggattttgttctgtaggggagtagggtttcattggagctttgtgccatttctatgttaacagcagcccccttgcaggcctaccccatggaggtaggctttctccagtcttcttccttgtccccgtgtttcttgagagcactcagtggatgactatggagaagagcctgcaagcagagaccaactacccttaggtctacagctctcatgagtctcccgcactcagcctttagcaattcattaaaaattcttgttgaattcttactgcttgtatagtggcctcatcttccttcctgctgtaccacagatggcccaggagaggcacttgtcttttattatatttcaagctagttggttgctctgtaatcttagctctctgatgggttcgagaaaacttatgtttttgcagattacccagctttgttcttgttataaagatgggagcagtgttctttccagatgtctacatgctaggcagaaactagaagtctggacagtctccatggtctcctactatcagaatatgtgcccttttcagtgtgactttgccacttcacccatcaagaggtagaatctatttcttcaacccctgcaactgagcttggctattttgttggccaatgggacattaacaagtatgatacaagcagaggcttgagaagtgcctgcacaatgaggcttgcccacttttgcagctctttggaatcctgaacccatgtgtggaaaagcctgaactgtgctgttggaaaatgagagcgatcacatggagcagtaatggagcaaagaccagccatcccagttgagataccctacaccaaccagattttcaactgctggacatatgaatgaagctatcctaggcatgcagtcttggtcaaggcaactttggctggcagtctctgagatgaccctgaatgatccccacctcctggtattctcactcttatataatcccctcctcttgagtttggactggaattagtgacttggttctagtgaatagaatgaggcagaggtaatgggatgtcatgttcaagattggttacaaaaagactgtggcttccattttgggtgcttgcttactctctcagatggctcatcataggggaaacctgctgctacatcatgagatagccctgtggaaaggtccacatgagtgaactttgaagcatatcctcccccagtttagcctttagatgaggaccacagccaaatagcttgactgtaagccagatagcttgactcatgagggaccttcagccagaggcatcttttgagccatacgaattcctgacccatagaaactgcaagacaataaatgttgttttaagttgctaaattttagggtaatttgttacacagtaataggttaataatacactggcccagattaggaaggttctgccatccatcccagccatcccaaacaactaccagaataatggattaaaacgttaactgttttaagtcactaagttttgggcagcatgataacaacccagcaaaaagctaactgatacattgattatttattgcatttcttcctccactattcttctctaacagatgaccaatactaataaactactgtgaacactttcatgttttaatctctgctctgtgctcataatcatatatagacat

SEQ ID NO: 685 - DNA, 1691 bp, Homo sapiens
tgcggccgcgtttccgtggagacagccgagcctgcggaaggcggcggcggcggcacctgcgatcagcggctggggcaggttatggtagtgcggactgcggtgtgagcagagcggccacggggcccgccatgcgccggcggccctgacatgggcgccagcgggtccaaagctcggggcctgtggcccttcgcctcggcggccggaggcggcggctcagaggcagcaggagctgagcaagctttggtgcggcctcggggccgagctgtgccccccttcgtattcacgcgccgcggctctatgttctatgatgaggatggggatctggctcacgagttctatgaggagacaatcgtcaccaagaacgggcagaagcgggccaagctgaggcgagtgcataagaatctgattcctcagggcatcgtgaagctggatcacccccgcatccacgtggatttccctgtgatcctctatgaggtgtgaccctgggaggtggcagacagaagcaccccctgccccggcaagaaactcccaggctcaatcaaggtgtggcttccattgaggagcccaggctggggccacaaccctgaataaactctgttggcccataaccttcagctgtgagcgggtcggtcccacagtattggttgggtgttggtttgtgtgtggacaagaggtggttggtgggtggtgaaggctaatggcagagttagcaccccactctcccaagccacccctgcaagcagcatagcagggcatataccagtcaggaatgcccgttacctggttccttgcctggtctgctttcttccaagtttgcctggggcctagccctgctagaggctacagcactttacaagcaaggtatgctttcttccagcccctaggctgtgggcactgtatacaagtaggaacttcctttccttcacttcccttttaacccctagtcagagcatttcagccgtttgctacctcgattcctcctgtgttggacagaggctgggggcagtgccagcctgattcttccgacctacctgccatttgttcccgccttcagatggatggacagtttgctggctattgataggagtggggactgggtgggggcttctccctctacccagggctgggctgatccccctactgcaactaactgttgccccccaaccccgaacccccagttgaggagttgagagagtgcaggctggggtcaggacaggctgcggatgcttgtgcctatggggagttactccaacccacctattctgtctaatctccatggctttgcaccaaatcctccacccctccaattgggaggggactgttcaccaccttgtggtaagggacaacaccctaaggctggtgccagtagttatgagtagcctaccaccccctcccttacagtaacccccaccccttcaggatcagtcaagggaaagcactagaacccctgggtagggaaagaaaggagggaaaaaccataaaaggaatacttataatgtgaaggtttgtaaatagtccatgatgatgtcgtggcagagtctgatttctatatagaggtgactttttttttaagtactgtgcaagctctgtgcttctataatgtgggaaatggcttggggaggatggcccctagcttaggaagactgttgtgttatttgttcaatttcaataaaatgatttgtagatcctgc

SEQ ID NO: 686 - DNA, 6768 bp, Homo sapiens
aaaaaacaggaagtgcctacggaggccgggccggcagcggcggccgggcatgaagccgggcggctacgggatcgcgggcggcggcggcatcgcgggcggcggcggcgatgagcgacatagtggagaagacgctgacggcgctgccgggactctttctgcagaaccagcccggtggtgggcccgcggccgccaaggcgtccttctcctcgaggctgggcagccttgtccgcggcatcacagccctcacctccaagcacgaagaagaaaaattaatccagcaggaactgagtagtctgaaagcgactgtttctgctcctactacaacactgaaaatgatgaaggaatgtatggtgagacttatatattgtgaaatgcttggatatgatgcttcctttggctatattcatgcaatcaagttagcccaacaaggaaacctcttagaaaaaagagtaggttatttggctgtttccttatttctacatgaaagtcatgaattattgcttctccttgtgaatacagttgtaaaggatctgcagagcactaacctagtagaagtgtgtatggcactgactgttgttagccagattttcccctgcgaaatgattccagctgttcttccattaatagaagataaacttcaacattctaaggagattgtacgaagaaaagctgttctggcattatacaaattccatctcattgctcctaatcaagtacaacatattcatattaagtttcggaaagcactttgtgacagagatgttggggtcatggctgcctccttgcatatatatcttagaatgattaaggagaattcatctggatataaagacttgactgggagttttgtaaccattttgaagcaagtagttggaggaaagctcccagtagaattcaattaccacagtgtgccagcaccatggttacaaattcagctcttgagaatactgggacttctaggaaaagatgatcaaaggacaagtgaattaatgtatgatgttcttgatgaatccttacgaagagctgagttaaatcacaatgtcacatatgctattttgtttgaatgtgtgcatacagtctattctatttatcctaaatcggaattacttgagaaggctgccaagtgcattggaaaatttgttctgtcacctaaaataaatctaaaatatttaggactgaaggctcttacctatgttatccaacaggatcctactctggctcttcaacaccagatgacaataattgaatgtttagatcatcctgatcccattattaaaagagagactctggaacttctttacagaattactaatgcacagaatataacagttattgtccagaaaatgcttgaatatttacatcagagcaaagaagagtatgtcatcgtcaatttggtcggcaaaatagcagagctggctgagaaatatgctcctgataatgcatggtttattcagacaatgaatgctgtgttttcagtaggaggagatgtaatgcatcctgatattcccaataactttctgagactactagcggaaggttttgatgatgaaacagaagatcagcaattaagactctatgcagttcagtcttatctcactttactggatatggaaaatgtgttctatccacagagatttcttcaagttatgagttgggtattaggggaatattcctacctcttagataaggaaacgccagaggaagttatagctaagctctacaagttacttatgaatgactctgtgtcttcagaaacaaaagcctggttaattgctgctgtgaccaaattgacatctcaggcgcactcttctaatacagttgagagattaatccatgaatttaccatatctttggatacttgtatgagacaacatgcatttgaattaaaacatttgcatgagaatgtggaacttatgaagagcttgcttccagttgacaggagttgtgaagacttggtggtagatgcttctttatcttttctggatggttttgtggctgaaggactcagtcagggtgcagcgccttacaaacctccccatcaacgccaggaggaaaagctttctcaggaaaaagttctcaattttgaaccatatggactctccttttcttcatctggcttcactggacgacagtctcctgctggcatttctcttggttcagatgtatctgggaatagtgctgagacaggactgaaagagacaaatagcttgaagctggaaggtataaagaaattgtgggggaaagaaggctatcttcccaagaaggaaagcaaaactggtgatgaaagtggagctctgcctgttcctcaagagagtataatggagaatgtagatcaagctataactaaaaaggatcaatctcaagttcttacccaatctaaagaggagaaagaaaagcagctgctggcatcatcattatttgttggtctaggatcagaaagtacaatcaacctgctgggaaaagcagatactgtctctcacaagttcagaaggaaatcaaaagtcaaagaagctaaaagtggcgaaacaaccagtactcataatatgacctgttcttcctttagttctttgtcaaatgtggcatatgaagatgattattattcgaatactttgcacgatacaggagacaaggaattaaagaaattttctctcacttcagaacttttggattctgagtcactcacagaactgcccttggttgagaaattctcatattgtagtctgtctacaccttcattgtttgctaataacaacatggaaatttttcaccctcctcaatctactgcagcctcagttgccaaggaaagctctttagcttcatcttttttggaagaaactactgaatacatacactcaaatgctatggaagtctgtaataatgaaactatatcagtgtcttcttataaaatttggaaagatgattgtttattgatggtctggtcagtcactaataagagtggtttggaattgaaaagtgctgacttagaaatttttcctgcagaaaatttcaaggtgactgagcaacctggatgctgtttgcctgtaatggaagcagaaagcaccaaaagctttcaatatagtgtgcagatagaaaaaccttttacagaaggaaatcttactggttttattagttatcatatgatggatactcattctgctcagctggaattttctgtaaacttatcactattagatttcattagaccattaaaaatctcaagtgacgactttgggaaactctggttatccttcgcaaatgatgtgaaacaaaatgtaaaaatgtcagaatctcaagctgcacttccttctgcactaaagactctgcaacagaaactaagactccatattattgagattataggcaatgaagggctattggcctgtcagctgctcccatccatcccctgcttactgcattgccgagttcatgcagatgtattagccctgtggttcagatcctcctgttctactcttcctgactatttactgtatcagtgtcaaaaggtgatggagggatcctagcagaagccctgctaaattttactccatcaagatcaatggtttacatagataaacttatttaccaaagtaaaaagaactcatggtacttctaatgaaaatggggattattacaagtgtggtttatatgttttctttgtgattcctggtcaagaaagatccccaaaactgtatccctaacctttaactcaggattgtacagtatgtttaggtccctcaaaaagtgacctaagctaatgttataaactgctaatgatttatatatcacttagtgtgtagagggactgaaaatatttattttgttataaataattttatagcacgtttactctagtgctagctaatttgtaataaagccaagtctcagttttctgcattaaatggaagggagacatgaaattgataatctcaaacttaattcatatttggctttggaatgtagtgtatggtttttggtagggaagtcaatattttcgattatgttttgcttagatcagtgttgaactaagttggcatagcacacactaacagttgtaggagatccatgagcatgctggatattgaggggatccaatctgtgatctattttttattatagataactgttacacataatttcagatcgtttggctgtaaaatttgtctgttttccacttggagttattttaaaattcaaagtaaatcactctattcttattttgaaaactcagagccattttatatagaaacaaaacccataagagcacacagtaacaaagcaaacagatacaaaaatgactttttagttatgacaaatattttagttggttactacttaggtccttttggcaaatgaaaatttgtgattagagtataaatggcaaaactatcttttcctggcctttgaatccactagtacttaatggatatagctgaagcagagactaagtataacatacaggttcttcagtaaaatatatcattttcatgttatagttatgcctgtgtggcctctgtcagaactattatcagtaaaagaggttaagcctatatatgaatgatggaccaaaaccttgaggttgtacattaactgaaatagtattttataaaatcttatggtgctgtggaaaatatttattatttcaccttttctgacacttcaccatggagactattcaggtaatacaattttaagtcattgcagttaatactctggttaattggtactgttaatcacccaggtcaggaattctgattttaggttatctcattaatcatggctgataaagaagctaaggggattctccagatctaatagatttcattagtcatttgtgtcgagtattcctccctaaaaacaaaagcagtattttctttctcaattaatttttaagttattcattaaaaaatatataacatcttaattttattcttttaaaaacatacagtgaagccttgctacaagagtcataagtgactggaatttcttgcataataggttcctccttttgaatagatcagattcatccccaggctctcagcagtgtcatgatgaaatgagtgtgctgacttcaggggtgtggtggacactggtagctagccttatcagctccctccttattcctacctctgtcagcagcatgcctcgccccttacctaattctgctgtgactctgacagagaggaagtgccttctcactttgcaaaggaatgcagcatgtcacaaaggaggtgctccaattttttgtgtccttacttccctatgtttgcctagttactgaggctaggtcgagtgtgaagcaataggtgtaagatgctgagagcacatggacagctaccagggagatctgttgcttggttacagggtgtattcatgagtggtagctgcagttgtcgtgagagacatgcttggcatacagagctgtctaatgggtgggagacatgtaatggtagatttagggctgggagcatgattttgggtctgcccaaaggaacatggtgtcacttttgttctttctgacccactaaataaaaagtagtgtaacagggtttcactggaatgtttattagaaagtttacactttttatatttttatgattttaaaaacaaacaataatagaaaaacagattttaaggaacttcagagcagtatatattctgtctaaactcactgaatattttaagttgtaaatcaggtgtccaccaacctttatttttgcattgcaggagatgtgactgtaaagtagggagtttttttttttgagacagagtttcacccttgttgcccaggctagagtgtaatggtgcaatctccgctcactgcaacctctgcctcccaggttcaagcgattctcctgcctcagcctccctagtagctgggattacaggcatgcaccaccacacccggctaatttttttatatttttagtagagacaaggtttctccatgttggtcaggctggtctcgaactcccgacctcaggtgatctgcccgcctcagcctcccaaagtgctgggattacaggcgtgagccactgcgcccggccaaattatttttgtgggtagattcattctctttacctaatagtcataatttagtcagtgaagggacaacatctggggtaagagctatggaggaggtgctcagctttgtgagttttgtgccaggcatctttgctgaaaatggagatggcagcaagtgtgaatctgggggaatataagggaagacagaaaagccttaagagtagacggaggaagaagggtaccagaatagtccctgtggaggcaggcagatcagagctcagggtttgaaagtgggcctgagtaagggtcctgctagagaaactgcagatggaagctgagcagttaccaactgctaatgtgccaagtataccaagcacagcatgtgtcctgtagaggagcattattttaaacaatgttctactatcatctaccaaaataattgtggtaaaagtgtagtattttattttttccttttatgtcagcaatattttaaaatattgatctgtttatcttatatttttatggataaatgtagtatttgcctcatgattgtgagccactgagagtgcactgaacctattcacatgtctttaagatgttttgctgtgttaaaattttaggagagaaaaatacaagtgaataattatttaataggcatttattactttattttggagttgaattctgtcatttgaaaaagttcagtaatgtaataaatacaaagtgatctgcactgttaaaaaaaaa

SEQ ID NO: 687 - DNA, 5063 bp, Homo sapiens
gccttagaaaagttaacgagaaccagatgtggtggccactgccgaactttctcagagccggtgattggtccccagccgagggcctcagccaattagcttgctgggtgggcctggagtcccgccccgcccaggcgcccgcggagatccaggttcgaggctggcgcggcgcggagagtgggctggaggccggggcgggacgcgttgtgcagcgggtaagcgcacggccgagcgagcatggagggggaccgggtggccgggcggccggtgctgtcgtcgttaccagtgctactgctgctgccgttgctaatgttgcgggccgcggcgctgcacccagacgagctcttcccacacggggagtcgtggggggaccagctcctgcaggaaggcgacgacgaaagctcagccgtggtgaagctggcgaatcccctgcacttctacgaagcccgattcagcaacctctacgtgggcaccaacggcatcatctccactcaggacttccccagggaaacgcagtatgtggactatgatttccccaccgacttcccggccatcgccccttttctggcggacatcgacacgagccacggcagaggccgagtcctgtaccgagaggacacctcccccgcagtgctgggcctggccgcccgctatgtgcgcgctggcttcccgcgctctgcgcgctttacccccacccacgccttcctggccacctgggagcaggtaggcgcttacgaggaggtcaagcgcggggcgctgccctcgggagagctgaacactttccaggcagttttggcatctgatgggtctgatagctacgccctctttctttatcctgccaacggcctgcagttccttggaacccgccccaaagagtcttacaatgtccagcttcagcttccagctcgggtgggcttctgccgaggggaggctgatgatctgaagtcagaaggaccatatttcagcttgactagcactgaacagtctgtgaaaaatctctatcaactaagcaacctggggatccctggagtgtgggctttccatatcggcagcacttccccgttggacaatgtcaggccagctgcagttggagacctttccgctgcccactcttctgttcccctgggacgttccttcagccatgctacagccctggaaagtgactataatgaggacaatttggattactatgatgtgaatgaggaggaagctgaataccttccgggtgaaccagaggaggcattgaatggccacagcagcattgatgtttccttccaatccaaagtggatacaaagcctttagaggaatcttccaccttggatcctcacaccaaagaaggaacatctctgggagaggtagggggcccagatttaaaaggccaagttgagccctgggatgagagagagaccagaagcccagctccaccagaggtagacagagattcactggctccttcctgggaaaccccaccaccgtaccccgaaaacggaagcatccagccctacccagatggagggccagtgccttcggaaatggatgttcccccagctcatcctgaagaagaaattgttcttcgaagttaccctgcttcaggtcacactacacccttaagtcgagggacgtatgaggtgggactggaagacaacataggttccaacaccgaggtcttcacgtataatgctgccaacaaggaaacctgtgaacacaaccacagacaatgctcccggcatgccttctgcacggactatgccactggcttctgctgccactgccaatccaagttttatggaaatgggaagcactgtctgcctgaaggggcacctcaccgagtgaatgggaaagtgagtggccacctccacgtgggccatacacccgtgcacttcactgatgtggacctgcatgcgtatatcgtgggcaatgatggcagagcctacacggccatcagccacatcccacagccagcagcccaggccctcctccccctcacaccaattggaggcctgtttggctggctctttgctttagaaaaacctggctctgagaacggcttcagcctcgcaggtgctgcctttacccatgacatggaagttacattctacccgggagaggagacggttcgtatcactcaaactgctgagggacttgacccagagaactacctgagcattaagaccaacattcaaggccaggtgccttacgtctcagcaaatttcacagcccacatctctccctacaaggagctgtaccactactccgactccactgtgacctctacaagttccagagactactctctgacttttggtgcaatcaaccaaacatggtcctaccgcatccaccagaacatcacttaccaggtgtgcaggcacgcccccagacacccgtccttccccaccacccagcagctgaacgtggaccgggtctttgccttgtataatgacgaagaaagagtgcttagatttgctgtgaccaatcaaattggcccggtcaaagaggattcagaccccactccggggaatccttgctatgatgggagccacatgtgtgacacaacagcacggtgccatccagggacaggtgtagattacacctgtgagtgcgcatctgggtaccagggagatggacggaactgtgtggatgaaaatgaatgtgcaactggctttcatcgctgtggccccaactctgtatgtatcaacttgcctggaagctacaggtgtgagtgccggagtggttatgagtttgcagatgaccggcatacttgcatcttgatcaccccacctgccaacccctgtgaggatggcagtcatacctgtgctcctgctgggcaggcccggtgtgttcaccatggaggcagcacgttcagctgtgcctgcctgcctggttatgccggcgatgggcaccagtgcactgatgtagatgaatgctcagaaaacagatgtcaccctgcagctacctgctacaatactcctggttccttctcctgccgttgtcaacccggatattatggggatggatttcagtgcatacctgactccacctcaagcctgacaccctgtgaacaacagcagcgccatgcccaggcccagtatgcctaccctggggcccggttccacatcccccaatgcgacgagcagggcaacttcctgcccctacagtgtcatggcagcactggtttctgctggtgcgtggaccctgatggtcatgaagttcctggtacccagactccacctggctccaccccgcctcactgtggaccatcaccagagcccacccagaggcccccgaccatctgtgagcgctggagggaaaacctgctggagcactacggtggcaccccccgggatgaccagtacgtgccccagtgcgatgacctgggccacttcatccccctgcagtgccacggaaagagcgacttctgctggtgtgtggacaaagatggcagagaggtgcagggcacccgctcccagccaggcaccacccctgcgtgtatacccaccgtcgctccacccatggtccggcccacgccccggccagatgtgacccctccatctgtgggcaccttcctgctctatactcagggccagcagattggctacttacccctcaatggcaccaggcttcagaaggatgcagctaagaccctgctgtctctgcatggctccataatcgtgggaattgattacgactgccgggagaggatggtgtactggacagatgttgctggacggacaatcagccgtgctggtctggaactgggagcagagcctgagacgatcgtgaattcaggtctgataagccctgaaggacttgccatagaccacatccgcagaacaatgtactggacggacagtgtcctggataagatagagagcgccctgctggatggctctgagcgcaaggtcctcttctacacagatctggtgaatccccgtgccatcgctgtggatccaatccgaggcaacttgtactggacagactggaatagagaagctcctaaaattgaaacgtcatctttagatggagaaaacagaagaattctgatcaatacagacattggattgcccaatggcttaacctttgaccctttctctaaactgctctgctgggcagatgcaggaaccaaaaaactggagtgtacactacctgatggaactggacggcgtgtcattcaaaacaacctcaagtaccccttcagcatcgtaagctatgcagatcacttctaccacacagactggaggagggatggtgttgtatcagtaaataaacatagtggccagtttactgatgagtatctcccagaacaacgatctcacctctacgggataactgcagtctacccctactgcccaacaggaagaaagtaagtacagtaatgtaaaggaagacttggagtttacaatcagaacctggaccctaaagaacagtgactgcaaaggcaaagaaagtaaaaaaggaattggccattagacgttcctgagcatccaagatgaacattttgtagtgcaaaaagacttttgtgaaaagctgatacctcaatctttactactgtatttttaaaaatgaaggttgttattgcaagtttaaaaaggtaacagaattttaactgttgcttattaaagcaacttcttgtaaacatttatcattaatatttaaaagatcaaattcattcaactaagaattagagtttaagactctaaacctgatttttgccatggattccttctggccaagaaattaaagcacatgtgatcaatataacaatataatcctaaaccttgacagttggagaagccaatgcagaactgatgggaaaggaccaattatttatagtttcccaacaaaagttctaagattttttacctctgcatcagtgcatttctatttatatcaaaaggtgctaaaatgattcaatttgcattttctgatcctgtagtgcctctatagaagtacccacagaaagtaaagtatcacatttataaataccaaagatgtaacaattttaaaattttctagattactccaataaagtgttttaagttttcctatgaaaaaaaaaaaaaaaaaa

SEQ ID NO: 688 - DNA, 5673 bp, Homo sapiens
tgccggggccggcgagccaaagaggagccggccgcgcgggccgggaggggacggccgccggagccgcgaggccaactgtcgcctggttgggcccggaaatgggacgtcgcgctttctcagggagcgtagaagcagccagggcctctccaagccgctgctgtgacagaaagtgagtgagctgccggaggatgtccaccgccacgacagtcgcccccgcggggatcccggcgaccccgggccctgtgaacccaccccccccggaggtctccaaccccagcaagcccggccgcaagaccaaccagctgcagtacatgcagaatgtggtggtgaagacgctctggaaacaccagttcgcctggcccttctaccagcccgtggacgcaatcaaattgaacctgccggattatcataaaataattaaaaacccaatggatatggggactattaagaagagactagaaaataattattattggagtgcaagcgaatgtatgcaggacttcaacaccatgtttacaaattgttacatttataacaagcccacagatgacatagtgctaatggcccaagctttagagaaaatttttctacaaaaagtggcccagatgccccaagaggaagttgaattattaccccctgctccaaagggcaaaggtcggaagccggctgcgggagcccagagcgcaggtacacagcaagtggcggccgtgtcctctgtctccccagcgaccccctttcagagcgtgccccccaccgtctcccagacgcccgtcatcgctgccacccctgtaccaaccatcactgcaaacgtcacgtcggtcccagtccccccagctgccgccccacctcctcctgccacacccatcgtccccgtggtccctcctacgccgcctgtcgtcaagaaaaagggcgtgaagcggaaagcagacacaaccactcccacgacgtcggccatcactgccagccggagtgagtcgcccccgccgttgtcagaccccaagcaggccaaagtggtggcccggcgggagagtggtggccgccccatcaagcctcccaagaaggacctggaggacggcgaggtgccccagcacgcaggcaagaagggcaagctgtcggagcacctacgctactgcgacagcatcctcagggagatgctatccaagaagcacgcggcctacgcctggcccttctacaagccagtggatgccgaggccctggagctgcacgactaccacgacatcatcaagcacccgatggacctcagcaccgtgaaaaggaagatggatggccgagagtacccagacgcacagggctttgctgctgatgtccggctgatgttctcgaattgctacaaatacaatcccccagaccacgaggttgtggccatggcccggaagctccaggacgtgtttgagatgaggtttgccaagatgccagatgagcccgtggaggcaccggcgctgcctgcccccgcggcccccatggtgagcaagggcgctgagagcagccgtagcagtgaggagagctcttcggactcaggcagctcggactcggaggaggagcgggccaccaggctggcggagctgcaggagcagctgaaggccgtgcacgagcagctggccgccctgtctcaggccccagtaaacaaaccaaagaagaagaaggagaagaaggagaaggagaagaagaagaaggacaaggagaaggagaaggagaagcacaaagtgaaggccgaggaagagaagaaggccaaggtggctccgcctgccaagcaggctcagcagaagaaggctcctgccaagaaggccaacagcacgaccacggccggcagacagctgaagaaaggcggcaagcaggcatctgcctcctacgactcagaggaagaggaggagggcctgcccatgagctacgatgaaaagcgccagcttagcctggacatcaaccggctgcccggggagaagctgggccgggtagtgcacatcatccaatctcgggagccctcgctcagggactccaaccccgacgagatagaaattgactttgagactctgaaacccaccactttgcgggaactggagagatatgtcaagtcttgtttacagaaaaagcaaaggaaaccgttctcagcaagcgggaagaaacaggcagccaagtcgaaagaggagctagctcaggaaaagaagaaggagctggaaaagcgtctgcaggatgtcagcgggcagctgagcagcagcaagaagcccgcccggaaagagaagcccggctcagcaccctcagggggcccgtccaggctcagcagcagcagctcctccgagtctgggagcagcagctccagcgggtccagctctgacagcagtgactcagaatgaactggcttcggacagaacaggacagatggatgtcgcacacgccgagactctgccgtacccctctgtggttcatattactacttctgttccatggtgtgcaggtctgcttcttaattcagtgttatgatatcttccagtttttgctttcataggtcagagatctatcttgtgtgtgcgttagacttgatgagaaggtgtgaactctgcagaaagtctcttcttcatcactgaattcagtcacttggagatgacaacttcaaatgctaacccgatgaccccagaaaaccgtgtgagattcgtaccgaagaaccttgtggaatccctttgcttaggcccaacctggtcgatagctcgagaaagaattttttccaaggaaatgtctcggatatgggtactgtatttgaaagctgttagctttgtcaacacgcattgtccttgtcatttgggccccgagctctgaccctcgtgtctgacgcggccacctctttctggaggggctgaggacagatgtgcctgcttgtggagaccaggctgggcctaagcgaagggtcatcgcagccccagcccggagcgtggagcccttggggggtggtcgggtgggatgtgcgttctccgctcgtggtgatgtcaggagctcctcggagggaacagagcggctgtgtatgcagcctgcaggtttccatacactgaagcttttacctcaactttaaaaaaaaaaaaagaagaaaagatttaaaaaaaaaaaaaaaggagactttttttgtaaggttcggcaattttctacggaagtccagcccgctgtgagtccccgcctggctagcgctgcccctgctgctgctgccgcgccacccttgggaaccacttcccgagcttatgtgtatataaatagttatttattaacatcattggtcatttttaaaaaaaagaaaataagaaaaaaccgcagaagaaatgcattcacacagtcgcagagatgcaggccttgccagtggtgtgccgggcgcgggtcctgtctggcggcggcctgtcgtctccaggtgctaactcctgccaccgcgcggtgctcacccacgtctgttcgcgcgctcgcccctgggtttgttgggttttttggtttttttctttgtggtttttttttttttttttttttgtatgaaacttggaggcttacaggtatagacagctttcagctacagcacattctaattttttattttgtttagttcttttgtattcacttctggtctctttaagactgttttaaaagaaatcaatttagggaaccccagttatataatataaactttgtaatctgagagaaaaaatgtatagtaaatctaagtcttgatttttaactttctattgtaaaaaataataatatacagagtttaatagaaggtgatgttttggttttgttttcccagaggctgccatatggtctttgagtacggggatgtcccaaactggcccaccaatgagcatggcggctccggccaggaatgccagagttagcctcccaggcttgcgggtggacatgcctgctccctgccagcctccagtggcctggccaggccctcccgagcctgtctgccctccccaggggtggaggagtctctgggccccaggaggattccctcccggagactcgcacggtgctccctgctcacgcgttgtcacagttagtccggaaatgactgaaaccaggcattctcccggacctcagcgtgggggagcctccaggcagacgctgggtatggagctgtggtgtggtctgtcctgtatggtggccagtgctttctgccagcatttctggatggatatagggactatcattagtatcctaatacacggtgattttaaaacaaccataaaattgattcagagtccactgacccttacagatgtaggtatacccttactggagagggaactctgatgaggagatgctggtaaattatcattttttaaattgctggtgagtctgacacttggtgagttttcagccagtttgttaaacttttaattaagttttgtttataataaaaatataaatggatttgaaagtttccattttttaaagttaccctcgttttcaaaggtattttctaaacagatctttaatggactatttaaaccgaatttaaggaattcacacacgacagttgacaggtcttcacgcaggctggttggtaacgtgctgccagcacagggctgggtgatacgtacaccctaagccgggggtgcctggggctggggggcgctccttgcaatgcccctccagccacagggcagtgaggtgctgcctgtgtgagccgtcgggggagcggccggctgtgggggcagcgcagcaggagcatcgtggggcctttccttctcggctggttctctgtgacggtggcgtcggctcgcctctgctcctttcatctagaaagaagccactgaccctgacagcccacggcgggtacactgagcagctgcattggtgctgtcacttttttaaggctttctgtccagacttcaacactggtttcttttcagagtttcgaaggattaatgacttcctcagcgcccttgctggcgggctgagggtgacagtcacgtccgtttcttctgtattagaaggctgcggtgattcaattagattgtcccactgctgagacctgtagggcagcttctaacatgcttttttcaaggggagaggagtagtgacaagtcgtgtgtcggaattggatttgagaacactctgaatgacccctggaggccgagggggcaggcttcgggcgtgaactgaactccagacccctctttgtgttgggcagtgtcatcttgcttacaaactgtaagacacatttttttgtgtgtttgtttttgttgttgttcttttgcagcactcacgcctctgacagtcttttgggaaagagtaacacccacatacagaatttgtcacatccagagtagcactgttccttaatactggcataatgcttccaggaagtttttcttttttatatttaaaatgttacttttctgtatgatgtgcatgcaagtttaccgtaacttttcttaaactttttagtgccgtttctagtatattcctgtaaatgtcagttactgaaaatgagtccaatgtaagtagtttagcttgtttattgcaatgctggcctcaacacaacagaataaaaatggtagaaagtactctttgatgtttctggtaatcatggacccttctcctggggcatttgttttgttttcataataaaaagcaaaaaaaaaaaaaaaaaaaaaaaaaaaaaaaaaaaaaaaa

SEQ ID NO: 689 - DNA, 2652 bp, Homo sapiens
cgagagcctgaattcactgtcagctttgaacactgaacgcgaggactgttaactgtttctggcaaacatgaagtcaggcctctggtatttctttctcttctgcttgcgcattaaagttttaacaggagaaatcaatggttctgccaattatgagatgtttatatttcacaacggaggtgtacaaattttatgcaaatatcctgacattgtccagcaatttaaaatgcagttgctgaaaggggggcaaatactctgcgatctcactaagacaaaaggaagtggaaacacagtgtccattaagagtctgaaattctgccattctcagttatccaacaacagtgtctctttttttctatacaacttggaccattctcatgccaactattacttctgcaacctatcaatttttgatcctcctccttttaaagtaactcttacaggaggatatttgcatatttatgaatcacaactttgttgccagctgaagttctggttacccataggatgtgcagcctttgttgtagtctgcattttgggatgcatacttatttgttggcttacaaaaaagaagtattcatccagtgtgcacgaccctaacggtgaatacatgttcatgagagcagtgaacacagccaaaaaatctagactcacagatgtgaccctataatatggaactctggcacccaggcatgaagcacgttggccagttttcctcaacttgaagtgcaagattctcttatttccgggaccacggagagtctgacttaactacatacatcttctgctggtgttttgttcaatctggaagaatgactgtatcagtcaatggggattttaacagactgccttggtactgccgagtcctctcaaaacaaacaccctcttgcaaccagctttggagaaagcccagctcctgtgtgctcactgggagtggaatccctgtctccacatctgctcctagcagtgcatcagccagtaaaacaaacacatttacaagaaaaatgttttaaagatgccaggggtactgaatctgcaaagcaaatgagcagccaaggaccagcatctgtccgcatttcactatcatactacctcttctttctgtagggatgagaattcctcttttaatcagtcaagggagatgcttcaaagctggagctattttatttctgagatgttgatgtgaactgtacattagtacatactcagtactctccttcaattgctgaaccccagttgaccattttaccaagactttagatgctttcttgtgccctcaattttctttttaaaaatacttctacatgactgcttgacagcccaacagccactctcaatagagagctatgtcttacattctttcctctgctgctcaatagttttatatatctatgcatacatatatacacacatatgtatataaaattcataatgaatatatttgcctatattctccctacaagaatatttttgctccagaaagacatgttcttttctcaaattcagttaaaatggtttactttgttcaagttagtggtaggaaacattgcccggaattgaaagcaaatttattttattatcctattttctaccattatctatgttttcatggtgctattaattacaagtttagttctttttgtagatcatattaaaattgcaaacaaaatcatctttaatgggccagcattctcatggggtagagcagaatattcatttagcctgaaagctgcagttactataggttgctgtcagactatacccatggtgcctctgggcttgacaggtcaaaatggtccccatcagcctggagcagccctccagacctgggtggaattccagggttgagagactcccctgagccagaggccactaggtattcttgctcccagaggctgaagtcaccctgggaatcacagtggtctacctgcattcataattccaggatctgtgaagagcacatatgtgtcagggcacaattccctctcataaaaaccacacagcctggaaattggccctggcccttcaagatagccttctttagaatatgatttggctagaaagattcttaaatatgtggaatatgattattcttagctggaatattttctctacttcctgtctgcatgcccaaggcttctgaagcagccaatgtcgatgcaacaacatttgtaactttaggtaaactgggattatgttgtagtttaacattttgtaactgtgtgcttatagtttacaagtgagacccgatatgtcattatgcatacttatattatcttaagcatgtgtaatgctggatgtgtacagtacagtactgaacttgtaatttgaatctagtatggtgttctgttttcagctgacttggacaacctgactggctttgcacaggtgttccctgagttgtttgcaggtttctgtgtgtggggtggggtatggggaggagaaccttcatggtggcccacctggcctggttgtccaagctgtgcctcgacacatcctcatccccagcatgggacacctcaagatgaataataattcacaaaatttctgtgaaatcaaatccagttttaagaggagccacttatcaaagagattttaacagtagtaagaaggcaaagaataaacatttgatattcagcaactgaaaaaaaaaaa

SEQ ID NO: 690 - DNA, 3572 bp, Homo sapiens
gcctttctggggcctgggggatcctcttgcactggtgggtggagagaagcgcctgcagccaaccagggtcaggctgtgctcacagtttcctctggcggcatgtaaaggctccacaaaggagttgggagttcaaatgaggctgctgcggacggcctgaggatggaccccaagccctggacctgccgagcgtggcactgaggcagcggctgacgctactgtgagggaaagaaggttgtgagcagccccgcaggacccctggccagccctggccccagcctctgccggagccctctgtggaggcagagccagtggagcccagtgaggcagggctgcttggcagccaccggcctgcaactcaggaacccctccagaggccatggacaggctgccccgctgacggccagggtgaagcatgtgaggagccgccccggagccaagcaggagggaagaggctttcatagattctattcacaaagaataaccaccattttgcaaggaccatgaggccactgtgcgtgacatgctggtggctcggactgctggctgccatgggagctgttgcaggccaggaggacggttttgagggcactgaggagggctcgccaagagagttcatttacctaaacaggtacaagcgggcgggcgagtcccaggacaagtgcacctacaccttcattgtgccccagcagcgggtcacgggtgccatctgcgtcaactccaaggagcctgaggtgcttctggagaaccgagtgcataagcaggagctagagctgctcaacaatgagctgctcaagcagaagcggcagatcgagacgctgcagcagctggtggaggtggacggcggcattgtgagcgaggtgaagctgctgcgcaaggagagccgcaacatgaactcgcgggtcacgcagctctacatgcagctcctgcacgagatcatccgcaagcgggacaacgcgttggagctctcccagctggagaacaggatcctgaaccagacagccgacatgctgcagctggccagcaagtacaaggacctggagcacaagtaccagcacctggccacactggcccacaaccaatcagagatcatcgcgcagcttgaggagcactgccagagggtgccctcggccaggcccgtcccccagccaccccccgctgccccgccccgggtctaccaaccacccacctacaaccgcatcatcaaccagatctctaccaacgagatccagagtgaccagaacctgaaggtgctgccaccccctctgcccactatgcccactctcaccagcctcccatcttccaccgacaagccgtcgggcccatggagagactgcctgcaggccctggaggatggccacgacaccagctccatctacctggtgaagccggagaacaccaaccgcctcatgcaggtgtggtgcgaccagagacacgaccccgggggctggaccgtcatccagagacgcctggatggctctgttaacttcttcaggaactgggagacgtacaagcaagggtttgggaacattgacggcgaatactggctgggcctggagaacatttactggctgacgaaccaaggcaactacaaactcctggtgaccatggaggactggtccggccgcaaagtctttgcagaatacgccagtttccgcctggaacctgagagcgagtattataagctgcggctggggcgctaccatggcaatgcgggtgactcctttacatggcacaacggcaagcagttcaccaccctggacagagatcatgatgtctacacaggaaactgtgcccactaccagaagggaggctggtggtataacgcctgtgcccactccaacctcaacggggtctggtaccgcgggggccattaccggagccgctaccaggacggagtctactgggctgagttccgaggaggctcttactcactcaagaaagtggtgatgatgatccgaccgaaccccaacaccttccactaagccagctccccctcctgacctctcgtggccattgccaggagcccaccctggtcacgctggccacagcacaaagaacaactcctcaccagttcatcctgaggctgggaggaccgggatgctggattctgttttccgaagtcactgcagcggatgatggaactgaatcgatacggtgttttctgtccctcctactttccttcacaccagacagcccctcatgtctccaggacaggacaggactacagacaactctttctttaaataaattaagtctctacaataaaaacacaactgcaaagtaccttcataatatacatgtgtatgagcctcccttgtgcacgtatgtgtataccacatatatatgcatttagatatacatcacatgtgatatatctagatccatatataggtttgccttagatacctaaatacacatatattcagttctcagatgttgaagctgtcaccagcagctttgctcttaggagaaaagcatttcattagtgttgtattacttgagtctaagggtagatcacagactgtgtggtctcaactgaaaggatcacccttggcatctgtgtgcctggattcttccagaatgtctacaatgctaatctctcacatagaggttcccagcttcttaagaaccccttttggcacctaatcaaatttcaaaatccctccccccacattttcatacttttccccattctcaggacttttcaccatccatcacccacttatcccttcatttgacaccattcattaagtgccttctgtgtgtcagtccctggccactcactgcagttcaaggccccctttccgctctgctgtactcctcgcctacctactccttgccttttctgtcgcacagccccttctttccaggcgagattcctcagcttctgagtaggaaacactccgggctccaggtttctggttgggaagggaaggccaggccaaaagctccaccggccgtatagataatgtactcgcagttttgtatcttccattcatactttaacctacaggtcatttgagtcttcacacaaataataacctatctggccaggagaattatctcagaacagaagtcatcagatcatcagagcccccagatggctacagaccagagattccacgctctcaggctgactagagtccgcatctcatctccaaactacacttccctggagaacaagtgccacaaaaatgaaaacaggccacttctcaggagttgaataatcaggggtcaccggaccccttggttgatgcactgcagcatggtggctttctgagtcctgttggccaccaagtgtcagcctcagcactcccgggactattgccaagaaggggcaagggatgagtcaagaaggtgagacccttcccggtgggcacgtgggccaggctgtgtgagatgttggatgtttggtactgtccatgtctgggtgtgtgcctattacctcagcatttctcacaaagtgtaccatgtagcatgttttgtgtatataaaagggagggtttttttaaaaatatattcccagattatccttgtaatgacacgaatctgcaataaaagccatcagtgct

SEQ ID NO: 691 - DNA, 8930 bp, Homo sapiens
cgctggggcgctttccgaggaaattcgggactcgagtttcccggggaagaggcgcggcctgagcccggcgagggtggggagggcaggcgcaggtggaccccggcgccccccgagccccgctgtgaccttggccgcgggggaggggctgggccgctgcggggcagtcgcggccgccagagggggcagcggagaagaacttgcccaacttggcggcgcgggctggggcggctctgcgcctccgcgcccgcctccccggcctccgccttctcccctcccgcgagcctcctcccctcccgcgagcctcctcccctgggccctcctcccgtcctccccgccgccgccggtcccggtgcgcgcccatccctgcccgcagccccgcgcgccggccgagtcgctgagccgcggctgccggacgggacgggaccggctaggctgggcgcgccccccgggccccgccgtgggcatgggcgcactggcccgggcgctgctgctgcctctgctggcccagtggctcctgcgcgccgccccggagctggcccccgcgcccttcacgctgcccctccgggtggccgcggccacgaaccgcgtagttgcgcccaccccgggacccgggacccctgccgagcgccacgccgacggcttggcgctcgccctggagcctgccctggcgtcccccgcgggcgccgccaacttcttggccatggtagacaacctgcagggggactctggccgcggctactacctggagatgctgatcgggacccccccgcagaagctacagattctcgttgacactggaagcagtaactttgccgtggcaggaaccccgcactcctacatagacacgtactttgacacagagaggtctagcacataccgctccaagggctttgacgtcacagtgaagtacacacaaggaagctggacgggcttcgttggggaagacctcgtcaccatccccaaaggcttcaatacttcttttcttgtcaacattgccactatttttgaatcagagaatttctttttgcctgggattaaatggaatggaatacttggcctagcttatgccacacttgccaagccatcaagttctctggagaccttcttcgactccctggtgacacaagcaaacatccccaacgttttctccatgcagatgtgtggagccggcttgcccgttgctggatctgggaccaacggaggtagtcttgtcttgggtggaattgaaccaagtttgtataaaggagacatctggtatacccctattaaggaagagtggtactaccagatagaaattctgaaattggaaattggaggccaaagccttaatctggactgcagagagtataacgcagacaaggccatcgtggacagtggcaccacgctgctgcgcctgccccagaaggtgtttgatgcggtggtggaagctgtggcccgcgcatctctgattccagaattctctgatggtttctggactgggtcccagctggcgtgctggacgaattcggaaacaccttggtcttacttccctaaaatctccatctacctgagagacgagaactccagcaggtcattccgtatcacaatcctgcctcagctttacattcagcccatgatgggggccggcctgaattatgaatgttaccgattcggcatttccccatccacaaatgcgctggtgatcggtgccacggtgatggagggcttctacgtcatcttcgacagagcccagaagagggtgggcttcgcagcgagcccctgtgcagaaattgcaggtgctgcagtgtctgaaatttccgggcctttctcaacagaggatgtagccagcaactgtgtccccgctcagtctttgagcgagcccattttgtggattgtgtcctatgcgctcatgagcgtctgtggagccatcctccttgtcttaatcgtcctgctgctgctgccgttccggtgtcagcgtcgcccccgtgaccctgaggtcgtcaatgatgagtcctctctggtcagacatcgctggaaatgaatagccaggcctgacctcaagcaaccatgaactcagctattaagaaaatcacatttccagggcagcagccgggatcgatggtggcgctttctcctgtgcccacccgtcttcaatctctgttctgctcccagatgccttctagattcactgtcttttgattcttgattttcaagctttcaaatcctccctacttccaagaaaaataattaaaaaaaaaacttcattctaaaccaaaacagagtggattgggctgcaggctctatggggttcgttatgccaaagtgtctacatgtgccaccaacataaaacaaaaccaagccttggctcgttctcttctctcttcaatctctggaaaaataagtacatatagttgataacccctcttagcttacaggaagctttttgtattaattgcctttgaggttattttccgccagacctcaacctgggtcaaagtggtacaggaaggcttgcagtatgatggcaggagaatcagcctggggcctggggatgtaaccaagctgtacccttgagacctggaaccagagccacaggccccttttgtgggtttctctgtgctctgaatgggagccagaattcactaggaggtcatcaaccgatggtcctcacaagcctcttctgaagatggaaggccttttgcccgttgaggtagaggggaaggaaatctcctcttttgtacccaatacttatgttgtattgttggtgcgaaagtaaaaacactacctcttttgagactttgcccagggtcctgtgcctggatgggggtgcaggcagccttgaccacggctgttcccctcacccaaaagaattatcatcccaacagccaagacccaacaggtgctgaactgtgcatcaaccaggaagagttctatccccaagctggccactatcacatatgcttactcttgcttaaaattaataaatcatgttttgatgagaaaaaactattctatttcactagcttagttgtctctttttccaaatcttctctggaagtaggttggctattaccctgttgggaaacagggaaatggcctgatgcccctatttctgaccagctgtcagggaaggaagatgcaagatgtgcagaagacacaaggtaacgtctacttatccccgtgcttcgaaaccgtgtgtttccctttgcagaactggttagcctcaagcatacccatccaatcagcttaaattgttcagcagttgacctctgtgcttcttcctttgggggtgtttaatctttggtaacagttgtgcagtggtagccttatttcggggggcagtccctactttctgtcacttatcgaggcctttgccaaagaaaagtggaagccgtttccttgacatagccttatatgacctgatgtcattaggagaagagttaaaagacagtatcccctctctcctgcttgtgtgccaagttcagtgttccctttgcatttttttggggtgggttggctatattacagaattccaccaaaagtgctaagtgtcccctcctgcagaagtatcgtttgtattcacagtaggctacgtgtggatgtttcagccatctgctctgctccctgggtccccgggtcaccaccatactgagaaatataggactctgccaaagagacgtggaggccacgtcggcttgtcatggtgtcctggaagactctccagcagccagaagaaccttctgtgctgttttcactagagaagatttgagttgcagcctcttggaaagaacatgacggcacggaacgggaggagggggctcttgtatcagggcccgttgtcacatccgctctcagcttgttgaaaactcataatctcagaatgcatttcacacggagagatgtctggaagtccaattctcatcccattggctttttccgtggttgctgttttgtgggccgctttgcacaggagtgaagccaacacccctagattgtgccttcacccttgctgtgaaaaattcaaagccctgaaataagaggagggaatcgcagacatgccctgattagttttcctgcttatttcttcatacaggcatcttctgttccgttgtattgtgttaggtttcagaggcggggagcttcctcctgcagcagatgaacaggcatagttcttaaaatacaggaaagtaacaagtgaggtttccaggtagagtaggtgaatgaagtttgccgtcatgctctgtatttcatatcagatttctttatcttttcatatcgcatgtcattggatgtgacattttgatgaaaatactgaaactacaaaagcataacttcgcaacaagaatgagatagacaattgaatgtgggacatttttctggcatgtcttgctgctgagaatcggacttccagtcaaaaccctgttagtgacacccacctcctccagttatgcaaattgatgcttagcttggcaagctttcaaggaggtttgcttggaacaggaaaggaattaacaaccctttgagggtgtcatttttaccttgtaatacactgtggaaaattctggaagacggtccttgcctgaaaaggtgcaacttagcattaggttgttatcagaaaccttgtcaagtctgatgggaaatgaatagatgctgctttatttccttgataacttctttggaagtctgaaataaatcctgccttcagtaactgaaaccatttattaaaaatagcaagaaacaagatggggaccaattctatttttattcttgggaatttgaaagagccacaagtgattggtgtccgatctcccagcatatactgtacactattttgtatttctcctgaaccaaaaccaagtacttagcactcaagaaacagatgccctgtgtgtgaccgaggggagtgtttttccacaacaggttccacttctgaacacttggaaggaccttgcctgattcatggtgaaacacagaggttttggttggagataaatttggggtcagttactgttcaaaattgtgaaagtagttcccaggaagacagcattagtgactccgcagtgctttgggtaatagattttgaaaagcaattgtgagttggggattccatcatttcatttaagaggtgaagagggatttaattatttaatacgccgggtgcaaacttgttaaattcctctttccctgtccctgcttggtggagctgccacgtgtggttcagttctaagttctggactagtgccactcgatatcattgggaataaatcgttgttcaacagtctgttccacaaacaacagtaattgaatttcacagactttatcctgattagtggaaatcaaataatggagtggaatccccatgtgttttctcttgcacaaacttattagacttgattagaaaactgtttggaggaaaaacttgccagtaagttttttggttgttgttttgttttttttgaaaaacgacgcaacaccataaagtgtaaaattaggggttctggccaagagaggtactagatttttttaatgccgagaaaagtccatgccacagaagttattgtgtatgtctctagggagctttaagaatttcacgtttgaactttacagctgtttaccaattaaatggcaagctggaaaaatacattttgagaggggtagaaagaataagaatataattaaaagtatgctaacaaaataagcagtacatatttttttagaaaatgcagtttaggccaggcacggtagctcgtgcctgtaatcccagcactttgggaggccgaggcaggtggatcacctgaggtcaggagtttgagaccagcctggacaacatggtgaaaccccgtctctactaaaaatacaaaaaattagccaacgatggtgatgcctgtctgtaatcccagctactctggaggctgaggcaggagaatcgcttgaaccggggaggcagaggttgtagtgagccaagattgcgccactgcactccagcctgggcaacagagcaagactccgtctcaaaaaaggaaagaaaatgcagtttcattccagccatccttagatttcttttccccttaaagtggctgaatccattggagatgtgatttattttgcagatccaccaattccaaacttcaggaatattcaagcgggagtcatgtgtaagtgacagctttgacaaagagagactgtggctgggtggcccgggtgttgcccacgcggagcaaggattggttcattcaacggatggagagtacaggatggctgggacctgggaagttccagaatctgaaaagagggcagggcaagaaggagccagaagagaggtcccacccctcagttggcagtggggcacggaggtccgcatcagccaagaacgtccccaggatgccgtgggcacctcatttcaccccacgtttttggcacagtctactttttaggtattttgtaaaggaacttctcaggattgattatttgccagaggaacaattaggccaagagaaacttgcttgacagccatgtgtaaaacacgtctgtcctaatcaaactagagatgcctcaaggcccacgcaggacacaggcaggttcaaggtcatgcacctggaaatttgtaggggagggtcaagcaactgaggccaaagggggccggtaaagtggcttctggggtctgagcatctggaaggctcctggcagcagttacctgacagtgtcgttgaggggcacggcagctgggccctcaccgtttccgccagctctgctgagccagcccagcccatgcattccgaacatccgacagcttctttctccagaatgtcttctgtcagagacttccaggaaaggagctccctcctgtctcactgctgtcagcgtgggagccctgctccccaggctccacgtccccggaaggtccatcttgtcctggagcacacccagccccattcagggtcagtgcaggagggaacagggaatctgcatttcagtaagctccccaggtgaggctgcagagcagaaaccacggctttcagacgtgagcaggctccctgggctcttggtgtcaccctgttagccacatctgcggaatgtggaaggcagaacatagccacgctgcttagtgctgccagcgaacctcaggttgcatcagtggctggaatctatcacagctgttggggatacgtaactcccagcaataaatccagtattttcttccctgccctgagcttcctctgggtttcttatcagcagctattacacacagatgtccagtgcttctaaactaaattgtactgtgtaacttttacatcacacttgtgtgcttaaaaagcacaccgtgggtagtgactgggccaagagacatcacaaagcttcctgataaatttgaatccagccacggcaagagcgacgtgcgggtacctggtccctgatgcttgggtgccccgttgagcctcgggtacttcttggacactattgtgagagcagccatcctggtgtctctgccagcatcttggggaacgctgtgatggtaaaatatctgtctctcctctgggaatcagggcagccctgagaagtgagcagttccctttacagatggataattgtttgtgtaagaccaaccagataaagtccaaactgtgtagaacacacgtgtgcctcacacatagccatctgagtaaaatattttttccaatgtagatttataattagaaatgacagatttataatatagacttcagtaagttgggcacagctgtcactttcgtggtatcaataaaaggctagaaaccttgggtgtccttggcaacctagcctttgacattgatgtttttccataggattttcttcatttgggttggaataaaaatgcatttttattcacaaggcacagacagataagaatatcataagcagggaagtgtctccaaaggtcaggacatatgtttttctgttgagtgctatatgtggaggtcattgcaagttccctgatatgagtatggtttcgcttgctacattgtgcctattaaagtaaaattttacacaagcctcgcatttctaagattagtgttcctgaatgaaatgttaagaaaacattaaaagattatctctttttaagatggaggaaaaaaagtgaacaaagctaattaatctatcatgaaaattgcacaaaataacatttcttaacaaatttaatacaattttgtgttctttgttgctagtggtataaaacgagatttttttccctcatttttctcattgtagatgtcatctctcacatttatatcagtgaggtttgaaattctgtgtagcagttactcagcacatatgagagggcagcgaatgaatgagatttgtcatgtgctaataaaagctgaatttttgtaatctaaaatgatgtattttctactattgctgttaatttgcattgttaaaaattcttaaagtttaatatgttatgttcagtcattgaaagcgaccactcatttttttcttaaagttgatgccttttctgctgtgctagagtcagtattttgcttctggcaggagagctgcaaactgtgtatcctcaaacagatgcaaaaagtagtgctttgcaaaacgtttgttttctgtttatctcagattaacatcctttaatacaagtttcttaagtgtaacttgtatttctgaaaatgcttaaaattattttatatttccctttgggaatttttctctatttccagcacgctgatttgatttaaaaatgtaataagaccaagagttggagtaaagggatattcattccatgttaaaagtggcttcatagctactgacaaatgtctgaactattgtcgtgcccttcaaaactggagttttctaaaataatcttatttttatacttgtatgttccagcaatttaagatatataccattgaaagggaaataaaacatttttgtttatttgaataaataatactcccaacctg

SEQ ID NO: 692 - DNA, 7394 bp, Homo sapiens
ggtgagagctgcgcagcgctggctgctggctggcctcgcggagacgccgaacggacgcggccggcgccggcttgtgggctcgccgcctgcagccatgaccctcgcagcctgtccctcggcctcggcccgggacgtctaaaatcccacacagtcgcgcgcagctgctggagagccggccgctgccccctcgtcgccgcatcacactcccgtcccgggagctgggagcagcgcgggcagccggcgcccccgtgcaaactgggggtgtctgccagagcagccccagccgctgccgctgctacccccgatgctggccatggcctggcggggcgcagggccgagcgtcccgggggcgcccgggggcgtcggtctcagtctggggttgctcctgcagttgctgctgctcctggggccggcgcggggcttcggggacgaggaagagcggcgctgcgaccccatccgcatctccatgtgccagaacctcggctacaacgtgaccaagatgcccaacctggttgggcacgagctgcagacggacgccgagctgcagctgacaactttcacaccgctcatccagtacggctgctccagccagctgcagttcttcctttgttctgtttatgtgccaatgtgcacagagaagatcaacatccccattggcccatgcggcggcatgtgtctttcagtcaagagacgctgtgaacccgtcctgaaggaatttggatttgcctggccagagagtctgaactgcagcaaattcccaccacagaacgaccacaaccacatgtgcatggaagggccaggtgatgaagaggtgcccttacctcacaaaacccccatccagcctggggaagagtgtcactctgtgggaaccaattctgatcagtacatctgggtgaaaaggagcctgaactgtgtgctcaagtgtggctatgatgctggcttatacagccgctcagccaaggagttcactgatatctggatggctgtgtgggccagcctgtgtttcatctccactgccttcacagtactgaccttcctgatcgattcttctaggttttcctaccctgagcgccccatcatatttctcagtatgtgctataatatttatagcattgcttatattgtcaggctgactgtaggccgggaaaggatatcctgtgattttgaagaggcagcagaacctgttctcatccaagaaggacttaagaacacaggatgtgcaataattttcttgctgatgtacttttttggaatggccagctccatttggtgggttattctgacactcacttggtttttggcagcaggactcaaatggggtcatgaagccattgaaatgcacagctcttatttccacattgcagcctgggccatccccgcagtgaaaaccattgtcatcttgattatgagactggtggatgcagatgaactgactggcttgtgctatgttggaaaccaaaatctcgatgccctcaccgggttcgtggtggctcccctctttacttatttggtcattggaactttgttcattgctgcaggtttggtggccttgttcaaaattcggtcaaatcttcaaaaggatgggacaaagacagacaagttagaaagactgatggtcaagattggggtgttctcagtactgtacacagttcctgcaacgtgtgtgattgcctgttatttttatgaaatctccaactgggcactttttcggtattctgcagatgattccaacatggctgttgaaatgttgaaaatttttatgtctttgttggtgggcatcacttcaggcatgtggatttggtctgccaaaactcttcacacgtggcagaagtgttccaacagattggtgaattctggaaaggtaaagagagagaagagaggaaatggttgggtgaagcctggaaaaggcagtgagactgtggtataaggctagtcagcctccatgctttcttcattttgaaggggggaatgccagcattttggaggaaattctactaaaagttttatgcagtgaatctcagtttgaacaaactagcaacaattaagtgacccccgtcaacccactgcctcccaccccgaccccagcatcaaaaaaccaatgattttgctgcagactttggaatgatccaaaatggaaaagccagttagaggctttcaaagctgtgaaaaatcaaaacgttgatcactttagcaggttgcagcttggagcgtggaggtcctgcctagattccaggaagtccagggcgatactgttttcccctgcagggtgggatttgagctgtgagttggtaactagcagggagaaatattaacttttttaaccctttaccattttaaatactaactgggtctttcagatagcaaagcaatctataaacactggaaacgctgggttcagaaaagtgttacaagagttttatagtttggctgatgtaacataaacatcttctgtggtgcgctgtctgctgtttagaactttgtggactgcactcccaagaagtggtgttagaatctttcagtgcctttgtcataaaacagttatttgaacaaacaaaagtactgtactcacacacataaggtatccagtggatttttcttctctgtcttcctctcttaaatttcaacatctctcttcttggctgctgctgttttcttcattttatgttaatgactcaaaaaaggtatttttatagaatttttgtactgcagcatgcttaaagaggggaaaaggaagggtgattcactttctgacaatcacttaattcagaggaaaatgagatttactaagttgacttacctgacggaccccagagacctattgcattgagcagtggggacttaatatattttacttgtgtgattgcatctatgcagacgccagtctggaagagctgaaatgttaagtttcttggcaactttgcattcacacagattagctgtgtaatttttgtgtgtcaattacaattaaaagcacattgttggaccatgacatagtatactcaactgactttaaaactatggtcaacttcaacttgcattctcagaatgatagtgcctttaaaaatttttttattttttaaagcataagaatgttatcagaatctggtctacttaggacaatggagactttttcagttttataaagggaactgaggacagctaatccaactacttggtgcgtaattgtttcctagtaattggcaaaggctccttgtaagatttcactggaggcagtgtggcctggagtatttatatggtgcttaatgaatctccagaatgccagccagaagcctgattggttagtagggaataaagtgtagaccatatgaaatgaactgcaaactctaatagcccaggtcttaattgcctttagcagaggtatccaaagcttttaaaatttatgcatacgttcttcacaagggggtacccccagcagcctctcgaaaattgcacttctcttaaaactgtaactggcctttctcttaccttgccttaggccttctaatcatgagatcttggggacaaattgactatgtcacaggttgctctccttgtaactcatacctgtctgcttcagcaactgctttgcaatgacatttatttattaattcatgccttaaaaaaataggaagggaagcttttttttttctttttttttttttcaatcacactttgtggaaaaacatttccagggactcaaaattccaaaaaggtggtcaaattctggaagtaagcatttcctcttttttaaaaatttggtttgagccttatgcccatagtttgacatttccctttcttctttcctttttgtttttgtgtggttcttgagctctctgacatcaagatgcatgtaaagtcgattgtatgttttggaaggcaaagtcttggcttttgagactgaagttaagtgggcacaggtggcccctgctgctgtgcccagtctgagtaccttggctagactctaggtcaggctccaggagcatgagaattgatccccagaagaaccattttaactccatctgatactccattgcctatgaaatgtaaaatgtgaactccctgtgctgcttgtagacagttcccataactgtccacggccctggagcacgcacccaggggcagagcctgcccttactcacgctctgctctggtgtcttgggagttgtgcagggactctggcccaggcaggggaaggaagaccaggcggtaggggactggtcttgctgttagagtatagaggtttgtaatgcagttttcttcataatgtgtcagtgattgtgtgaccaaggcagcatctagcagaaagccaggcatggagtaggtgatcgatacttgtcaatgactaaataataacaataaaagagcacttgggtgaatctgggcacctgatttctgagttttgagttctggagctagtgttttgacaatgctttgggttttgacatgccttttccacaaatctcttgccttttcagggcaaagtgtatttgatcagaagtggccatttggattagtagccttagcaatgctacagggttataggcctctcctttcacattccagacaatggagagtgtttatggtttcaggaaaagaactttgtggctgaggggtcagttaccagtgaccttcaatcaactccatcacttcttaaatcggtatttgttaaaaaaatcagttattttatttattgagtgccgactgtagtaaagccctgaaatagataatctctgttcttctaactgatctaggatggggacgcacccaggtctgctgaactttactgttcctctgggaaaggagcagggacctctggaattcccatctgtttcactgtctccattccataaatctcttcctgtgtgagccaccacacccagcctgggtctctctacttttaacacatctctcatccctttcccaggattccttccaagtcagttacaggtggttttaacagaaagcatcagctctgcttcgtgacagtctctggagaaatcccttaggaagactatgagagtaggccacaaggacatgggcccacacatctgctttggctttgccggcaattcagggcttggggtattccatgtgacttgtataggtatatttgaggacagcatcttgctagagaaaaggtgagggttgtttttctttctctgaaacctacagtaaatgggtatgattgtagcttcctcagaaatcccttggcctccagagattaaacatggtgcaatggcacctctgtccaacctcctttctggtagattcctttctcctgcttcatataggccaaacctcagggcaagggaacatgggggtagagtggtgctggccagaaccatctgcttgagctacttggttgattcatatcctctttcctttatggagacccatttcctgatctctgagactgttgctgaactggcaacttacttgggcctgaaactggagaaggggtgacatttttttaatttcagagatgctttctgattttcctctcccaggtcactgtctcacctgcactctccaaactcaggttccgggaagcttgtgtgtctagatactgaattgagattctgttcagcaccttttagctctatactctctggctcccctcatcctcatggtcactgaattaaatgcttattgtattgagaaccaagatgggacctgaggacacaaagatgagctcaacagtctcagccctagaggaatagactcagggatttcaccaggtcggtgcagtatttgatttctggtgaggtgaccacagctgcagttagggaagggagccattgagcacagactttggaaggaaccttttttttgttgtttgtttgtttgtttgtttgtttgtttgtttgagacagggtcttgctctgtcacccaggctggggcgcaatggcacgatcttggctcactgcaacctctgcctcctgggttcaagtgattctcctgccacagcctcctgaggagctgggactacaggtgcgtgctaccacgcccagctacttctgtatttttagtagagacggggtttcactgtgttggccaggctggtctcgaactcctgacctcatgatctgcccgcctcagcctcccaaagtgctgggattacaagtgtgagccaccacacctggcctggaaggaacctcttaaaatcagtttacgtcttgtattttgttctgtgatggaggacactggagagagttgctattccagtcaatcatgtcgagtcactggactctgaaaatcctattggttcctttattttatttgagtttagagttcccttctgggtttgtattatgtctggcaaatgacctgggttatcacttttcctccagggttagatcatagatcttggaaactccttagagagcattttgctcctaccaaggatcagatactggagccccacataatagatttcatttcactctagcctacatagagctttctgttgctgtctcttgccatgcacttgtgcggtgattacacacttgacagtaccaggagacaaatgacttacagatcccccgacatgcctcttccccttggcaagctcagttgccctgatagtagcatgtttctgtttctgatgtaccttttttctcttcttctttgcatcagccaattcccagaatttccccaggcaatttgtagaggacctttttggggtcctatatgagccatgtcctcaaagcttttaaacctccttgctctcctacaatattcagtacatgaccactgtcatcctagaaggcttctgaaaagaggggcaagagccactctgcgccacaaaggttgggtccatcttctctccgaggttgtgaaagttttcaaattgtactaataggctggggccctgacttggctgtgggctttgggaggggtaagctgctttctagatctctcccagtgaggcatggaggtgtttctgaattttgtctacctcacagggatgttgtgaggcttgaaaaggtcaaaaaatgatggccccttgagctctttgtaagaaaggtagatgaaatatcggatgtaatctgaaaaaaagataaaatgtgacttcccctgctctgtgcagcagtcgggctggatgctctgtggcctttcttgggtcctcatgccaccccacagctccaggaaccttgaagccaatctgggggactttcagatgtttgacaaagaggtaccaggcaaacttcctgctacacatgccctgaatgaattgctaaatttcaaaggaaatggaccctgcttttaaggatgtacaaaagtatgtctgcatcgatgtctgtactgtaaatttctaatttatcactgtacaaagaaaaccccttgctatttaattttgtattaaaggaaaataaagttttgtttgttaggtt

SEQ ID NO: 693 - DNA, 7478 bp, Homo sapiens
actggcagctggccgggcgctcgcagtgggagctgctgcaggctccgcggcggcggcaacggaggctgcgggggcggcggcgcgagcggccgggcttggtaggggagccgagcccggcccgggatcccgagcagcgagagtgtggggtacctaggcccctcacgctggacttcacagtctccgggccgcctgacctccgcacgggtatatgggatggaagcgggaccctcgggagcagctgcgggcgcttacctgccccccctgcagcaggtgttccaggcacctcgccggcctggcattggcactgtggggaaaccaatcaagctcctggccaattactttgaggtggacatccctaagatcgacgtgtaccactacgaggtggacatcaagccggataagtgtccccgtagagtcaaccgggaagtggtggaatacatggtccagcatttcaagcctcagatctttggtgatcgcaagcctgtgtatgatggaaagaagaacatttacactgtcacagcactgcccattggcaacgaacgggtcgactttgaggtgacaatccctggggaagggaaggatcgaatctttaaggtctccatcaagtggctagccattgtgagctggcgaatgctgcatgaggccctggtcagcggccagatccctgttcccttggagtctgtgcaagccctggatgtggccatgaggcacctggcatccatgaggtacacccctgtgggccgctccttcttctcaccgcctgagggctactaccacccgctggggggtgggcgcgaggtctggttcggctttcaccagtctgtgcgccctgccatgtggaagatgatgctcaacattgatgtctcagccactgccttttataaggcacagccagtgattgagttcatgtgtgaggtgctggacatcaggaacatagatgagcagcccaagcccctcacggactctcagcgcgttcgcttcaccaaggagatcaagggcctgaaggtggaagtcacccactgtggacagatgaagaggaagtaccgcgtgtgtaatgttacccgtcgccctgctagccatcagacattccccttacagctggagagtggacagactgtggagtgcacagtggcacagtatttcaagcagaaatataaccttcagctcaagtatccccatctgccctgcctacaagttggccaggaacaaaagcatacctaccttcccctagaggtctgtaacattgtggctgggcagcgctgtattaaaaagctgaccgacaaccagacctcgaccatgataaaggccacagctagatccgctccagacagacaggaggagatcagtcgcctgatgaagaatgccagctacaacttagatccctacatccaggaatttgggatcaaagtgaaggatgacatgacggaggtgacagggcgagtgctgccggcgcccatcttgcagtacggcggccggaaccgggccattgccacacccaatcagggtgtctgggacatgcgggggaaacagttctacaatgggattgagatcaaagtctgggccatcgcctgcttcgcaccccaaaaacagtgtcgagaagaggtgctcaagaacttcacagaccagctgcggaagatttccaaggatgcggggatgcctatccagggtcaaccttgtttctgcaaatatgcacagggggcagacagcgtggagcctatgttccggcatctcaagaacacctactcagggctgcagctcattattgtcatcctgccagggaagacgccggtgtatgctgaggtgaaacgtgtcggagatacactcttgggaatggctacgcagtgtgtgcaggtgaagaacgtggtcaagacctcacctcagactctgtccaacctctgcctcaagatcaatgtcaaacttggtggcattaacaacatcctagtcccacaccagcgctctgccgtttttcaacagccagtgatattcctgggagcagatgttacacaccccccagcaggggatgggaaaaaaccttctatcacagcagtggtaggcagtatggatgcccaccccagccgatactgtgctactgtgcgggtacagcgaccacggcaagagatcattgaagacttgtcctacatggtgcgtgagctcctcatccaattctacaagtccacccgtttcaagcctacccgcatcatcttctaccgagatggggtgcctgaaggccagctaccccagatactccactatgagctactggccattcgtgatgcctgcatcaaactggaaaaggactaccagcctgggatcacttatattgtggtgcagaaacgccatcacacccgccttttctgtgctgacaagaatgagcgaattgggaagagtggtaacatcccagctgggaccacagtggacaccaacatcacccacccatttgagtttgacttctatctgtgcagccacgcaggcatccagggcaccagccgaccatcccattactatgttctttgggatgacaaccgtttcacagcagatgagctccagatcctgacgtaccagctgtgccacacttacgtacgatgcacacgctctgtctctatcccagcacctgcctactatgcccgcctggtggctttccgggcacgataccacctggtggacaaggagcatgacagtggagaggggagccacatatcggggcagagcaatgggcgggacccccaggccctggccaaagccgtgcaggttcaccaggatactctgcgcaccatgtacttcgcttgaaggcagaacgctgttacctcactggatagaagaaagctttccaagccccaggagctgtgccacccaaatccagaggaagcaaggaggagggaggtggggtagggaggagtgtaggatgccttgtttccttctatagaggtggtgtaagagtggggaacagggccagcaagacagaccaccagccagaaatctctgatatcaacctcatgtcccccacccctcaccccatcttgtcacatctggccctgaccccactggaccaaaaggggcagcactggtgcccaccatacacacaggtgtctcatgtgactcacagtgctaaagactcatgcttgacagcttggtaaggtcaactctgtagccctgcagacaaaagctggttaggtttgggtttgatactttagatgggaaagtgaggggcttgagaaagtgggtgggaggagggaaggattttttaggagccttaatcagaaaaggactagatttgtttaagaagaaaaatgaaaccagacccagatcaatattttaggatactagatgttttaatgggttcagaatccagtttgtaggaagattttttaatggttttggttgctcctcccccagctgccaccccccaccttacccttattcctctctgtccacattttctgccccaccttacttctcctccctgacagacatccagcccctagtaatacttaaggcactatggcacttagctttgaagtgacacgaccctgtcttccttccgcccgctggtgggtaaccagtgccttccctgtaacggtaatgctgcagaactgcaaccttttgtacctttctttggggaatggggtgggggtgggagaggaggtagatggggaagaaataccccagacccaacaaacctccagccagaaagccagctattttgcatttgaaggaattgacttcctcattcattgagctttttaaaagatcacaacctcaagatggttaaaatccattgacatttgcactttcaaacatgacaagtctcggagctgctgagatgacaggcccctggcctttccacttatgcctccttttctccttattcctcctacctcccgccccgcccaggtctggagttactttcatagcatttttcactcttggcttcttttctcccttgatggtcaagtctcttatgtttcaatatttcttaactggggtgtcttataacaaaaaactcttaggtctaaaatgagaaaaaagagagaaaacaaaatgttatttttataccataacttgagtgtattgccaaaatttggaaatccttcccatgcctgatgagtttatatcccagaaacattgagccatcagaatgaactgtgtacctgatttgttctctgacctggctaggtagggagggggtggttatcgccccaagatggggtccaggctccatccttcctctgtgcagataatacctttttcttgctatagcctccctcctctgcactgtcctgcactctttcttgcaagtgcatctttttccttcccctggactgtcctctgaccctttggctcatcctagattgcagtgtgtcctgtggacaggctggggaattttgctgctccctattgcttctgtttacaaaaatgaatttttcctggtttcccactagggcatgtgggtgggtggcatggacttttttttttttttttttttgtcttgagacatggggtttggctgtcttgcaggactggagaaggtggtggttctagcttggtctctgttggccttgaagcaagcatcccccctgccctttttccttgactgttcatttttttcctgccccactgcttgggatggggagttgcaacttcagtgtggaatttcctctttgaggagcctgggcttggatctatcctgatctggtgatgaagccatgattactttagacctagcccaggcttggaggccagctggaggaagaagggtctaaatcctggcctgtagagttagaactaccatttcctccccttagctgcccttgtatgacccggatttgctatgcaaaacaatctatcccaggttctgttctggttggctacattgttcagcaactcacaaaacgtagcacaaacattcattatggagaaagcatcaggactgttgagtaactcctcctttacttttttcctgctggctacagcatggggtgccctataggcacaagcccagctgaagaacagaatggagggctctgggaggaggcagctcactggagagcctacattccttacacaagtgcctaaagagagtgatgctaacactccatctgccctgtccattgccttcatatacagtctacttcgtgttctgtcaccctttggggaggggagttctcctgggacagtgggctctgcatgttctccacttggatacattttggggctaggatcagggcactattcctggagggtccagtcattcaccagcatttgcaaatgtccatagggagcaggtggcagcctctactcccagcaacaagtttgtgttctctccttttctctctttgcctcactctctccagttggttttcagctggggcttgaaatgcatttttagccctttgacgtggcttatgccattcaagaaataaaaagcaagagaatcagctttgggcaatgacaagaaatgagttcttactctgatttttttgtaaaaagataatttttgagacttgaaaaataccccgaccttgagattattcctgtttgaaaggtggtgcatgcagatggagaagtggtgttggcagcaagctttggctcatgtggatttggtttaagtggtgcttcttacccaagcttcaaggaagtgcttgggggacccccagcctcatcctcttagttgggtctcttgttccctttgtaccactgttttgccttccttttcctcttctctctttgcctggcttcctttcccttttcttctattcactctgcttgcttgctggccggcctgcctgcctgcctgcctgcctgcctgcctgtctgcctatgtgatgatgaaatctctgcatggctgcaatgatcccactgttagctggcagggtcaggcttagctccttgactgcagaagaccaagaacctgttccccaagcccagagatgtccacctgggctggactgccctcaagcttatactagagaagagcaactgacctgcccaacttgtgtgaagtcaggagggtttctggcattttccacacctgtccactccttggagctggtttctctcattgctttttctaaatctggttctttttctctttacctggggcctggcttttctgagattgtcttagggttgagctatttgggtatcctgggtttgagtgttaggggatggacataaaggaaaaagagtgatgagaagagaatggagagaatttgaataaaaggtgggaaaggagagcactgttctttgattgtttatccagtccaacctgatccattagggatcgaggtgctacactggcctccagggataagcctggggctactgttgctgggaacttaggcttaacataaagccgaagaaggtacctagaaatttgaaacttccctaaaaagctcctaatgcccacctgctagatagcttctctgtggcctcctatttagctaagcagcagtgtttttggatactttttttttctgtttgtgaataaggccagcactcaagatgggcagccaagggtgcactgactattagctggcccataggatatctgtaaggctggtgggacagttttggacctggaatcatgtgtaactaacaaggttggacgtttcttccccatcagggtagaaaaatcatctcaaactagccaaaaggcagttttggaaactacattgggggacgttatttttatttatatatggggcctaggccaatccaggatggtagctggaataccttccttcttaaaatctgatcatggcagggatatgcagggcactttttactatttggccttctaagcagattgggaaggaggtattttctggttttcgctttcctccgacttaataggacttgccttctccctgggcagggagagaggctgggttggtgctctcccttactctactcatactgacttagagcctctggctgctgtttgggcatccaagaaagggaggggaaggaatgagctaaaaacaaaacagaatgaggtgggaaagggagattttcttctttacagaggaaaataggaaaccctccaagaattgtgcaagtaaagacatttgttgaatgcactgagtcccttggtgtagtagcaataaggaaaaatgaaattactttcctgtgcacacagtccagcctaattggtatgtgatgttgcacttagcagccatgtggtgggcatgtgtgactactctggttttcactttagtttctaaactttttatccctctcaagtccagcatggatggggaaatgtctctggatccccacagctgtgtacttgtttgcatttgtttccctttgagatttgtgtttgtgtcctgctttgagctgtaccttgtccagtccattgtgaaattatcccagcagctgtaatgtacagttccttctgaagcaagcaacatcagcagcagcagcagcagcagcacaattctgtgttttataaagacaacagtggcttctatttctaa

SEQ ID NO: 694 - DNA, 1679 bp, Homo sapiens
gggaccggaaatcaagtctacaaggcgggggggtgcacagatgaccggaagcgtgccctggcggcgctgccagccccagctgggagctggtaggggagtgcgaggaaggcgggacgcagggcggagccgctgcaggggcggggcctgcggacaggagccggggtttggggcgggaacccctcgtcccctgcagaccccgcctgctcgggcgcgggcggcggcgcggccatgaagctgaagctgaagaacgtgtttctcgcctacttcctggtgtcgatcgccggcctcctctacgcgctggtacagctcggccagccatgtgactgccttcctcccctgcgggcagcagccgagcagctacggcagaaggatctgaggatttcccagctgcaagcggaactccgacggccaccccctgcccctgcccagccccctgaacccgaggccctgcctactatctatgttgttacccccacctatgccaggctggtacagaaggcagagctggtacgactgtcccagacactgagcctggtgccccggctgcattggctgctggtggaggatgctgagggtcccaccccgctggtctcagggctgctggctgcctctggcctcctcttcacacacctggtggtcctcacgcccaaagcccagcggcttcgggagggcgagcctggctgggttcatccccgtggtgtcgagcagcggaacaaggccctggactggctccggggcagagggggtgctgtgggtggggagaaggacccaccaccaccagggacccaaggagtcgtctactttgctgacgatgacaacacctacagccgggagctgtttgaggagatgcgctggacccgtggtgtctcagtgtggcctgtggggctggtgggcggcctgcgattcgagggccctcaggtacaggacggccgggtagtgggcttccacacagcatgggagcccagcaggcccttccctgtggatatggctggatttgccgtggccctgcccttgctgttagataagcccaatgcccaatttgattccaccgctccccggggccacctggagagcagtcttctgagccaccttgtggatcccaaggacctggagccacgggctgccaactgcactcgggtactggtgtggcatactcggacagagaagcccaagatgaagcaggaggagcagctgcagcggcagggccggggctcagacccagcaattgaggtgtgatggcggccccaccccaactaccacctcttttcaggcacagaccttgtgggactgggccccaggcctgcccaggatgtggttttccaagtcctgacccttggagccagaagtggcccctctgcccctccaggcccagggcatggtcctgctgcttcacccctcccctagcctgccgtgtggcactgcccacaggctggggacaagcagcccttgtgttgagtcaggttggccctgtctagggtggaacagaaggacagatggacccaggagggagggcagctgagtaactgggtaacttattggggctgggcatgcactggggggctggaggagctgggctggacccttcccacctgagcatgctgacccccttcctacctccagaataaagaatctcaacctggaaaaaaaaaaaaaaaaaaaaaaaaaaaaaaaaaaaaaaa

SEQ ID NO: 695 - DNA, 8382 bp, Homo sapiens
cgcagcggcggcggcagcggcggcggcggctacagcagctccgccggcagccgcgggagcacggcgacgccagcggcgggaagggaaaaggccgaggcatcagcgtgtgaagaccgcaaagacgatcccgagtacagttgtgaacagcattgctgctaggctcctcctgcagatcatctgaaatgaacctctcttattgatttttattggcctagagccaggagtactgcattcagttgactttcagggtaaaaagaaaacagtcctggttgttgtcatcataaacatatggaccagtgtgatggtgaaatgagatgaggctccgcaatggaactgtagccactgctttagcatttatcacttccttccttactttgtcttggtatactacatggcaaaatgggaaagaaaaactgattgcttatcaacgagaattccttgctttgaaagaacgtcttcgaatagctgaacacagaatctcacagcgctcttctgaattaaatacgattgtgcaacagttcaagcgtgtaggagcagaaacaaatggaagtaaggatgcgttgaataagttttcagataataccctaaagctgttaaaggagttaacaagcaaaaaatctcttcaagtgccaagtatttattatcatttgcctcatttattgaaaaatgaaggaagtcttcaacctgctgtacagattggcaacggaagaacaggagtttcaatagtcatgggcattcccacagtgaagagagaagttaaatcttacctcatagaaactcttcattcccttattgataacctgtatcctgaagagaagttggactgtgttatagtagtcttcataggagagacagatattgattatgtacatggtgttgtagccaacctggagaaagaattttctaaagaaatcagttctggcttggtggaagtcatatcaccccctgaaagctattatcctgacttgacaaacctaaaggagacatttggagactccaaagaaagagtaagatggagaacaaagcaaaacctagattactgttttctaatgatgtatgctcaagaaaagggcatatattacattcagcttgaagatgatattattgtcaaacaaaattattttaataccataaaaaattttgcacttcaactttcttctgaggaatggatgattctagagttttcccagctgggcttcattggtaaaatgtttcaagcgccggatcttactctgattgtagaattcatattcatgttttacaaggagaaacccattgattggctcctggaccatattctctgggtgaaagtctgcaaccctgaaaaagatgcaaaacattgtgatagacagaaagcaaatctgcgaattcgcttcagaccttcccttttccaacatgttggtctgcactcatcactatcaggaaaaatccaaaaactcacggataaagattatatgaaaccattacttcttaaaatccatgtaaacccacctgcggaggtatctacttccttgaaggtctaccaagggcatacgctggagaaaacttacatgggagaggatttcttctgggctatcacaccgatagctggagactacatcttgtttaaatttgataaaccagtcaatgtagaaagttatttgttccatagcggcaaccaagaacatcctggagatattctgctaaacacaactgtggaagttttgccttttaagagtgaaggtttggaaataagcaaagaaaccaaagacaaacgattagaagatggctatttcagaataggaaaatttgagaatggtgttgcagaaggaatggtggatccaagtctcaatcccatttcagcctttcgactttcagttattcagaattctgctgtttgggccattcttaatgagattcatattaaaaaagccaccaactgatcatctgagaaaccaacacattttttcctgtgaatttgttaattaaagatagttaagcatgtatcttttttttatttctacttgaacactacctcttgtgaagtctactgtagataagacgattgtcatttccacttggaaagtgaatctcccataataattgtatttgtttgaaactaagctgtcctcagattttaacttgactcaaacatttttcaattatgacagcctgttaatatgacttgtactattttggtattatactaatacataagagttgtacatattgttacattctttaaatttgagaaaaactaatgttacatacattttatgaagggggtacttttgaggttcacttattttactattatagaccctcttttatagattatcagggattatatatataaatatataaatatacataaaaatgttatggaattaatttattagaaacacttaagaagtacatatttttgtgcagtagatttttgaatcgatactttttttgaaaaccagtttccttgcttttttaagttctttctatatttttctttggaaatgcaaacattacaaaccaatgccatttttcaaatgcactgccatttaagattgattatagatggatttcttaattgaagtacttttataatcacagtgactgaacaaaatattttcaaagacatttgtcattccttaaagccaagattttaaagactaatgtccttcctgagggttactttactatactgtgtatggtgtatagccacagaaagtcagtctgataaattttcaatgtgtaagtgtgatgcattcaacccagattattgtagacttaacttattatatttcctctgatatgtaaaatgacaaactcttctttcctttttaatctttgtctttaatccatgaattaggtgcattatctgctgttgattcttttatatctgcactcattttatgacgtcagacaaaatgttttctaggtgttgctattgtatgagtcataattggtataattttaaagaaaattgtaatattgttttttggtgaaatatattattagtagtatattttccaaaatgattttattgtagtatgaactgataagtgagtcccgtgtccaagagactgtatttattactcttaaacacgctattccaaatgatattactactataaacaaagaatattaccggtctcagcaatcagtgatctttataaaagtacttttaaaaaatgatgaattatcaccaggcgctgtggctcacgcctgtaatcccagcactttgggaggccgaggcgggcggatcacgaggtcaggagatcaagaccatcctggctaacacggtgaaaccctgtctctactaaaaatacaaaaaattagccaggcgtggtggcaggtgcctgtaatcccagctacttgggaggctgaggcaggagaatggcgtgaacccaggaggcagagctggcagtgagctgagatcgcaccactgcactccagcctgggcgacacagctagactccgtctcaaaaaaaaaaaaagatgaagtatcaacatcagttcccagccagtctgcttggacacactggggtgccacaagtgggttgcaggttggttgcagacgggcagagatggattctgctgagctttcagagtgaccactggctggggcctagcgctggggcaaggttccagctggctgcctctagcctggaggagcttcatctagttacccaatgtgctgaaccaacagcatgaaatagcatcatttcctgtgctgtgttacaaagtgcaaacgtttggaaacactgatacagtacaattatttccatcactccatgttgttataatttttagttacttttcttgattgaaaagtcaatcacattgccaaaaatgatttttatgtcagttaaaggccagttgaaatttttttattaggatgttttaaatttacttttcactttcttgaatttttttcttctcaaatttccttggcccagtgcccatgagcaaatttcattcaaaaacaggaataaccttttgtcataaaattttggcaccagcttggtatactaaattactgcaaagataactgagtaccagaagtaaaaatctctgcaggtgggcttaggagtactcttgggtccctggttcctcagttgccaactctggtttcatgaagaaagaccatgctctgaaaatctagggaggagaaagttattgcagcacctggtgtgatttgttacaacttctttaaagacagcctgcctggctagctttttcctgttttcatgcagtttgccctcccagcattggtccacctgttgttcccaagaaactcattcttgttcccaagactccttttagccaaatctttcctatcattccaggacttttttgtgcttctctccccatgaatctacccgtgcctagggtgtgtgccaggcacgtggcaggtggccagtcagcatctggatgtgagaccaattattccagcctgccctcctctttctctttttatcattttgtattatttttgagacagggtctcgctttgttgcccaggctggagtgcagtggtgctctcatagctcactgcagcctcgatctctggcctcaagcaatcctcctgcctcagcctcccaaagtgctgggattataggtgtgtgccaccatgtccagccccctttctctctcttaactccctctccctgctgtcgttgccatactcttgcatacacaatcggttgtctagtttttgattgtttgtgtgtatggtgtgtgctgtctctctgaccagatttcaggttcctgaggcgagcctgcagctcatactgctcatctgtcctctcctatggtgggtgctcagggcctctcactgttagttactccctcctttctgcccagttctgcactcaactagtagaagcagccatcctttccccaagcaggaaattgtagtggtcgcccttaagagcagtgtgagggcagaagattaagggaggggaagagtccctggaactggaagaaggtaaatactttgccttgagagggcgccgaatcattttaccaaaatagtaaatggaaaaagtgtcaaaggttgggactagttttaaaaacacatatagccagtagacacatgggggctgtttaaataaaaacatttttttacccggttctgccatcacacacactagtgacattccaagtactcagtggccatgtggagctagtggccaccacacttgacaccacggatgcagaacttttccatcactgcagaaagctctgttgaacagtactgtgtccagagtgctaattatgaacagcttagaaaccacaattaatacattctcatgaggttaaaagcagacatgggaatagaacataatgcaaatgatgatgaatattttgggtgagaagagaaagctgaggacccatttctaggattctaagatgtaagatttcttaagttctttatcttagtctcatgcattctccacatcacgcgctgtaccatactgtgtagtcagaacagacagtgtgattgaaaagctttggaaaaagttaacacaaaggattatttagcacataggctgtagatacgtatgtgtgtatttgttcaacaattggagatggttgaatacccttgaacaaagtgtgtatcttctcaaatcagtggttgcactagtcaataattagaaggtgttgttatttttaaaactataagcaaaattatgaaggcctttaaaaaatctatcataataatgaaaaagaggttgtctcccaacagtgctgtccctcaaagaaaagactggttatgtggaaacagcacgtttggagagattattctagtgaataacagtgtatatttgtggtaggcaaatttctaagaatgacccctactgacacccccaccaatgaccttgtataatatcctcccactttgagcatgggtggaacctgtttgatccatgattatatcatgttatgtagcaaaaggaagactgtctgggggtggctaatcaaatcttgtgactcctttaaaagcagagagttttctcgggctggtggcagaagtcaagagacaaagcagaaggacctcaggcaccattgctgttttaaggtagagggggctgcatgagaaggaatgcacatggctttgaggagctgagagaggccttggctaacagcaaaggagctgggaactgcagtcctacagccacgggaactgaattcagcccataagctcattcataggcttggaaaggcattcatctccagtctccagataagacccagcctggccaacactttgaatccagccttgtgagaccctaagccgagaactcacttaagcctgcttggacttctgacctacagaactatgagataataaatcagtggtgttttaagctgctaaatttgtggcaatttgttatgtaggaataggaaatgaatacagtattttaaaagaggtaaagaggaaatcttcatacttgattccctgtagtatgctggatatttcttggtaaatgcatgaataaagtctttagtagcaagtcatgtacctggaccttgttggggatgttctcgccagagatctcaattagtcttcattggacgtttgttggcaaagttgcagcatcttactgagtagcgtttggtaaaggaactgctagaatgagactataggaataggactgaaacagtgtgtaagggatcttttttatttctagaagaggtgttactttatactgatttagactgctctgagcctgtcagaagtaaattcaagaatgattaacagtggtattttagatacattaagagcaaaaataacctttgccttgtagagatcagataatctgtgtatcgagggatttaattttttttaaccaaaacttagtttctctttttatcatctagcacagatcaaatcctgtatgggccagccaaatgtttgtagtttgagaatgttttgcaaatacctctctgcttccaagccattaatagctaatgaagttttattttggtttgtccattaatttttctgcttatttttactgtattgccatgtccttgatacgagacaagtagaactaaaagagagaaaatgagaggttaagactgtcagaagatgagaaatgtgagtcataaccataccttagtgttttaagggaactttatccagtccaatccctttatagaaaaggaacttttccaagttatgttgcagtatttatagtgtgtaaaattttgtttgactttggtagttgtgcattttaaattatgaatcttatatgctacgataactagtatgcttactttctttaatgcatgtgatcatacaatgctaaaaaggtattttttaaagacccaaccaaactgaggattttgttatacatatctgtatcaacacctatatataaactcttcttcttacctgaaacactccttcacccggtttgggcactaactagatcattttcaaaggaacaaacaggaaggagcaagctggcactccagggtgcatctgagctgagaatttagaagacctcattcaagaaagtaaactgagcattgatgggaaagcactttgcgcgaagtaacattcccactgttaatgttgcagtcaaaattgtggaaaaaaaaaagtggtgctaaaattgttctgaaatgaagattgtttgttgtggggaatattttaatactcttggactttagggaggctattttatgtgtcacttgctcctagttgtttcattgtattagtaattagcaaactgtcctggaaccaagggtttggtacttttgcctgattagcattccattatttatttgaaatgctcagtgtttgctcaaatttggtgaaaatatcttttgaagacatattctctgagccttaaaaatggctgctatcgacagtactgtaagatgcactgccagtagatttgatacttttcatttcagtgtaggcagtaatgttttctaagaaagatttagaaatcagcaaagtgtaacaattgtgtttcatttatggaatggaaaaactgaagtgtcccattcagaacactttggaaaggttgtctgcattaggggatgtttctggaagcatcccttagagaagctgcctgaggaatctccttgccaggttgtaccagatttttttttttcttaaatgtattgtatatattttccttaaaatgtcttcattggctgaatgattcctatccgtagtaatattttaggtacttgttggatttttaaaggaagattatttattttcagatttgctgctataattgaaaacctagtaactggtcctgttgattgtgccttcatcactgtttctctgtgccacgaccgttcatgtgtatttgaaataaagaagtttaaaaagccatgttgaattcaagattccttctaataaaaataggtgaaacttaa

SEQ ID NO: 696 - DNA, 6770 bp, Homo sapiens
ggaggggcgcgcggccgcgagcaaaggagggagggaaggaaggaagagagggaggcgggcaagcaggcgggcgcgggggtcggggactgaggcagtagagggaggcgagagcccggcagccgcttcgcgctgtttgctgcgcgggcttttggagggggcggccgtttagtcggctgaggagaagcggacaccagcggcgttggtgatagcgcctgggggagggggactggagaggcgagaaggggggtcgctgcggtggttctctcgctgtcgctctctctttgcctcgctcccggctcggcgggctcctcccggcgtctctctcgcctccggggtcccgctccccgccccccgcggtatgtcttgatcccgagcagcgggtttcatggggctcctcaggattatgatgccgcccaagttgcagctgctggcggtggtggccttcgcggtggcgatgctcttcttggaaaaccagatccagaaactggaggagtcccgctcgaagctagaaagggctattgcaagacacgaagtccgagaaattgagcagcgacatacaatggatggccctcggcaagatgccactttagatgaggaagaggacatggtgatcatttataacagagttcccaaaacggcaagcacttcatttaccaatatcgcctatgacctgtgtgcaaagaataaataccatgtccttcatatcaacactaccaaaaataatccagtgatgtcattgcaagatcaggtgcgctttgtaaagaatataacttcctggaaagagatgaaaccaggattttatcatggacacgtttcttacttggattttgcaaaatttggtgtgaagaagaaaccaatttacattaatgtcataagggatcctattgagaggctagtttcttattattactttctgagatttggagatgattatagaccagggttacggagacgaaaacaaggagacaaaaagacctttgatgaatgtgtagcagaaggtggctcagactgtgctccagagaagctctggcttcaaatcccgttcttctgtggccatagctccgaatgctggaatgtgggaagcaggtgggctatggatcaagccaagtataacctaattaatgaatattttctggtgggagttactgaagaacttgaagattttatcatgttattggaggcagcattgccccggtttttcaggggtgctactgaactctatcgcacaggaaagaaatctcatcttaggaaaaccacagagaagaaactccccactaaacaaaccattgcaaaactacagcaatctgatatttggaaaatggagaatgagttctatgaatttgcactagagcagttccaattcatcagagcccatgccgttcgagaaaaagatggagacctctacatcctcgcacaaaactttttctatgaaaagatttaccctaagtcgaactgagtataaggtgtgactattggattcttgaactaaaatttgaccctgtcttcacctttgttctcagctccacagtctggattgctgacagtaggtgtatatgacaatttgtattgagccaaattaggaaacagacagtaacgtcaaggaagtagatactggctggcattgtcagtgttctaagtttcaggcatttttatttttcctggctaaacgttggtgaaagttataacctcctgcctgggagaaaatatacatcacctaaaatgaacttatggcaggtctaatcaaaaggctaaatacaatttcagaaaaggttctgatactcttgtttttgataaagcattttttcaactaaccatgaattaagatgagtccatttgcctcttctgccttcactgagggtttgggttatacacctctactgaattgtgttaataactgtttggcagtgtgtactttgtttttgtgagtcatgtctcatgaaatttattggaatgtttaatcatatttgctaagaaatgtttctgctgtagttggatttgcccatatttatgtaggtggttttaattttttaaatggtgattagtgttaaaaatcaatttaaatcatgactaatatggtaaaaagataaagcatcaaagcagtatttctcattcctgcctcctcaatatctaatactgggaagatacttcaaagaatattgagattgtctgaagttttagttaagattttcacacattaatatcaaaaaagtaagtttagtatttgtttctccatgggttatttgtaaagctgtaaactgagatatcggtgactccgtattatgactccattagtgagctgtggtatgggtaggattttcctacttcttctgtacttttacctgtagactatttttactaaggtgctttataatgtgttttaaagcattgcatttacaaaacaaggaaaatgctgtaaatattgcatattttatgtatttggaccaaaaggttacaagtaattagacaaaagtggttttgcaccaattttatgtcaagtaaaaccatcagacctactgttcttgtatttctcatttaactttactgttaagacatcactgaaatgaacttcagtaagctttcaattttgatacacagttcattattcataacttgaggcagtaattacagtggaatgagtactggacaaggagtcaaaaaacttgatttcaggtcctagctctagcacttacagctgtgtgatcttgggcaagtcacttaacctctctttgcctcaatttcctcatcttgaaatgaggataataatacctgctgtacctacctcacagggctgttgtgaggattaaatgagatggcatgtgaaagcactttgaaaattgtaaagcgctatgtaaatgtaaggtattatagaaacatctttaacatatagtttcataccattcattttttaacaaagaaagggaaaagtctgcttgtaagctggttgaaaaagttaatcttgatataaatttgtgtttgataaatatcctctcagtgttttatcttccatgtttcaacaactattgaaatatgaaatgcctgtgaactcttaaagcttcatgagcagctgcttgagttcaggaagttcactgttagaaataggctttgttagctgactagggtcagggaaacttttctcttcaaatttgaaagctgtttctgttttcattttacattattattcagaaatggtagctattctatacctatggtttaagtaaatatttctgaataaggcttcaccatactgtaagcattttaggtagattgccttaaaggttatgggagggcatgagggaacacttcttatgagaaaacatttataaacaaaagaaacatttataaactaaagaaaaactaaaagaatgacagaacaatcatcttagcaccctttcctcacaataatataaaaatattaaaagaacataggcaggctttttttaaatttggcttttttctttccttttttcaaattgacttttataggtatttcctgaaagtgtatacaaattatttcctcgcccaaaataaagcaccacttcaaggtgtggtttgacattacatgctaatgaacaaacccagtatgcaagttattcttgcaccacatgctcaaatcttcttgaggtgcattaactcttttaggtaactagagcagtacttggtgaactagatcaggaggtcagtaaactttctgtggaagggccagagagtaaatattttaggctttgcagcccatacggtctctgtcacagctagtcaaccctgccattttaccacaaaagcagcaatagacattatgtaaacaaatgagcacagttatgttccaataaaactttatttacaaaaacagatgacatcccagatgcagaccatgggcaaccaaccattgcactggccaaatcattatttatggagaaatcctctttgtgtctctactctagatgcctaaaagagtttatatacttctaaaagctcctaacttatatccaaagaattgctttctgattcgtgtagtctctcccacagattcataaacttttatgacttatattgtttccaggtgggcatggtttatttcccagtttaacagttcagaataggggcatttattttatcatattttagggtgggttaggagtatcctttctggagactgagaaaggggtgtatttaattccatcaggtccagtacagtactaggagtcataatactttataatcaattaaataaatagaaccactgagacaataatgtatttttttaaagtggcaaatgtggttttcttttttcagcctttgcgctttttcagtattttgaccatagggagataatttttttataatacaaaagtaaccacttggaattttaaagataatgttatgtgtgtatgtgaaatatatatacatatatatatatatgtttatttcctaaaagaagaaaagatacctttctgttcaacttgtatcaactcctcttttctaattgctgtgaaatggcaactgttgataaattattgtgattgttttaaaatctaatgggaagtaaaatatattttgattttacccagcttaatctgtaaagtagcacttaaatatatctgatagcaacacttaagatattgcatggggattactttcctatcatccatatgcatttgtgcaacttcaaacatattgggtgcttctgaattcctgatgattggatttaagctattgaaaattggataatttaaacttaatgatttttataattttctgatcttaaaatttggttaatgcctataatctgttgctttttctcaatatgtgtcctattggaaattcctcaaatcgttggtgccatcagtgatttacaaacaatattttgatattgcagatgacttgcttactgtatttgcattgttagaaaacagtttgtagacaatgattcttttttaataaaatcaaataattctaaaagtgctagagaatttaactaaaagctggttcccaaatgcatagctggcattttaatttaaattcaaatctacatagagaacatctgtgtaaatcatctaactggatttttccattggtcattcccaaacacacctatggtcctagaatccttaagagaagcaccctgtaaccttttatgtggtttgcctttaagaggcccaggtgcttctcctttatgatttgagttggcctcttcataaattagtgctgtttactttcagaggaagcagagaagttgctgttatgtttttgcatccgtttaccctatgcaaagttgctgtatgatgccaactaaactactctttaggcagccttctgaggagaaaagcaaccctgtttcaaatccactgccaattcagctcctctggagtggagctttctgatttcttggagcaggaattttagagattgaaatgaatgatcatttagtcagatttatcctgtaatttcatgcagctttgtggcctttgcagtactatttataaaatggaccctgatggtgatgaactctttagaacgcattactgttaagcctgtgttgagacattgatgctgtctatctcattttttagacagtttttgtagctttctattgagagtcaggtatgtgagcatctctgaagcagtgttgaatgtaattttcggaaacatggattgtgtattttgacttttattttataaatacacagctcaacagtgccttttttttccctcatagtcctgttggaagatgctcactactttctctcttctctctccctgccctcccccactccattcagttgattcatttatgcaaattctgtttccaacttgaaaccattttgtcacatctgttggagagataatcactccttttccttaacattctgccagctttctgatgttgaagtgtttcagttgactacctgatgcaaaagctataaaataaacagtgggaaggggaaaaattggtgtcctgttttaatattttcttttgtagccttgacactgatggacattttccaagctgactcagtgttcagtgtcaacttaactctcagatagtgttgccatcaagaaagcatgcaacatcattggtttctaatgattttatggcttgtgacaatattttatctggactgacatgcctctgctgcttttgctttgtacttcattgctggtaataaaatttcagatggaaaacttacaaaatatatacttaattagaagaaaaaaatagagaaagggctattagaattaaaaaaatttgaaagtaacttaatctaacatttatggcacagtttggacatatccataattttttttgggaacacacatttctgattttttttttcccccttaaagaagaaagtctcaattccattgattttcaattcttagccactggctcattgctttgagcaatgcttgattgattctatttatattatatgatattgggttgataaaataccagttcaatgatgagttttcttaacagaatttggtttgtacttgcagtggctgaacaaagagcatggcttgagaatcaaagggatctgcatttagcaatgtgatgtcagtaaatggacataacaggattgttgtaaaggttgggcatgatgtatgcaaagtactggccagggtagactaataactgatggcatttatatgctgtgctggaatattgttaccaagctgatgtgccgttctcaccctgcagaatactggttttgtcatttcataaatgatatttttataaatatttttgaatgactgtaaaaaaaaaaaaa

SEQ ID NO: 697 - DNA, 6641 bp, Homo sapiens
ggttacattttggatcctcgcggagtactggtcaggcggttaagtcctgtacctaggaaagagggcgagctctggggcgctctccggtgtcatgaggagcttcaaaagagtcaactttgggactctgctaagcagccagaaggaggctgaagagttgctgcccgccttgaaggagttcctgtccaaccctccagctggttttcccagcagccgatctgatgctgagaggagacaagcttgtgatgccatcctgagggcttgcaaccagcagctgactgctaagctagcttgccctaggcatctggggagcctgctggagctggcagagctggcctgtgatggctacttagtgtctaccccacagcgtcctcccctctacctggaacgaattctctttgtcttactgcggaatgctgctgcacaaggaagcccagaggccacactccgccttgctcagcccctccatgcctgcttggtgcagtgctctcgcgaggctgctccccaggactatgaggccgtggctcggggcagcttttctctgctttggaagggggcagaagccctgttggaacggcgagctgcatttgcagctcggctgaaggccttgagcttcctagtactcttggaggatgaaagtaccccttgtgaggttcctcactttgcttctccaacagcctgtcgagcggtagctgcccatcagctatttgatgccagtggccatggtctaaatgaagcagatgctgatttcctagatgacctgctctccaggcacgtgatcagagccttggtgggtgagagagggagctcttctgggcttctttctccccagagggccctctgcctcttggagctcaccttggaacactgccgtcgcttttgctggagccgccaccatgacaaagccatcagcgcagtggagaaggctcacagttacctaaggaacaccaatctagcccctagccttcagctatgtcagctgggggttaagctgctgcaggttggggaggaaggacctcaggcagtggccaagcttctgatcaaggcatcagctgtcctgagcaagagtatggaggcaccatcacccccacttcgggcattgtatgagagctgccagttcttcctttcaggcctggaacgaggcaccaagaggcgctatagacttgatgccattctgagcctctttgcttttcttggagggtactgctctcttctgcagcagctgcgggatgatggtgtgtatgggggctcctccaagcaacagcagtcttttcttcagatgtactttcagggacttcacctctacactgtggtggtttatgactttgcccaaggctgtcagatagttgatttggctgacctgacccaactagtggacagttgtaaatctaccgttgtctggatgctggaggccttagagggcctgtcgggccaagagctgacggaccacatggggatgaccgcttcttacaccagtaatttggcctacagcttctatagtcacaagctctatgccgaggcctgtgccatctctgagccgctctgtcagcacctgggtttggtgaagccaggcacttatcccgaggtgcctcctgagaagttgcacaggtgcttccggctacaagtagagagtttgaagaaactgggtaaacaggcccagggctgcaagatggtgattttgtggctggcagccctgcaaccctgtagccctgaacacatggctgagccagtcactttctgggttcgggtcaagatggatgcggccagggctggagacaaggagctacagctaaagactctgcgagacagcctcagtggctgggacccggagaccctggccctcctgctgagggaggagctgcaggcctacaaggcggtgcgggccgacactggacaggaacgcttcaacatcatctgtgacctcctggagctgagccccgaggagacaccagccggggcctgggcacgagccacccacctggtagaactggctcaggtgctctgctaccacgactttacgcagcagaccaactgctctgctctggatgctatccgggaagccctgcagcttctggactctgtgaggcctgaggcccaggccagagatcagcttctggacgataaagcacaggccttgctgtggctttacatctgtactctggaagccaaaatgcaggaaggtatcgagcgggatcggagagcccaggcccctggtaacttggaggaatttgaagtcaatgacctgaactatgaagataaactccaggaagatcgtttcctatacagtaacattgccttcaacctggctgcagatgctgctcagtccaaatgcctggaccaagccctggccctgtggaaggagctgcttacaaaggggcaggccccagctgtacggtgtctccagcagacagcagcctcactgcagatcctagcagccctctaccagctggtggcaaagcccatgcaggctctggaggtcctcctgctgctacggattgtctctgagagactgaaggaccactcgaaggcagctggctcctcctgccacatcacccagctcctcctgaccctcggctgtcccagctatgcccagttacacctggaagaggcagcatcgagcctgaagcatctcgatcagactactgacacatacctgctcctttccctgacctgtgatctgcttcgaagtcaactctactggactcaccagaaggtgaccaagggtgtctctctgctgctgtctgtgcttcgggatcctgccctccagaagtcctccaaggcttggtacttgctgcgtgtccaggtcctgcagctggtggcagcttaccttagcctcccgtcaaacaacctctcacactccctgtgggagcagctctgtgcccaaggctggcagacacctgagatagctctcatagactcccataagctcctccgaagcatcatcctcctgctgatgggcagtgacattctctcaactcagaaagcagctgtggagacatcgtttttggactatggtgaaaatctggtacaaaaatggcaggttctttcagaggtgctgagctgctcagagaagctggtctgccacctgggccgcctgggtagtgtgagtgaagccaaggccttttgcttggaggccctaaaacttacaacaaagctgcagataccacgccagtgtgccctgttcctggtgctgaagggcgagctggagctggcccgcaatgacattgatctctgtcagtcggacctgcagcaggttctgttcttgcttgagtcttgcacagagtttggtggggtgactcagcacctggactctgtgaagaaggtccacctgcagaaggggaagcagcaggcccaggtcccctgtcctccacagctcccagaggaggagctcttcctaagaggccctgctctagagctggtggccactgtggccaaggagcctggccccatagcaccttctacaaactcctccccagtcttgaaaaccaagccccagcccatacccaacttcctgtcccattcacccacctgtgactgctcgctctgcgccagccctgtcctcacagcagtctgtctgcgctgggtattggtcacggcaggggtgaggctggccatgggccaccaagcccagggtctggatctgctgcaggtcgtgctgaagggctgtcctgaagccgctgagcgcctcacccaagctctccaagcttccctgaatcataaaacacccccctccttggttccaagcctcttggatgagatcttggctcaagcatacacactgttggcactggagggcctgaaccagccatcaaacgagagcctgcagaaggttctacagtcagggctgaagtttgtagcagcacggataccccacctagagccctggcgagccagcctgctcttgatttgggccctcacaaaactaggtggcctcagctgctgtactacccaactttttgcaagctcctggggctggcagccaccattaataaaaagtgtccctggctcagagccctctaagactcagggccaaaaacgttctggacgagggcgccaaaagttagcctctgctcccctgcgcctcaataatacctctcagaaaggtctggaaggtagaggactgccctgcacacctaaacccccagaccggatcaggcaagctggccctcatgtccccttcacggtgtttgaggaagtctgccctacagagagcaagcctgaagtaccccaggcccccagggtacaacagagagtccagacgcgcctcaaggtgaacttcagtgatgacagtgacttggaagaccctgtctcagctgaggcctggctggcagaggagcctaagagacggggcactgcttcccggggccgggggcgagcaaggaagggcctgagcctaaagacggatgccgtggttgccccaggtagtgcccctgggaaccctggcctgaatggcaggagccggagggccaagaaggtggcatcaagacattgtgaggagcggcgtccccagagggccagtgaccaggccaggcctggccctgagatcatgaggaccatccctgaggaagaactgactgacaactggagaaaaatgagctttgagatcctcaggggctctgacggggaagactcagcctcaggtgggaagactccagctccgggccctgaggcagcttctggagaatgggagctgctgaggctggattccagcaagaagaagctgcccagcccatgcccagacaaggagagtgacaaggaccttggtcctcggctccggctcccctcagcccccgtagccactggtctttctaccctggactccatctgtgactccctgagtgttgctttccggggcattagtcactgtcctcctagtgggctctatgcccacctctgccgcttcctggccttgtgcctgggccaccgggatccttatgccactgctttccttgtcaccgagtctgtctccatcacctgtcgccaccagctgctcacccacctccacagacagctcagcaaggcccagaagcaccgaggatcacttgaaatagcagaccagctgcaggggctgagccttcaggagatgcctggagatgtccccctggcccgcatccagcgcctcttttccttcagggctttggaatctggccacttcccccagcctgaaaaggagagtttccaggagcgcctggctctgatccccagtggggtgactgtgtgtgtgttggccctggccaccctccagcccggaaccgtgggcaacaccctcctgctgacccggctggaaaaggacagtcccccagtcagtgtgcagattcccactggccagaacaagcttcatctgcgttcagtcctgaatgagtttgatgccatccagaaggcacagaaagagaacagcagctgtactgacaagcgagaatggtggacagggcggctggcactggaccacaggatggaggttctcatcgcttccctagagaagtctgtgctgggctgctggaaggggctgctgctgccgtccagtgaggagcccggccctgcccaggaggcctcccgcctacaggagctgctacaggactgtggctggaaatatcctgaccgcactctgctgaaaatcatgctcagtggtgccggtgccctcacccctcaggacattcaggccctggcctacgggctgtgcccaacccagccagagcgagcccaggagctcctgaatgaggcagtaggacgtctacagggcctgacagtaccaagcaatagccaccttgtcttggtcctagacaaggacttgcagaagctgccgtgggaaagcatgcccagcctccaagcactgcctgtcacccggctgccctccttccgcttcctactcagctactccatcatcaaagagtatggggcctcgccagtgctgagtcaaggggtggatccacgaagtaccttctatgtcctgaaccctcacaataacctgtcaagcacagaggagcaatttcgagccaatttcagcagtgaagctggctggagaggagtggttggggaggtgccaagacctgaacaggtgcaggaagccctgacaaagcatgatttgtatatctatgcagggcatggggctggtgcccgcttccttgatgggcaggctgtcctgcggctgagctgtcgggcagtggccctgctgtttggctgtagcagtgcggccctggctgtgcgtggaaacctggagggggctggcatcgtgctcaagtacatcatggctggttgccccttgtttctgggtaatctctgggatgtgactgaccgcgacattgaccgctacacggaagctctgctgcaaggctggcttggagcaggcccaggggccccccttctctactatgtaaaccaggcccgccaagctccccgactcaagtatcttattggggctgcacctatagcctatggcttgcctgtctctctgcggtaaccccatggagctgtcttattgatgctagaagcctcataactgttctacctccaaggttagatttaatccttaggataactcttttaaagtgattttccccagtgttttatatgaaacatttccttttgatttaacctcagtataataaagatacatcatttaaaccctgaaaaaaaaaaaaaaaaaa

SEQ ID NO: 698 - DNA, 6821 bp, Homo sapiens
gggcgcagtcgggagccggccgtggtggctccgtgcgtccgagcgtccgtccgcgccgtcggccatggccaagcgctccaggggccccgggcgccgctgcctgttggcgctcgtgctgttctgcgcctgggggacgctggccgtggtggcccagaagccgggcgcagggtgtccgagccgctgcctgtgcttccgcaccaccgtgcgctgcatgcatctgctgctggaggccgtgcccgccgtggcgccgcagacctccatcctagatcttcgctttaacagaatcagagagatccaacctggggcattcaggcggctgaggaacttgaacacattgcttctcaataataatcagatcaagaggatacctagtggagcatttgaagacttggaaaatttaaaatatctctatctgtacaagaatgagatccagtcaattgacaggcaagcatttaagggacttgcctctctagagcaactatacctgcactttaatcagatagaaactttggacccagattcgttccagcatctcccgaagctcgagaggctatttttgcataacaaccggattacacatttagttccagggacatttaatcacttggaatctatgaagagattgcgactggactcaaacacacttcactgcgactgtgaaatcctgtggttggcggatttgctgaaaacctacgcggagtcggggaacgcgcaggcagcggccatctgtgaatatcccagacgcatccagggacgctcagtggcaaccatcaccccggaagagctgaactgtgaaaggccccggatcacctccgagccccaggacgcagatgtgacctcggggaacaccgtgtacttcacctgcagagccgaaggcaaccccaagcctgagatcatctggctgcgaaacaataatgagctgagcatgaagacagattcccgcctaaacttgctggacgatgggaccctgatgatccagaacacacaggagacagaccagggtatctaccagtgcatggcaaagaacgtggccggagaggtgaagacgcaagaggtgaccctcaggtacttcgggtctccagctcgacccacttttgtaatccagccacagaatacagaggtgctggttggggagagcgtcacgctggagtgcagcgccacaggccaccccccgccgcggatctcctggacgagaggtgaccgcacacccttgccagttgacccgcgggtgaacatcacgccttctggcgggctttacatacagaacgtcgtacagggggacagcggagagtatgcgtgctctgcgaccaacaacattgacagcgtccatgccaccgctttcatcatcgtccaggctcttcctcagttcactgtgacgcctcaggacagagtcgttattgagggccagaccgtggatttccagtgtgaagccaagggcaacccgccgcccgtcatcgcctggaccaagggagggagccagctctccgtggaccggcggcacctggtcctgtcatcgggaacacttagaatctctggtgttgccctccacgaccagggccagtacgaatgccaggctgtcaacatcatcggctcccagaaggtcgtggcccacctgactgtgcagcccagagtcaccccagtgtttgccagcattcccagcgacacaacagtggaggtgggcgccaatgtgcagctcccgtgcagctcccagggcgagcccgagccagccatcacctggaacaaggatggggttcaggtgacagaaagtggaaaatttcacatcagccctgaaggattcttgaccatcaatgacgttggccctgcagacgcaggtcgctatgagtgtgtggcccggaacaccattgggtcggcctcggtgagcatggtgctcagtgtgaatgttcctgacgtcagtcgaaatggagatccgtttgtagctacctccatcgtggaagcgattgcgactgttgacagagctataaactcaacccgaacacatttgtttgacagccgtcctcgttctccaaatgatttgctggccttgttccggtatccgagggatccttacacagttgaacaggcacgggcgggagaaatctttgaacggacattgcagctcattcaggagcatgtacagcatggcttgatggtcgacctcaacggaacaagttaccactacaacgacctggtgtctccacagtacctgaacctcatcgcaaacctgtcgggctgtaccgcccaccggcgcgtgaacaactgctcggacatgtgcttccaccagaagtaccggacgcacgacggcacctgtaacaacctgcagcaccccatgtggggcgcctcgctgaccgccttcgagcgcctgctgaaatccgtgtacgagaatggcttcaacacccctcggggcatcaacccccaccgactgtacaacgggcacgcccttcccatgccgcgcctggtgtccaccaccctgatcgggacggagaccgtcacacccgacgagcagttcacccacatgctgatgcagtggggccagttcctggaccacgacctcgactccacggtggtggccctgagccaggcacgcttctccgacggacagcactgcagcaacgtgtgcagcaacgaccccccctgcttctctgtcatgatcccccccaatgactcccgggccaggagcggggcccgctgcatgttcttcgtgcgctccagccctgtgtgcggcagcggcatgacttcgctgctcatgaactccgtgtacccgcgggagcagatcaaccagctcacctcctacatagacgcatccaacgtgtacgggagcacggagcatgaggcccgcagcatccgcgacctggccagccaccgcggcctgctgcggcagggcatcgtgcagcggtccgggaagccgctgctccccttcgccaccgggccgcccacggagtgcatgcgggacgagaacgagagccccatcccctgcttcctggccggggaccaccgcgccaacgagcagctgggcctgaccagcatgcacacgctgtggttccgcgagcacaaccgcattgccacggagctgctcaagctgaacccgcactgggacggcgacaccatctactatgagaccaggaagatcgtgggtgcggagatccagcacatcacctaccagcactggctcccgaagatcctgggggaggtgggcatgaggacgctgggagagtaccacggctacgaccccggcatcaatgctggcatcttcaacgccttcgccaccgcggccttcaggtttggccacacgcttgtcaacccactgctttaccggctggacgagaacttccagcccattgcacaagatcacctcccccttcacaaagctttcttctctcccttccggattgtgaatgagggcggcatcgatccgcttctcagggggctgttcggggtggcggggaaaatgcgtgtgccctcgcagctgctgaacacggagctcacggagcggctgttctccatggcacacacggtggctctggacctggcggccatcaacatccagcggggccgggaccacgggatcccaccctaccacgactacagggtctactgcaatctatcggcggcacacacgttcgaggacctgaaaaatgagattaaaaaccctgagatccgggagaaactgaaaaggttgtatggctcgacactcaacatcgacctgtttccggcgctcgtggtggaggacctggtgcctggcagccggctgggccccaccctgatgtgtcttctcagcacacagttcaagcgcctgcgagatggggacaggttgtggtatgagaaccctggggtgttctccccggcccagctgactcagatcaagcagacgtcgctggccaggatcctatgcgacaacgcggacaacatcacccgggtgcagagcgacgtgttcagggtggcggagttccctcacggctacggcagctgtgacgagatccccagggtagacctccgggtgtggcaggactgctgtgaagactgtaggaccagggggcagttcaatgccttttcctatcatttccgaggcagacggtctcttgagttcagctaccaggaggacaagccgaccaagaaaacaagaccacggaaaatacccagtgttgggagacagggggaacatctcagcaacagcacctcagccttcagcacacgctcagatgcatctgggacaaatgacttcagagagtttgttctggaaatgcagaagaccatcacagacctcagaacacagataaagaaacttgaatcacggctcagtaccacagagtgcgtggatgccgggggcgaatctcacgccaacaacaccaagtggaaaaaagatgcatgcaccatttgtgaatgcaaagacgggcaggtcacctgcttcgtggaagcttgcccccctgccacctgtgctgtccccgtgaacatcccaggggcctgctgtccagtctgcttacagaagagggcggaggaaaagccctaggctcctgggaggctcctcagagtttgtctgctgtgccatcgtgagatcgggtggccgatggcagggagctgcggactgcagaccaggaaacacccagaactcgtgacatttcatgacaacgtccagctggtgctgttacagaaggcagtgcaggaggcttccaaccagagcatctgcggagaaggaggcacagcaggtgcctgaagggaagcaggcaggagtcctagcttcacgttagacttctcaggtttttatttaattcttttaaaatgaaaaattggtgctactattaaattgcacagttgaatcatttaggcgcctaaattgattttgcctcccaacaccatttctttttaaataaagcaggatacctctatatgtcagccttgccttgttcagatgccaggagccggcagacctgtcacccgcaggtggggtgagtcttggagctgccagaggggctcaccgaaatcggggttccatcacaagctatgtttaaaaagaaaattggtgtttggcaaacggaacagaacctttgatgagagcgttcacagggacactgtctgggggtgcagtgcaagcccccggcctcttccctgggaacctctgaactcctccttcctctgggctctctgtaacatttcaccacacgtcagcatctaatcccaagacaaacattcccgctgctcgaagcagctgtatagcctgtgactctccgtgtgtcagctccttccacacctgattagaacattcataagccacatttagaaacaggtttgctttcagctgtcacttgcacacatactgcctagttgtgaaccaaatgtgaaaaaacctccttcatcccattgtgtatctgatacctgccgagggccaagggtgtgtgttgacaacgccgctcccagccggccctggttgcgtccacgtcctgaacaagagccgcttccggatggctcttcccaagggaggaggagctcaagtgtcgggaactgtctaacttcaggttgtgtgagtgcgttaaaaaaaaaaaaaaaaaagaatccctatacctcatttgtatttttaaaatgcgtgatgttttatgaaattgtgtccattttttaggtattagatatggcagaaaaaccatttccactatgcaaagttcttttagacgtcagtgaaaatcaactctcatacctcatggtctctctttaattgaccaaaaccttccatttttctctaaatacaaagcgatctgtgttctgagcaacctttccccgaacacacagcttcagtgcagcacgctgacctgagtatccaccatgtgccaggcacagtgctgggcacacgaggcaccaaggtccgggccacctgcccgcagcaaggcccagctgaggtggtggagggagcccctgaggtcaggggccgtttcggttcagggtggcaggtgtccagcactggggtatggcgtcgaggcttccatggggtgggggaggccagcttccttctgacaggatgggcgcatacagtgcctggtgtgatttgtgcacaacccgtgttccaggtgcacatcctcccaaggagacacccagacccttccagcacgggccggccaagttgctgcggcggaggcagcatttcagctgtgaggaaggtcattggattcatgtgttttatctgtaaaaatggttgtcttaacttcttaacctcatattggtaagtgattgataaaaattggttggtgtttcatgacatgtggacttcttttgaaatagcaagtcaaatgtagtgaccaaattgtggaagagatttctgtcaaataggaaatgtgtaagttcgtctaaaagctgatggttatgtaagttgctcaggcactcagatgacagcagattctgggttctgggagtgttctgtgcctcttacatgccctggaggcctcatggtctcagtgctgaggcggcacacctgtagcacacctgcgtaatgtgcggtctgggccagtcacaaggaattgtgttgtctaagccaaagggggaagctgactgtgatttaccaaaaaaaattctgtaattcaaaccaaaatgtctgcggaatcaccagtttgatactctctgtaatcagaacagtgggcagtgcctgggtgaacgtgtctagcagccactgtgcgggatcgctgtaacaggagtggaatgtacatatttatttacttttctaactgctccaacagccaaatgccttttttatgaccattgtattcagttcattaccaaagaaatgtttgcactttgtaatgatgcctttcagttcaaataaatgggtcacattttcaaatgga

SEQ ID NO: 699 - DNA, 6062 bp, Homo sapiens
gaaattttgagaagtggtgggatgaagaagatccctgaagagaggagtaactgagacaaaggcgaggctagcaatagagagacaagtgagggaattagacctttggtatcatcatgaaaaggcctggaagaaacgctggtttatcctgcggagtggccggatgagcggtgacccagatgttctggaatactacaagaacgatcactccaagaagcctctgcggatcatcaacctgaacttctgtgagcaggtagatgcaggcctgacctttaacaagaaggagctgcaggatagttttgtgtttgacatcaagaccagtgaacgcaccttttacctggtggctgagacagaagaggacatgaataagtgggtccagagcatctgccagatctgtggcttcaatcaggctgaggagagcacagactccctgagaaatgtttcctcagccggtcatggcccccgctcttctccagctgagctcagcagctctagccagcaccttctccgagagcgcaagtcctcagccccatcacactccagccagccaactctgttcacgtttgaaccccctgtgtcaaaccacatgcagcccaccttgtccaccagcgcacctcaggagtatctctacttgcaccagtgcataagccgaagagcagaaaatgcaaggagtgccagcttctctcagggcaccagagcctcttttctcatgaggagtgacacagctgtacaaaaacttgcccagggcaatggacactgtgtcaacgggatcagtggtcaagtccatggcttctatagccttcccaagccgagccggcacaatacagaattcagagacagtacctacgacctcccccgcagcctggcctcccatggccacaccaagggcagcctcacaggctccgagacagataatgaggatgtgtacaccttcaagacgcccagcaacaccctgtgcagggagttcggggacctcctggtagacaatatggatgttccggccaccccactctcagcctaccagatccctaggacattcactctggacaaaaaccacaatgccatgacagtggccactcctggggactcagccatagctcccccaccccgcccccccaagccaagtcaggcagaaacacctcgatggggcagtcctcagcagagaccgccaatcagtgaaaatagcagatctgtcgctgccaccatccccagacgcaacaccctccctgcaatggacaacagccgacttcaccgagcttcttcctgtgagacctacgagtacccacagcgtggtggagagagtgcaggccggtctgctgaatccatgagtgatggagttggctctttcctgccagggaaaatgattgtgggccgatcggacagcaccaattctgaagacaactatgtgcccatgaatccaggttcttccaccctgttggccatggaacgagcaggtgataattcccagagcgtctacatcccaatgagcccaggggcccatcactttgactcacttggctacccatcaacaacccttcctgtgcaccgaggccccagcagaggaagtgagattcagccaccccctgtcaaccgcaacctcaaacctgatcggaaagcaaagccaacaccacttgacctgaggaacaacaccgtcatcgatgaactccccttcaagtcacctatcaccaagtcttggtctagggccaaccacaccttcaactccagctcctcccagtactgccgccccatctccacccagagcatcaccagcacagactcaggagacagcgaagagaactatgtccctatgcaaaacccagtgtctgcatctcccgttcccagtggcacgaacagtcctgcccctaagaagagcaccggcagcgttgattatctggccctggacttccagccgagctccccaagcccccaccgcaagccatctacttcatccgtcacctctgatgagaaggtggactacgttcaggtggacaaggagaagacccaggccctgcagaacaccatgcaggagtggacagacgtgcggcagtcctcagagccttccaagggtgccaagctgtgatgagagggccaccgcagagcccaggaggcagcatctccagagctggcccttcccatctcccctctcccctctcccgttcttcctcccatccacctcctctctactctgccagtctcagccttcaaagcacttgacatcagggaccctgaacccttcccctgggaggtgagggcctgatcaaggcacctcctctgcccactcggggcccagctgtgatttttatcagtaatggccatgcctccacccaccttagttaggagctacttccaaaaagcatccttcagcctcttcctgtcctttagacctgactctctaccagatgtttggagggaagggctggggctctgagccagattccacacctcacgttcagtcacagccctcagctatcttccctccggccactgggctacctctccttcagtcccagaagacaagtctcaccaacccagggagtcaaggaccagcaaaccaaagtggataatggactttttcattcctgtttttcttggcaggagagaagcaaggccactaaaagaggagatggtggagacggaggctcagcagtggtcttgaggggtaaaggacttagatgcccagatgaagagggaaagctgacatctgcagggaacccactttgaggctgaggccatggcaggacagctgctgtggggtgcagaggcagaagatgaaggacaaaaggaagggaaaactgatggccaacctagagcagcaaggagcagggcttggagctcgggtggtggagatgacaaggacactgtggggtctgggtccccagaactctggagctacaggccactctaggcccaagggctagtcctcttccccagtcccctcagaggcccccgccagccccaccttgaaagcagcatacaggggaaggcttggaccaagctgggcgaccaagcacatggggcaggaacacatggtaaaggggtggggaatatgggagggagtgtggtgtggatgggggtgatgcagggactgaggggaaccctgggacaggcacaggctgggcagaggcacagggcagtgcaggggactctgcagtggggtcgggaagtgagtttctttgcagtgagcagtgcagtggaagtcgggcacagaggtagcagacagatgtgaagcagtggtgaaggccatgtagcaagtggggaaatacatccaaagggcctgggagttggggggtgcccaacgcaatccttgggggtgcagggtggagcagaaagtgaaggagggacacgtgcaagagtggtgtgcatggtggtgtgacatgaggaccgttcctaggatgggacagtgggtcaggcaggacaaggagaaagcagggcagaatgatgcctagaggaccacatcaggcatggctgacagcttgtgcccatgggctgtggcgtatgtcagatcgcagggtaggaacgagtctggcctggtgccggcccagtgtttcctcagctcatccgccctctgttgctccctagcattccaggagccatcttggactctcctccccaggtttgaaaggccatcagattagcagggacggggtgtagggcatcacccaaggttccttctcttaaactaagggtgggggatctgaatgtttttatgttgactgttcttgactaaattttcaagagtttcagaagcaacaggacagaccagacgtttcattctaccctggggcgaacagaacttcttcctcccaaacaatgacttcctgccatgtttgatggggacagctaccactgtcctctgcccccattcccctttcagctcccatgagcatgcatagttcaccagaccaatggcctagccattctctaagtcccatcctggaagaagttatttcttcaagagctgcacctctcctcctagcattagtttagatcaactcaaggagtatttattaatggctgctgtctccagtttctggggttaagcactaaggacacaagaatcaatcagaccttctccctgaacttaagatagccacaatcagaaaaaggacaaggacatgagacagtggtgatggccatcagacagagacttcaaatgctgatggagggcagaggaagtacttagggaggttggtgtcagaggcaggagtgggggatcagggaaggtggattctaggaaaagggagtgcctgaggtaggccttagaaggggatgagtcagatttttacagaggaggagggcagggcttgggtccagtggaggaagaaggaaggagaggcttggaaagccttgtgtcttgggaacaaaaggcctttgagcatatgggtccagccactcagaagtgcaggggccatgccttggtgttccaataagtgaatggaagcagtggtggtagctacactgggcagagttggcagggtgctggttcactctgcccagccctgaatgtgtgccttaaaggccccctacaaggggccccatacgacagagcttttaactggtgccttccctgtacccgcagcagccacaagtgggcccagactattgcagcctcccataaacatgtgagcatgttctgagtgtgccatgatgtgagtggacctggctggaatcttcggagagcgactgaggtgttcaaatcgaatctcccaggaggcttccttccagccccctattctggtaactaccaggaggcttccttccagccccctattctggtaactaccaaaatccctcgggtgcaagtgtaggggtagagatggaaggatgagaggtgaaattgaccttttgaaagcaaagctctggctcacaggccccaaactaccagccgtatctagcatatccccaccctccacccactacctcctccaacaaaggagtcaactcagttgaaaaaactggtcctttggcctatccatgggtcaaagtccacctctcctgggggcctggagaggactgagcctacggaaaggggataccttcccactcagcactgcttcacacaggccccctgcctggggctctccaaggagccttcttcacccacttccagctccacttctgcaaggttaagtcaagtgagaacgatgagaaatagggagatggtgtctccttaagtccttgatctgcctgtctgtggaatgggaggttggattagctgcgctgaggtcccatccacagctggtgctcagctgcttgaaggggagactccctcctctgtaacttctttctgggggattggggtgggcagtacctatccccagtcccctcctagcttgactttagtggtttccaatgtagaagttaacaaagtatgccccattcctgtgacaaaagcacaaccattctgaagttactggagcatgggctcagctcatcctccctctggccccttctcccatggggacatctcggcccagcacccctatcccatttccagagttcttccttccccatctgggccttcataaaatgcaggggaagccagactggtctcaggagcgctaaagcccttccgtggggggtcgtctttctgggactagccctgctgtttaggacctgggaccacaatggggtacctgccgagggggtccccaagagatccaggctgtcatgtgatttatggtggcatgtgttgtgtatttgttggctacttgtgtcttgaaatctagaattatttcacgcagaattgtcactgtttgtcaggaagagaaaatgggctagtggaagcccagtcttgagttcttgtcttgttaccatttaaaattgacatttaattttcaaatcactgttggtgcctaatcacttaagttattaatttattctgttgtattcttttttttaaattgtaacatatttatccggtgggtgggacaggagtgtgttcaagtgggtcatgtttttgctgtggtgacacatggtacaggcttggagcttgcaggtccctttctactgtggtgttggagcaggacaataaagtccactagaaatgcaccccagaaccaaaa

SEQ ID NO: 700 - DNA, 2764 bp, Homo sapiens
aagcgcgtcgccaccgcccccgcctaggcgagagcccagagagctgaacctgcatcccggacctgcggcgaccgtcgtacaccatgggcctccacctccgcccctaccgtgtggggctgctcccggatggcctcctgttcctcttgctgctgctaatgctgctcgcggacccagcgctcccggccggacgtcaccccccagtggtgctggtccctggtgatttgggtaaccaactggaagccaagctggacaagccgacagtggtgcactacctctgctccaagaagaccgaaagctacttcacaatctggctgaacctggaactgctgctgcctgtcatcattgactgctggattgacaatatcaggctggtttacaacaaaacatccagggccacccagtttcctgatggtgtggatgtacgtgtccctggctttgggaagaccttctcactggagttcctggaccccagcaaaagcagcgtgggttcctatttccacaccatggtggagagccttgtgggctggggctacacacggggtgaggatgtccgaggggctccctatgactggcgccgagccccaaatgaaaacgggccctacttcctggccctccgcgagatgatcgaggagatgtaccagctgtatgggggccccgtggtgctggttgcccacagtatgggcaacatgtacacgctctactttctgcagcggcagccgcaggcctggaaggacaagtatatccgggccttcgtgtcactgggtgcgccctgggggggcgtggccaagaccctgcgcgtcctggcttcaggagacaacaaccggatcccagtcatcgggcccctgaagatccgggagcagcagcggtcagctgtctccaccagctggctgctgccctacaactacacatggtcacctgagaaggtgttcgtgcagacacccacaatcaactacacactgcgggactaccgcaagttcttccaggacatcggctttgaagatggctggctcatgcggcaggacacagaagggctggtggaagccacgatgccacctggcgtgcagctgcactgcctctatggtactggcgtccccacaccagactccttctactatgagagcttccctgaccgtgaccctaaaatctgctttggtgacggcgatggtactgtgaacttgaagagtgccctgcagtgccaggcctggcagagccgccaggagcaccaagtgttgctgcaggagctgccaggcagcgagcacatcgagatgctggccaacgccaccaccctggcctatctgaaacgtgtgctccttgggccctgactcctgtgccacaggactcctgtggctcggccgtggacctgctgttggcctctggggctgtcatggcccacgcgttttgcaaagtttgtgactcaccattcaaggccccgagtcttggactgtgaagcatctgccatggggaagtgctgtttgttatcctttctctgtggcagtgaagaaggaagaaatgagagtctagactcaagggacactggatggcaagaatgctgctgatggtggaactgctgtgaccttaggactggctccacagggtggactggctgggccctggtcccagtccctgcctggggccatgtgtcccccctattcctgtgggcttttcatacttgcctactgggccctggccccgcagccttcctatgagggatgttactgggctgtggtcctgtacccagaggtcccagggatcggctcctggcccctcgggtgacccttcccacacaccagccacagataggcctgccactggtcatgggtagctagagctgctggcttccctgtggcttagctggtggccagcctgactggcttcctgggcgagcctagtagctcctgcaggcaggggcagtttgttgcgttcttcgtggttcccaggccctgggacatctcactccactcctacctcccttaccaccaggagcattcaagctctggattgggcagcagatgtgcccccagtcccgcaggctgtgttccaggggccctgatttcctcggatgtgctattggccccaggactgaagctgcctcccttcaccctgggactgtggttccaaggatgagagcaggggttggagccatggccttctgggaacctatggagaaagggaatccaaggaagcagccaaggctgctcgcagcttccctgagctgcacctcttgctaaccccaccatcacactgccaccctgccctagggtctcactagtaccaagtgggtcagcacagggctgaggatggggctcctatccaccctggccagcacccagcttagtgctgggactagcccagaaacttgaatgggaccctgagagagccaggggtcccctgaggcccccctaggggctttctgtctgccccagggtgctccatggatctccctgtggcagcaggcatggagagtcagggctgccttcatggcagtaggctctaagtgggtgactggccacaggccgagaaaagggtacagcctctaggtggggttcccaaagacgccttcacgctggactgagctgctctcccacagggtttctgtgcagctggattttctctgttgcatacatgcctggcatctgtctccccttgttcctgagtggccccacatggggctctgagcaggctgtatctggattctggcaataaaagtactctggatgctgtaaaaaaaaaaaaaaaaaaaaaaaaaaaaaaaaaaaaaaaaaaa

SEQ ID NO: 701 - DNA, 2538 bp, Homo sapiens
ttttcgggggttgaagccggaagtggcgcacagccctagcagcaacaacagttttccacgtgcgcgtagggcgccgggatcacgtggggaggcagaagccaatggggaagcgtttcgtgtaggtcttctgaggtggtggcgccagcggctacctcctgcctgtgaggagctggctgagaggggactgggcgccggcggggaaggaggagcgctaggtcggtgtacgaccgagattagggtgcgtgccagctccgggaggccgcggtgaggggccgggcccaagctgccgacccgagccgatcgtcagggtcgccagcgcctcagctctgtggaggagcagcagtagtcggagggtgcaggatattagaaatggctactccccagtcaattttcatctttgcaatctgcattttaatgataacagaattaattctggcctcaaaaagctactatgatatcttaggtgtgccaaaatcggcatcagagcgccaaatcaagaaggcctttcacaagttggccatgaagtaccaccctgacaaaaataagagcccggatgctgaagcaaaattcagagagattgcagaagcatatgaaacactctcagatgctaatagacgaaaagagtatgatacacttggacacagtgcttttactagtggtaaaggacaaagaggtagtggaagttcttttgagcagtcatttaacttcaattttgatgacttatttaaagactttggcttttttggtcaaaaccaaaacactggatccaagaagcgttttgaaaatcatttccagacacgccaggatggtggttccagtagacaaaggcatcatttccaagaattttcttttggaggtggattatttgatgacatgtttgaagatatggagaaaatgttttcttttagtggttttgactctaccaatcagcatacagtacagactgaaaatagatttcatggatctagcaagcactgcaggactgtcactcaacgaagaggaaatatggttactacatacactgactgttcaggacagtagttcttattctattctcactaaatccaactggttgactcttcctcattatctttgatgctaaacaattttctgtgaactattttgacaagtgcatgatttcactttaaacaatttgatatagctattaaatatatttaagggttttttttttttgacaaattcaacattcaacgagtagacaaaatgctaattatttccctgattaggaaagtttctttaaaaaacacgtaattttgcctagtgctttttctctacctgcccttgggctcactaatatcaccagtattattaccaagaaaatattgagtttacctgattaaactttaaaagttaattgtagatttaaattgtgtgaacctaatgatttttgcagtgaaacctttactaattcaaagttgcatgttctatgacatctgtgacttgcgttgcagagtgtacatgaaactgtataattgagtcattcagtaaaggagaacagtatcttggttaattgctactgaaaggttgagaaaggaatggtttgatatttaccacagcgctgtgcctttctacagtagaactggggtaaaggaaatggttttattgcccatagtcatttaggctggaaaaaagttgaaaacttaacgaaatattgccaagagattgttatgtgtttggttccagcctaaaaatgattttgtagtgttgaaatcatagctacttacatagctttttcatatttctttcttagttgttggcactcttaggtcttagtatggatttatgtgtttgtgtgtgtgtagtttatcctctctctcatctttatctagagattgactgatacctcattctgtttgtaaaaccagccagtaatttctgtgcaaccttactatgtgcaatatttttaaatcctgagaaatgtgtgcttttgttttcggatagacttatttctttagttctgcacttttccacattatactccatatgagtattaatcctatggatacatattaaaacaagtgtctcatacaacattgtatgtgagagaaatataaatatttacaacctgatattcgttgttgttttattgttaaaagtttattatgcaactctggaggtatagagggcatataagctatgggacatatgctgatcacaggctatattcatgaagttacttttgaccaacctgaaaactgataggattttgtttgtcatttggtaatttctactgcattcttaccatccttctctcacaaattttgatagcttgaagatctttttaattataattttgttgtatttgtttcctaggagcaagtgttcctgctgccagttctttcctctttaggcgtggttgagaaaaagcagaaactttacataaagctgtatttcttaatcatctttaatttgaaacttaagaaaatgaatttattctgttatatttatgtaacttatttcctggaagttatatctactagttttgtttgataataataaaattagctataccttgaa

SEQ ID NO: 702 - DNA, 2583 bp, Homo sapiens
gcgcatgagcagtgctgctcccaacccgccagtcgcggtctccggcgccagctacgccgctgccgctgtcactatggcccattacaaagccgccgactcgaagcgtgagcagttccggaggtacttggagaagtcgggggtgctggacacgctgaccaaggtgttggtagccttatatgaagaaccagagaaacctaacagtgctttggattttttaaagcatcacttaggagctgctactccagaaaatccagaaatagagctgcttcgcctagaactggccgaaatgaaagagaagtatgaagctattgtagaagaaaataaaaaactgaaagcaaagcttgctcagtatgaaccacctcaggaggagaagcgtgctgaataggattcttctcagtttgaaagacaatgaaaaatggttttgtatgacttgaatagtttgtatagtatataatcttttctgaacagatgctatagaactcttttaatatgtttaattcacctatcacactctgttaaaaacacatagaatcatcaataaaaactcaatataactttctttgggtcttaaagcaggagaatccaaagtaaatcctgaacaaaacctaaacacagccatctaactcattaccttaaaagacattctgtttattagtctgattaggaatgatggcactggttgtattttagccaagacagtttagcatggagctattccttggtgcagttcaggatatgaacacaggtacagtcattctttgaaggtgacactgttctgtatattccctataggcagctggagagatctgtgtgacacaagatgcttttgtacgggttcccatgaatcttctgctcttgtttgtgtgacatggaacaaataacttctttgccaccactttgccttagataactgtgtgtgtgtgtgccagtttgaactctgacaccacattttccttctatgcaatcatgcctgtctgataatcttgcattgctttcctctgagctttagtgggtcctagttgcacactggcctttctgtgctgtttttcaatttgcctaataatagcagttaccctgattgtaatttatgtaactttaaacaggatcacactgtaccccctgcctgccttatttgcttactgagcacaggacagaggcaatatacaactctgggttcacacacaagctgagatgagaagaggaatgagccatatattggggaaaatcatagtttgtaggtataattatatagtgcttttctccctcaaagtatttttctagccttgaattcattttatcttcattatccctgtgaagtaggtgggacaagtataaggggaagaggggtgctgaatttttaggccaaagactgatattaatacaaatcactcactaactgtagagccttgggcattatcagtgaactactctgagatttactgtcttcatctgtttaatgagtagaatgtccgtgatgcctacctcacagggttgttgtgagggtcaaatgagaatgtatgtgaaagatttgtaaatggtaaagcactatattcttgtttgttagtcctttttcctttctttgggtagacctacagtcagatgttttgttttatggatcacttattttccttactggtagactgtcgttttatagacatattcctatttcatatattctctccctgttgttagagaacctatctttgtttttggtcaaaacacacatagaaaacaaaatgatccaatgaaaactggtttaactagcaaaagccttggcacctgttggagactatgaccaagccaataaaaagggcatttaaatcagccctgttagtaggaatgtggctatggctggtgcctcttctagtcacaagtttgtttttggagggggtccagaagatcattcccttgcatagatttctcttttaccaatttgagtgcctcctacatgggcagcagtggactaagtgctgggtgtgataaagaggaatgacttaattatgagactgtatataatcaaatacagtgtgggttaggacctgtggcagaccattataataaagcatggccccgtgagggttttgaaagagagagagacttggcttccttagttggtatgatagtttcttggtagatacaggttgaaaattttttgtggcagccaatcctcatgggctttttactcatttgattagtattaatatttatgtcagtaagccaggtgactgtgactgtctttggtaccatcctttttgaacagaaaggcaacatgtgggttggataatcacacttttaggtgaaactgacttgcttaaactgtaacagtcagtgctatttaagaattcaggataagcttagcctctagaggtcctcttcaacatttctgtcaaggatttggatgaatacaacaagatgctccatggaagagaaaatggataaatggatcccaccagttaagctcctattatgcttcagctgctttgtctataaaatatcgacttcacatcttgcctatctcacaagttggttgtaagaatcaaattaaatataatggatgtaaaagtgaaaaaaaaaaaaaaaaaa

SEQ ID NO: 703 - DNA, 4173 bp, Homo sapiens
agaggaactaaagccgggagtccggtgaacgggcagaagcagggccatgcccaagccacccccaagatccccctgaacctgcacctccatcacgacccattcaggagcctccaggagcccagacaccagccccccaccatgggcagcaaggagcgcttccactggcagagccacaacgtgaagcagagcggcgtggatgacatggtgcttcttccccagatcaccgaagacgccattgccgccaacctccggaagcgcttcatggacgactacatcttcacctacatcggctctgtgctcatctctgtaaaccccttcaagcagatgccctacttcaccgaccgtgagatcgacctctatcagggcgcggcccagtatgagaatcccccgcacatctacgccctcacggacaacatgtaccggaacatgcttatcgactgtgagaaccagtgtgtcatcattagtggagagagtggagctgggaagacagtggcagccaaatatatcatgggctacatctccaaggtgtctggcggaggcgagaaggtccagcacgtcaaagatatcatcctgcagtccaacccgctgctcgaggccttcggcaacgccaagactgtgcgcaacaacaattccagccgctttggcaagtactttgagatccagttcagccgaggtggggagccagatgggggcaagatctccaacttcttgctggagaagtcccgcgtggtcatgcaaaatgaaaatgagaggaacttccacatctactaccagctgctggaaggggcctcccaggagcaaaggcagaacctgggcctcatgacaccggactactattactacctcaaccaatcggacacctaccaggtggacggcacggacgacagaagcgactttggtgagactctgagtgctatgcaggttattgggatcccgcccagcatccagcagctggtcctgcagctcgtggcggggatcttgcacctggggaacatcagtttctgtgaagacgggaattacgcccgagtggagagtgtggacctcctggcctttcccgcctacctgctgggcattgacagcgggcgactgcaggagaagctgaccagccgcaagatggacagccgctggggcgggcgcagcgagtccatcaatgtgaccctcaacgtggagcaggcagcctacacccgtgatgccctggccaaggggctctatgcccgcctcttcgacttcctcgtggaggccatcaaccgtgctatgcagaaaccccaggaagagtacagcatcggtgtgctggacatttacggcttcgagatcttccagaaaaatggcttcgagcagttttgcatcaacttcgtcaatgagaagctgcagcaaatctttatcgaacttaccctgaaggccgagcaggaggagtatgtgcaggaaggcatccgctggactccaatccagtacttcaacaacaaggtcgtctgtgacctcatcgaaaacaagctgagccccccaggcatcatgagcgtcttggacgacgtgtgcgccaccatgcacgccacgggcgggggagcagaccagacactgctgcagaagctgcaggcggctgtggggacccacgagcatttcaacagctggagcgccggcttcgtcatccaccactacgctggcaaggtctcctacgacgtcagcggcttctgcgagaggaaccgagacgttctcttctccgacctcatagagctgatgcagaccagtgagcaggccttcctccggatgctcttccccgagaagctggatggagacaagaaggggcgccccagcaccgccggctccaagatcaagaaacaagccaacgacctggtggccacactgatgaggtgcacaccccactacatccgctgcatcaaacccaacgagaccaagaggccccgagactgggaggagaacagagtcaagcaccaggtggaatacctgggcctgaaggagaacatcagggtgcgcagagccggcttcgcctaccgccgccagttcgccaaattcctgcagaggtatgccattctgacccccgagacgtggccgcggtggcgtggggacgaacgccagggcgtccagcacctgcttcgggcggtcaacatggagcccgaccagtaccagatggggagcaccaaggtctttgtcaagaacccagagtcgcttttcctcctggaggaggtgcgagagcgaaagttcgatggctttgcccgaaccatccagaaggcctggcggcgccacgtggctgtccggaagtacgaggagatgcgggaggaagcttccaacatcctgctgaacaagaaggagcggaggcgcaacagcatcaatcggaacttcgtcggggactacctggggctggaggagcggcccgagctgcgtcagttcctgggcaagagggagcgggtggacttcgccgattcggtcaccaagtacgaccgccgcttcaagcccatcaagcgggacttgatcctgacgcccaagtgtgtgtatgtgattgggcgagagaaagtgaagaagggacctgagaagggccaggtgtgtgaagtcttgaagaagaaagtggacatccaggctctgcggggagtctccctcagcacgcgacaggacgacttcttcatcctccaagaggatgccgccgacagcttcctggagagcgtcttcaagaccgagtttgtcagccttctgtgcaagcgcttcgaggaggcgacgcggaggcccctgcccctcaccttcagcgacacactacagtttcgggtgaagaaggagggctggggcggtggcggcacccgcagcgtcaccttctcccgcggcttcggcgacttggcagtgctcaaggttggcggtcggaccctcacggtcagcgtgggcgatgggctgcccaagagctccaagcctacgcggaagggaatggccaagggaaaacctcggaggtcgtcccaagcccctacccgggcggcccctgcgccccccagaggcatggatcgcaatggggtgcccccctctgccagagggggccccctgcccctggagatcatgtctggagggggcacccacaggcctccccggggccctccgtccacatccctgggagccagcagacgaccccgggcacgtccgccctcagagcacaacacagaattcctcaacgtgcctgaccagggcatggccggcatgcagaggaagcgcagcgtggggcaacggccagtgcctggtgtgggccgacccaagccccagcctcggacacatggtcccaggtgccgggccctataccagtacgtgggccaagatgtggacgagctgagcttcaacgtgaacgaggtcattgagatcctcatggaagatccctcgggctggtggaagggccggcttcacggccaggagggccttttcccaggaaactacgtggagaagatctgagctgggccctgggatactgccttctctttcgcccgcctatctgcctgccggcctggtggggagccaggccctgccaatgagagcctcgtttacctgggctgcaatagcctaaaagtccagtcctttggcctccagtcctgcccaggccctgggtcaccaggtcactgctgcagcccccgcccctgggccctggtcttcctccaacatcacacctgctgcccattctccatttctgtgtgtgtcaaaggggactaacagcagaatctacctcccaactgccatgtgattaagaaatgggtcttgagtcctgtgctgttggcaaagtgccaggcacagttggggaggggggggtccttaacaagcgtgactttgctcattctgtcatcactaaggcaataaacctttgccaggtgaaagcacgagttaacttactaagtgcccaacaaggacgatgttttcacagccctgtgaggtaggagctgtgaaggaccccatcttacaggtggaacaatggaggttcagagaggttcactgacccaagactgcacagagccatgccttgcattcatatgtgaccataaagcttgaatttgtcccagtttgggctgggcgcagtggctcacgcctgtaatcccagcactttgggaggctgaggcgggcagatcacgtgagaccaggagttcaagaccagcctggataacacagcaaaaccctgtttctactaaaaatttaaaaaag

SEQ ID NO: 704 - DNA, 4689 bp, Homo sapiens
ctttcccttgggtcctctctgttacagaagttctgatttttcctagcgagctggaggaaaggcaggtacccggagtggagttatattacctgtttctttgttctgatgggaccccagagaggacatcacgctttgtaactggttcttcaaggggagaagcaaatgtgtccctgaaaacttcagctgccgcgtttggcaccagtgatttgccttcaaggaaactggggagtcagaaaattgggaactcatatcaacatggcaaacctattgaaaacagtggtgactggctgctcgtgtcctctacttagcaatttggggtcctgtaagggtctacgtgtgaagaaggattttttacgaacattttatactcaccaagaactgtggtgtaaagcgcctgtaaaaccaggaattccatataagcaactgactgttggagtccccaaagagatattccaaaatgagaagcgagtggcattgtctcctgctggtgttcagaacttggtcaagcagggttttaatgttgtcgtggaatcgggtgcgggcgaagcttccaagttctcagatgatcactatagagtggcaggtgcccaaatccaaggggcaaaggaagtgctggcttctgatttggtggtcaaagtgcgagcccctatggttaatccaacattaggtgttcatgaagctgaccttttaaagacatcaggaacgctgattagttttatttacccagcccaaaatccagagttgctaaataaactttcccaaagaaaaactacagttctggcaatggaccaggttccaagagtcacaattgctcagggatatgatgcgctaagctccatggccaacattgcgggttataaggctgttgtcctagcagcaaatcattttggacgtttttttactggtcagatcacagctgctggaaaagttcctccagctaagattctgatagttggtggtggtgttgctgggcttgcttctgcaggcgcagcaaagtcgatgggtgcaattgttcgaggatttgacacaagagctgcagctttggaacagttcaagtctcttggtgctgagcccttggaggtggacttgaaggaatctggtgagggacaaggaggatatgcaaaagagatgtccaaagagttcattgaagctgaaatgaaactctttgctcaacaatgcaaggaggtagacatccttatcagcacagcacttattccaggtaaaaaagctccagttttatttaataaagaaatgattgagtcaatgaaggaaggttcagttgttgtggatttagctgctgaggctggtggaaactttgaaaccactaagccaggagaactctacattcataagggaattactcacataggctacacagacctgcccagccgaatggccactcaggccagcaccctatattccaacaacatcaccaaactcctgaaggccatcagcccggacaaagataatttttattttgatgtgaaagatgactttgactttggtacgatgggtcatgtcattagaggaactgtagtgatgaaagatggtaaagtgattttcccagctcccacaccgaaaaatattcctcaaggtgccccagtaaaacagaagacagtggctgagctggaagctgaaaaagcagctaccattacacccttcaggaagacaatgtcaacggcttctgcatatacagcaggtctcacagggatactgggtttgggcattgcggctcccaatctagccttttctcagatggtgaccacttttggcttggctggcattgtggggtatcataccgtctggggagtgacccctgctctccactcaccactgatgtctgtgacaaatgcaatctcagggctgactgcagttggtgggttggcactgatgggaggacatttgtatccttccacaacttctcagggccttgctgctcttgctgcattcatatcctctgtcaacattgcaggtggctttctggtgactcagagaatgctggacatgttcaagcgtcccactgaccccccagaatacaactacctgtacctgctccctgccggcacctttgttggtggatatttagctgccctctacagtggttataacattgaacagatcatgtacctaggctcgggtttgtgctgtgtcggtgccttggctggcctctccacccagggaacagcacgtcttggcaatgcactgggcatgattggggttgctggaggactggcagccaccctcggagtcctaaaaccgggcccagaattactagctcagatgtctggagcgatggctttgggtggtaccattggattgacaattgccaaacgcatccagatttctgatttacctcaattagttgctgcttttcacagtttagtgggtttggcagctgtacttacttgcatagctgagtacattatagaatatccacattttgctacggatgcagcagcaaatctcaccaagattgtggcctacctcggcacttacattggtggcgtcacctttagtgggtctctcattgcctatggaaaattgcagggtctcctgaaatctgcccctctcctactgcctggaaggcacttactcaatgcaggcttactggctgctagtgtgggcgggataatcccattcatggtggacccaagctttactactggcatcacctgtctgggttcagtgtctgctctctctgctgtcatgggtgtgactttgacagctgctattgggggtgctgacatgcccgtcgttatcactgtgctgaacagctactcaggctgggccctgtgtgcagagggcttcctgctcaacaacaatctgctgaccatcgtgggtgcactcataggctcgtctggtgctatcctgtcatacatcatgtgtgtggcaatgaatcgctccctggctaatgtgattcttggaggctatggcaccacttcaacagctggtggaaaacccatggaaatttctggcacacatacggaaatcaaccttgacaatgcaattgacatgattcgagaagctaatagcattattattacaccaggctatggtctctgtgcagccaaagctcaataccccattgctgatttggtaaagatgctcactgagcaaggcaaaaaagtcaggtttggaattcacccagttgcaggccgaatgcctggtcagcttaatgtgctgctggctgaggctggtgtgccatatgacattgtgttggaaatggatgagatcaaccatgattttccagatactgatttggtccttgtaattggagctaatgacactgttaattcagcagctcaagaagatcccaactctattattgcaggcatgccagtccttgaggtctggaaatcaaagcaggtgattgttatgaagaggtctttgggtgttggctatgctgcagtggacaatccaatcttctacaaacctaacacggccatgcttctaggtgatgccaagaaaacatgtgacgcgctccaggcgaaagttagagaatcctatcagaagtaaatattaaggatcaagctgttagctaataatgccacctctgcagttttgggaacaggcaaataaagtatcagtatacatggtgatgtacatctgtagcaaagctcttggagaaaatgaagactgaagaaagcaaagcaaaaactgtatagagagatttttcaaaagcagtaatccctcaattttaaaaaaggattgaaaattctaaatgtctttctgtgcatattttttgtgttaggaatcaaaagtattttataaaaggagaaagaacagcctcattttagatgtagtcctgttggattttttatgcctcctcagtaaccagaaatgttttaaaaaactaagtgtttaggatttcaagacaacattatacatggctctgaaatatctgacacaatgtaaacattgcaggcacctgcattttatgttttttttttcaacaaatgtgactaatttgaaacttttatgaacttctgagctgtccccttgcaattcaaccgcagtttgaattaatcatatcaaatcagttttaattttttaaattgtacttcagagtctatatttcaagggcacattttctcactactattttaatacattaaaggactaaataatctttcagagatgctggaaacaaatcatttgctttatatgtttcattagaataccaatgaaacatacaacttgaaaattagtaatagtatttttgaagatcccatttctaattggagatctctttaatttcgatcaacttataatgtgtagtactatattaagtgcacttgagtggaattcaacatttgactaataaaatgagttcatcatgttggcaagtgatgtggcaattatctctggtgacaaaagagtaaaatcaaatatttctgcctgttacaaatatcaaggaagacctgctactatgaaatagatgacattaatctgtcttcactgtttataatacggatggattttttttcaaatcagtgtgtgttttgaggtcttatgtaattgatgacatttgagagaaatggtggctttttttagctacctctttgttcatttaagcaccagtaaagatcatgtctttttatagaagtgtagattttctttgtgactttgctatcgtgcctaaagctctaaatataggtgaatgtgtgatgaatactcaaaaaaaaaaaa

SEQ ID NO: 705 - DNA, 3959 bp, Homo sapiens
acactgcgtccggggccagacgacgatatcagcgcggggtccccacaacgccatggggcagagccaactctcgagcgcgtgatcgaagcccgcagttttttcgcccccgtcacttccgggtgcgacaatctcttctgtccggccagccgctggagtcgttaggtgccgccttgcttctgacgagccacacgtttgcttcttccctgtgttcccagctggagggacatgagtgtccctgggccgtcgtctccggacggggccctgacacggccaccctactgcctggaggccggggagccgacgcctggtttaagtgacacttctccagatgaagggttaatagaggacttgactatagaagacaaagcagtggagcaactggcagaaggattgctttctcattatttgccagatctgcagagatcaaaacaagccctccaggaactcacacagaaccaagttgtattgttagacacactggaacaagagatttcaaaatttaaagaatgtcattctatgttggatattaatgctttgtttgctgaggctaaacactatcatgccaagttggtgaatataagaaaagagatgctgatgcttcatgaaaaaacatcaaagttaaaaaaaagagcacttaaactgcagcagaagaggcaaaaagaagagttggaaagggagcagcaacgagagaaggagtttgaaagagaaaagcagttaactgccagaccagccaaaaggatgtgaaaagttgtgtttgtgtgttttcttctcctgtcccatatttgggttatgatgactcaagtgtagactgaagttgaggtagtgccttatgccattatgtcatatgttgaaatccttattccggtattactgtgtctccatgccttttttccaagtagcagacgtcatgttgcatggtttttgatatttatatgtaagtttttcaaattttgcttaattttaaaatttattattttgatcttgaattatttataaactggaaagtggtttgattattgtgagtcaaaactctaagtggttaaaaattagtatgaattttttagcttcttaatgaatatggatttaaaactctccagttcttattttatgaaatgacttgcctttctggtaatacaatgctgattttttagtaattgccttttcattactttgttaagaagaaatgccagctgtttaatcacacctacccctggaaaagaggtaaaccttttgaacagttgaatttcatcagaagctctatagctttttggtgagaggaagtgatactctttattacaagaaacaaggaattaacaaaaataaggaacttgttgctacctttcttttctgttgaacattaaaaataatttggtttgtggactgggcatggtggcttatggaaaagaggtgagcctttgtgaagaacataatggaaaagtgcatgtacgggaaataacagcactttaggtgtagttcaggtgagcaagatgccagatagtttctactaaccatatactctttctgcttcttagcgtcgttgtcactgcttctgtggcttttgggttcaaagtagattatatatattcctaaagcttggtggaggtagtggagctatcacacactcaaatgagcttgtatatttataatacaatatagtattatagtaacagttatcatacactgagatatagtttctgtgcttgtaaaaaattcttgaagtgaggccgggtgcggtggctcatgcctgtaatcccaacgctttgggacgccgaggcgggtggatcatgaggtcaaaagattgagaccatcctggccaacatggtgaaaccccgtctctactagaaatacaaaaattagctgggtgtgggggcgtgcgcctgtagtcccagctacttgggaggctgaggcaggagaattgcttgaacccaggaggcagaggttgcagtaagccaagatcgtgccactgcactccagccttggtgacagagcaagactccgtctccaaaaaaaagaaaaaaaaatttcttgaagtggaatgatgtacaccaaatacccactttatagataattacagggatggtgaaaaattagtaaatagcttcacaaaagaggcagcgtgatacctttagtgttttctagaatttttttctggatattatatgtaagaatttattgtttgagggaaatacgaggtttcattgtttaaaatcaagagtgtattgtttactgttttacagtattatttaatatccaactggtctccaatctccattacatagggactgtacagagcctgtgaagatgtatgaatggtatcttttataatccacaatacatttctggtaagatggaatcactacctctgatcacatatcaggctaacgatagagaaagcattaggtttaagttgagggctaagaactggtttgtttaaaggtttaaattgttggaaaagagcatttgccttctttaatgaatgatggtctcacaattcagttgactttgacctaatatttaagaatataaatatattttatttgaaaggctgagtgttgccctcaaacacttgctaaaactgcctagggcaggattcattagggcttgcagacaatgtcacctaaattgctgaatgtactcattataatatgatatctgacaaaggtagtacagcgtttctgagtcatttgggaccaactgcagtggttgtttaaaatgctggttcctgcacacaattctctatctactgaagcacatctgttttctttgtttgttttgctttgctttttgtttttaaagtttcccccagtgattccagtgcacctgaaaagttgagaaccacaggcttagtggtacgttggggtttcccacgctaggctgcatagcattataacctgggaacgttaaaaaaaatacagacattcttgattcttagtgtagttatgatgtggatcctacgtattttttaaaaaactctccagataattttgatgtcacgagtcactagtatagactatctatctagtgagttgtattataagcgatgaaatactttaaaagctacccagtaactcttgggattaattttatgaaataaattctgagctgctgcttttgatatagtcagacttaagactgaaccccagtagacaggcaatagatatagaattctggttagctaattgaacttttgtgacctgtttaaaaacaaatcaaatttattgaacaaatgacaaggcacaaatactttcagaattgtatttcagttttgaagatttaaaaaaaatgtgaaaataaatatatattagtatcctttattttaaagtcaattgtaaaccagaagtactgttattttggtgattaaaatccaaaactttagctgtatttcagtaacaaaaacataccttactagactgtgatggctcacacctgtaatcccagtgctttgggaggctgaggtgggaagattctttgagcccaggagttcaaggctgcagtgaattctgatcgcaccactgaactccagcccgtatgacagagtgagaccctgtttctaaaaacaaaacaaacaaacaaacaaacaacgtatcttactgactaaactggaatggaaatcttataattagtgttgtatttttctgcaaaatagtgaattggtacttgggagacttctgttctttgttgaaaaaaattgcctttgttttgaaattatatcacctgtgttctgaactaaaatgatgggagttcattttgtatttactttgcagtaagtatcatgtaaatatgcaaatgttgaatgtaatatagattgtgtcctcattgagtttttgggtgatacagtttataaatataacaattatacaccctcatacattcgtctgattttgagcttgtaagatgagaactgctttttacacatttaataaaaaaaggtctctgaattaaaaaaaaaaaaaaaaaaa

SEQ ID NO: 706 - DNA, 4953 bp, Homo sapiens
gcatccccttgattaaatgtttttcctcctatgcaatcaccattagctgtttggctcccattctgtattcttctgaagcagccctgcattgcaaatcaatatctttctgaaaagacagtgtgttgtgaattgccttgacagcatatgcacggttactttggctgcaatgctgctgcagagcccggttactctgccttcgtgggaactccacagatatgtgtcacaaagatgtctacacggaactgccagggaatggactcagtgatcaaacccctggacacaattcctgaggataaaaaagtcagagttcagaggacacagagcacttttgacccatttgagaaaccagctaatcaagtaaagagggtgcattctgagaacaatgcttgcattaactttaagacctcctccactggcaaagagtcacctaaagttaggcggcactccagccccagctcgccaacaagtcccaaatttggaaaagctgactcatatgaaaagctggaaaaactaggggaaggatcttatgctacagtatacaaagggaaaagcaaggtaaatgggaagttggtagctctgaaggtgatcaggctgcaggaagaagaagggacacctttcacagctatcagggaagcttctcttttaaaaggactaaaacatgctaacatagtgctacttcatgacatcatccataccaaggagacgctgacacttgtgtttgaatatgtgcacactgatttatgtcagtacatggacaagcaccctggggggctgcatccagataatgtgaagttgtttttatttcagttgctgcgaggtctgtcttacatccaccagcgttatattttgcacagagacctgaaaccacagaaccttctgatcagtgacacgggggagttaaagctggcagatttcggtcttgcaagagcaaaatccgtccctagccacacatactccaacgaagtggttaccttgtggtacagacctccagatgtccttctaggctcaacagaatattccacctgccttgacatgtggggagtaggttgcatctttgttgaaatgatccaaggagttgctgcttttccaggaatgaaagacattcaggatcaacttgaacgaatatttctggttcttggaacaccaaatgaggacacatggcctggagttcattctttaccacattttaagccagaacgctttaccctgtacagctctaaaaaccttagacaagcatggaataagctcagctatgtgaaccatgcagaggacctggcctccaagctcctacaatgttccccaaagaacagactgtcggcacaggctgccttgagccacgagtattttagtgacctgccgccacggctatgggaactcaccgacatgtcttctatttttactgtcccaaatgtgagattgcaaccagaagctggagaaagcatgcgggcctttgggaaaaacaatagttatggcaaaagtctatcaaacagcaagcactgacaagcagcacattctcaagagcacacaggattaagttgtcatcattctgggaagaaaaaaaaaacattaatgaagaggccaataatatgaagggaatcatggatcagttttctttcgctccctgtggtggatttcacttacaagaaaattgaagctggcaagaccctgttttctctgcaatttatttaaaaccttgcacgcatttggataccttgtgatttccaagaactacgtgaagattaagctttgcttactgatacatggcatgtattcttttcagtcttttgtgtttgattttgtttgatttccctctgcagcacagcgtctctgtaaaggtttttatgctttcaccagccatgtcttaaatacattaagacaacacatttggtgttcacacttcttcagtaatgtctgaacttgaaagccacagagtggcataaaacaatgtgtgttttctttgagagcagtgcacattttgcaaccactaggaaggaaattttctgctaaagcaaacccctgttctctgacttgacaacttggccccggactgtggggccccacctgttgcttaccttttgaggtaattttgcaaatgtggtttttttacttggaaataactgcacatttatatataggatattggactctgcttagcattttcaagccacatagcatgactgttttttgaataggttggaattgaaaaaacaattatcaaacgttaagaacaaagacagggataaattgcttacatttcaacctctagagattgaggtaactttttgtgtctgggtcttgtcaacatctaatttttttccatccattctgttacactttgtattttctaactggagaaaagagtgaggaacagaatgttttaaatctggtgcaaaagaactatatctgctggatgagccttgaaagcagtcttggcctgttagggcttacaaagtaaattacaaagtgatccagttcaaagtttgcttagttacaacaaagcacctttaaaaaaaatacattttaaaaaaacattccaagccaattggaagacatcattgggttcttactttaagacatctcctggaataactgttcaaatgcaggttttagaaacaatgcaggaatcttgctttaaagatgaaaaagggaatgggccagcttcccttactcaaggagttgagggaccttggaggatgaaggcgagtatgtgacactggagaaaagtggaccaggcatgtcttttgctttgatctggagggagggctgcctgatgcaggccggctcccagtggggcaggcctcgctgcagaatgcccagtagtactgcggccaaggggacagttaggagacttcatctaaagcatgaaacctagctcctctacacacaaattcctatggaaatacctttgtgtacagtgtcttacattttcctattagtcagaaagaaggagagaatgagtgagtgcttgaaatgtgtcatactgttttaggatcaagactaggaattaggagccaggttgacaaggactttttctgagagttgggtgagggtaaagcttttctataatcaagctcaatacaccaaggaaactggatccagaattcctaaactttaaaatggtactgtctgcggagtggagtatggatggttatgtcaaagtcatagttcatcctatccagatgtagcattcatggtaaacttttaagtgctaagcaaggaattatttactgattggttttaaagagagcagaaaacacccaagtgtagaatgtctactgtttgctacctagaaatcttttccattcctctttcatacattccaacccactggaagtctttagaggtattttgatttaaagtatacttaaattaggatttcttaaagaaaacatagggagaaaactttacatgcaattaaaaatggactttcctgtgatttgtttttaatcattcatttggagaagaggcatgacctttgtatttcactaagtttaaagcaagagcaactgatgattaaatgttgctttttaataaggtttttaacttgaaaatttgaaaatatttaatgttgaaagacttcaattagggctattagagttatatctccctgtcgtaggcagcttcttcggagaagtgaaatataacattactcagtggacggagaagtctgttttgttacagagacatgcctctcagaaggtcaggaggttttgagtacctatccttgccacccatacaggaaatccaaagtttggtgtctctctctctctgtctctttctttctctttctccccccaaacccctctcactccctccctccctctctccttcccctatttgcaatcatattctccctctgcttcttttctcttctgccctccttgtgggcagtcatgaaaatcaattcagactgtgttcattagcagatttattattctattgagaaagcactggaatgttttgtgagattatttttatatgaaggaatagcctgaactcaaacagatggtaagaatagtacaaacaccttagcacatcactgcacacacagtattctgaaaggagatttgacacttaattcccattttcttaaaataacagttttgttgacttaaaaatatgagatacataggatgtgaaaaaaaatgtttgcagtactcagcaaaaaatagggtacataaagcagggtggctgtccatccactgattctggggtgagaagcgatttctacctcgcaagagtgactagaaagtttctaggagcacctccaggcttgcaaagaaagtgaggcctcttggtatcctttcctcagtgtgtatatgacagccagtataatcaataccctaggttatgcgtctatatgatactcatctgtgaatattattggttttgtaatctttgttatataagaggatgtttaggctgtatatactggggtagattattgcctgccccttatacataggaatatgctgcataattgcgcataacttccatctcccttactggcttgtaggcagaggaaactgtatatgttactgccttgtacttttctcatacaccaaaaacacaccaaaaaaatcaataaaataagcaatcttctattctcattccttttcccacagcagcatattttagaggcacatacaaaacctacattctctagttgggagtggatttttaaagttttccttttatcttttatttttttttgtatgatgcactgagatgtgtactttctaacaggggattggtacctaagaaatgtggtagcattattcagaaaactattatactttcaaatgacacatagtaaggagaatggaataatacatgttgcatatttgttaccagttgtaatttgtctgtattatgaaagatgtaatggtttgtcagctgtcactgttgttttcttgtaacatgatatggaataaagtatagcagaatctccgt

SEQ ID NO: 707 - DNA, 4815 bp, Homo sapiens; identical to SEQ ID NO: 23

SEQ ID NO: 708 - DNA, 7329 bp, Homo sapiens
gcagtactcggagacagcggacccgtgtcagtgacagcttccggtttggtttctccgccttctgcttggctagagctattggggctcggtggcggccgcagtggggtggagggggcagggcgtggtgaggtaaggtgagtgccgtagtggggttccctggagccatggcctgctccattgtccagttctgctacttccaggacctccaggccgcccgggacttcctctttcctcacctgcgggaggagatcctcagcggcgccttgcggagggaccccagtaaatcaacagactgggaagatgatggttggggagcatgggaagaaaatgaaccacaagaacctgaagaagaaggaaatacttgcaaaacacaaaaaacttcctggctccaagattgtgttttatccttatctccaaccaatgatcttatggtgatagctcgagagcaaaaagctgtatttctagtgccaaaatggaaatatagtgataaaggaaaggaagaaatgcaatttgctgttggctggagtggttccttaaatgtcgaagaaggggaatgtgtaaccagtgctctatgtatcccactagcaagccaaaagaggagttccactgggcgtcctgactggacctgcattgtggtgggttttacttcaggttatgtacgcttctacactgagaatggtgtgctcttgcttgcacagcttttgaatgaggacccagtacttcaacttaaatgcagaacctatgaaataccacgacatcccggcgtgactgagcagaatgaagagttgagtatcttatatccagctgccattgtgactattgatggatttagcctttttcaatctcttcgtgcttgtcgaaatcaggtagcaaaagctgcagcatcaggcaatgagaacatacaaccaccaccattagcttataagaaatggggtctacaagatattgacactattattgatcatgctagtgttggtattatgactctgtccccctttgatcaaatgaagactgcctccaatataggtggatttaatgcagcaattaaaaatagtccacctgccatgtctcagtatatcactgtagggtccaatccatttactggcttcttctatgctttagagggaagcacacaaccattattatcccatgttgcactagcagttgcaagtaaactcacttctgctttatttaatgctgccagtggttggcttggttggaaaagtaagcacgaagaagaagctgtccaaaagcaaaagccgaaggttgagccagctaccccattagctgtaagatttggacttccagattctagacgccatggtgaaagcatatgtctgtctccatgtaacacactggcagcagtaacagatgatttcggcagagttattttattggatgtagctagaggaattgcaatacgcatgtggaaagggtaccgcgacgcacaaattggatggattcaaactgtagaggacctccatgaaagagtgccagaaaaggcagatttttccccctttggaaattctcagggtccaagtcgagtagctcaattccttgtgatctatgcgccaagaaggggaattttagaagtgtggagcacacagcagggacctagagtaggagctttcaatgtggggaagcactgcaggctgctgtatcctggctataaaataatgggtttaaataatgttaccagtcagagttggcagccacagacttatcagatctgtctggttgatccagtgtctggaagtgtgaaaacagtgaacgttcccttccatttagcactgagtgataagaagagtgaacgagccaaggatatgcacctagtgaagaaactagcagccttactgaaaacaaaatctcccaatcttgatttggttgaaacagaaataaaggaattaattcttgatattaaataccctgcaaccaaaaaacaagctttggaaagcattttggcaagtgaacgtttaccattttcttgccttagaaacatcactcagactttaatggacactttaaaaagtcaagaacttgagtctgttgatgaaggattgctacagttttgtgccaataaactaaaactgctgcaactctatgagtctgtcagtcaattaaattcccttgattttcatttagacacaccattctctgataatgacttggctctgttactaaggcttgatgaaaaagaactgcttaagctccaggcattactagagaaatataagcaagagaacaccaggacaaatgttcgattttctgatgataaagatggtgtgttgcctgtaaaaacattcttggaatatttagaatatgaaaaggatgtgctcaacataaagaaaataagtgaagaggaatatgtggctttaggtagtttctttttttggaagtgtttgcatggagaaagctccactgaggatatgtgtcacactttggagtcggctggtcttagccctcagctgttgttgtctctgctcctgagtgtttggctttcaaaggaaaaggatattttggataaaccacagtcaatctgctgtcttcataccatgctgtccctcctgagcaagatgaaagtggccatcgatgagacctgggattctcagtctgtgtccccatggtggcagcagatgcgcacagcctgtattcagtctgagaacaatggagccgctctgttgtctgcgcatgttgggcattctgttgctgcacagatatcaaacaacatgacagagaaaaaattttcccaaacagttttgggtgctgattcagaggccctcactgattcctgggaggcactttctcttgacactgagtactggaaactccttctgaaacagctggaggattgtctcatacttcagactctgcttcacagcaaagggaacactcagacctccaaagtgtcatcactgcaggctgagccacttccaaggctttctgttaaaaagttattagaaggaggaaaaggtggcattgcagacagtgtagccaagtggatatttaaacaggacttcagccctgaagtattaaaactggctaatgaagaaagagatgcagaaaacccagatgaacccaaagaaggtgttaacagaagtttccttgaggtatcagagatggagatggacttaggagccataccagacttactgcatttagcctatgagcagtttccttgtagccttgagctcgatgtcttgcatgcacattgctgctgggagtacgttgttcagtggaataaagatccagaggaagcacgtttttttgttaggtcaatagaacacttgaagcaaatatttaatgcacatgttcaaaatggcattgcactgatgatgtggaatacgttcttagttaaaagattttctgctgctacatacttaatggataaggttggaaaatcaccaaaagataggttatgccgaagggatgtgggaatgagtgacacagcaatgacatctttcctcggctcctgtttggatcttcttcagatcttaatggaggcagatgttagcagggatgaaatacaggtgcctgtgctggatactgaggatgcgtggctctccgtggaaggaccaatctccatagtggaactggcccttgaacagaagcacatccactacccactggtggagcaccactccatcctgtgctccatcttgtatgcagtcatgaggttttctctgaagaccgtgaagccactttcactttttgacagtaagggaaaaaatgcatttttcaaagacctaacttcaattcagttattacctagtggggaaatggatccaaattttatttctgtacgacaacagttcttattgaaagttgtcagtgcagctgtccaggcccaacattcagccacaaaggtcaaagatcccacagaagaggccacacccactccttttgggaaagaccaagattggccagctctagctgtggatttagcccatcaccttcaagttagtgaagatgttgttagaaggcattatgtgggggaactatacaactatggagttgaccacttaggagaagaggccattctacaggttcatgacaaagaggtccttgcctctcagctgctggtgctcacggggcaaaggctggctcatgcgcttctccacacccagacaaaagaaggaatggagctgcttgccagacttccacccacactgtgtacttggctgaaagcaatggacccccaggaccttcaaaacactgaagtgccaattgcaacaacagctaaactagtaaataaagtaattgagcttttaccagaaaaacatgggcaatatggtctagccttacacctcattgaagctgtggaagccatatctcttccttctttatgacacttacctactggaaatagtctaaaattatgattataacatgaagtagtgcatggttattttacatagtaagacctggaattttatgggaaaagtatgtctttttttttccttttgtaaaataaataaaagtatatacaacttttaaaaagtgcaaccctggctaaattccactcctttggttaatactgaagataaaatataaacaaatgtcaactctgttataattaatacagatgttttactgtttatttctaattcaaacacttaagtagctttattgttaaactttgctatttaaaattggttataatttagattatgttcttataagattctatatttcctatctaaaatgttgttgtaattcaatttaaatgtgttcatgtacagtccccatcagtagcgtatagaacaccccactctcctttagtaaatgttgagaaaatgcctttgttgtcatgctccaaatcccacactgggctgccacctgggagttctggataccgaaaggttcctttcccagaggttctgctgttgccatcagaggaggatgaccgtgcttgaggaggaagaatgggttcaagatcatcatattcatcagaaggggacactaaatagaacccttaacctgttgtacttgccaaaattgagaatcagagatgtgtaaaatgcagcaaattaattataatgtaagttaagatttgctttttgccaagttgcaaagttgtatccacatcaggtcactgtaaaaatgtattatcttgtaaaacttatgtaaaaaaaaaaaaaaaaaaaaggcaaagatactaaaaattttaagtccgactttatttttcctacaagtgtttagaaatgcttctgggatttgctaatattatctgtccttgggaacagtattgaaaaaactgcttagtggtattacagctttagcaaacctacctcacagctgggatgagaggataaaatacaactaattttgtaccctatagtgcctagagcagtccaagtgctaaataaatatttactgattaaaaccaaactatagctactcgggaggctggaggaggatcgcttgagcccaggagtttgaggccattctgggcaatatagcaagaccctgtctcgaaaaaaaaaaaaaaaagaaaaaaccaaactaaccaaaactctgtaaaagagtgctttgagctctacaaataccaagtatttattgtggtatatttttagaatgtagccatacagtgtaattatgggtatctgtcatggatcacaattattattcatagtaagtcattgtgatacagaagtttgtttcttcacttccccttaagaagccaactatagtaatcatgcaaagttgaggagtatgtccttcagggatataaaaagaaaaacaaatctgttttttgagctaaaagagcacatccaaacaagaatttaactggctaaaatttagtaattactgttaagtaactatcaaacttgaaatcttacaagataaatggttaagatgtcttgagtatttgggatgggggcctgtgagtctgattgagacatacattttacagagtagcagcactggaaagggctagtccaacctcccagcctctgcttgggtctccgctgccccagccacacacatcctagaattcttgtaaacatatctggctctgtgttaacagtcacttgttatatgttttctaagagattagttcttcctgtgatttttccaagtacgctgaaagtagtagtatgaacttaaggaggctagtcaaagaaacttggagttataggtatttttaaagaataaatcctcaattccatcatcacttggcggggagggggcacttattaagcattttagataataaaactggttaagcttactctggtagaacagacaatcaaatctggggattgctgagaacaataataagctgaagtatggctcacagaatcctaacacaaatcattaagtctctagttagatttgttatcctaaaatttttcatagaattttaaaatctaattctgacttgtatggttaagaaaagcagttaaatattttactacttatcaagggcttttaaaataaataaatctgattgataggaagaaaggcaaataaatacctatgtagacattctataataacaaagagccatagatgataaaggaattagattttaatgtagaatgggtggtttctgaaacaaaggtatgtggtactttgtagttattgatgagaagccagtaaccagtagtgttttcctagatatatgcccaccctcacacaactttcttcattaacaaacattaaatatgcatttgtatcttattaaattatattgtataatgctgaaggaaaacaaaaagtgttcaaataatcataacttctacattacaggttctgtttagatgcagaactagaggggccagggtaaatgtagataaagagatatatagcaccatgcttcttaatgcttcatacttttgcaaacagaaaaaaaaagttttacttttattataaaacttcatctatggtcaaagtaaacactgttacatttaaattgctttttaaaaacaattgcgatctaaaaagtcaaaaatctgaaatttaataatatgagacttacactgaatataatgttcatttagaagttgctgtggtccacttcatttataaggaacaaatatttttacagtacactatagcaacagcaaaagccctctctcaccctgataggaatgggtttgctgggtgtctagaagttagattcctgctgaatagaattagccatccttaaaagattttaatccaatactgaactgtttataaaatgctttctctattgtaatgtactgtaagtagtgaaattctgtatatactgctattttctgtctgttcattgttgtgaacttcttatgtatattagtgaaataaattttcagctttcatgttgtttcctaaacattcataagt

SEQ ID NO: 709 - DNA, 6318 bp, Homo sapiens
tagtaagacaggtgccttcagttcactctcagtaaggggctggttgcctgcatgagtgtgtgctctgtgtcactgtggattggagttgaaaaagcttgactggcgtcattcaggagctggatggcgtgggacatgtgcaaccaggactctgagtctgtatggagtgacatcgagtgtgctgctctggttggtgaagaccagcctctttgcccagatcttcctgaacttgatctttctgaactagatgtgaacgacttggatacagacagctttctgggtggactcaagtggtgcagtgaccaatcagaaataatatccaatcagtacaacaatgagccttcaaacatatttgagaagatagatgaagagaatgaggcaaacttgctagcagtcctcacagagacactagacagtctccctgtggatgaagacggattgccctcatttgatgcgctgacagatggagacgtgaccactgacaatgaggctagtccttcctccatgcctgacggcacccctccaccccaggaggcagaagagccgtctctacttaagaagctcttactggcaccagccaacactcagctaagttataatgaatgcagtggtctcagtacccagaaccatgcaaatcacaatcacaggatcagaacaaaccctgcaattgttaagactgagaattcatggagcaataaagcgaagagtatttgtcaacagcaaaagccacaaagacgtccctgctcggagcttctcaaatatctgaccacaaacgatgaccctcctcacaccaaacccacagagaacagaaacagcagcagagacaaatgcacctccaaaaagaagtcccacacacagtcgcagtcacaacacttacaagccaaaccaacaactttatctcttcctctgaccccagagtcaccaaatgaccccaagggttccccatttgagaacaagactattgaacgcaccttaagtgtggaactctctggaactgcaggcctaactccacccaccactcctcctcataaagccaaccaagataacccttttagggcttctccaaagctgaagtcctcttgcaagactgtggtgccaccaccatcaaagaagcccaggtacagtgagtcttctggtacacaaggcaataactccaccaagaaagggccggagcaatccgagttgtatgcacaactcagcaagtcctcagtcctcactggtggacacgaggaaaggaagaccaagcggcccagtctgcggctgtttggtgaccatgactattgccagtcaattaattccaaaacagaaatactcattaatatatcacaggagctccaagactctagacaactagaaaataaagatgtctcctctgattggcaggggcagatttgttcttccacagattcagaccagtgctacctgagagagactttggaggcaagcaagcaggtctctccttgcagcacaagaaaacagctccaagaccaggaaatccgagccgagctgaacaagcacttcggtcatcccagtcaagctgtttttgacgacgaagcagacaagaccggtgaactgagggacagtgatttcagtaatgaacaattctccaaactacctatgtttataaattcaggactagccatggatggcctgtttgatgacagcgaagatgaaagtgataaactgagctacccttgggatggcacgcaatcctattcattgttcaatgtgtctccttcttgttcttcttttaactctccatgtagagattctgtgtcaccacccaaatccttattttctcaaagaccccaaaggatgcgctctcgttcaaggtccttttctcgacacaggtcgtgttcccgatcaccatattccaggtcaagatcaaggtctccaggcagtagatcctcttcaagatcctgctattactatgagtcaagccactacagacaccgcacgcaccgaaattctcccttgtatgtgagatcacgttcaagatcgccctacagccgtcggcccaggtatgacagctacgaggaatatcagcacgagaggctgaagagggaagaatatcgcagagagtatgagaagcgagagtctgagagggccaagcaaagggagaggcagaggcagaaggcaattgaagagcgccgtgtgatttatgtcggtaaaatcagacctgacacaacacggacagaactgagggaccgttttgaagtttttggtgaaattgaggagtgcacagtaaatctgcgggatgatggagacagctatggtttcattacctaccgttatacctgtgatgcttttgctgctcttgaaaatggatacactttgcgcaggtcaaacgaaactgactttgagctgtacttttgtggacgcaagcaatttttcaagtctaactatgcagacctagattcaaactcagatgactttgaccctgcttccaccaagagcaagtatgactctctggattttgatagtttactgaaagaagctcagagaagcttgcgcaggtaacatgttccctagctgaggatgacagagggatggcgaatacctcatgggacagcgcgtccttccctaaagactattgcaagtcatacttaggaatttctcctactttacactctctgtacaaaaacaaaacaaaacaacaacaatacaacaagaacaacaacaacaataacaacaatggtttacatgaacacagctgctgaagaggcaagagacagaatgatatccagtaagcacatgtttattcatgggtgtcagctttgcttttcctggagtctcttggtgatggagtgtgcgtgtgtgcatgtatgtgtgtgtgtatgtatgtgtgtggtgtgtgtgcttggtttaggggaagtatgtgtgggtacatgtgaggactgggggcacctgaccagaatgcgcaagggcaaaccatttcaaatggcagcagttccatgaagacacgcttaaaacctagaacttcaaaatgttcgtattctattcaaaaggaaatatatatatatatatatatatatatatatatatatataaattaaaaaggaaagaaaactaacaaccaaccaaccaaccaaccaaccacaaaccaccctaaaatgacagccgctgatgtctgggcatcagcctttgtactctgtttttttaagaaagtgcagaatcaacttgaagcaagctttctctcataacgtaatgattatatgacaatcctgaagaaaccacaggttccatagaactaatatcctgtctctctctctctctctctctctctcttttttttttctttttccttttgccatggaatctgggtgggagaggatactgcgggcaccagaatgctaaagtttcctaacattttgaagtttctgtagttcatccttaatcctgacacccatgtaaatgtccaaaatgttgatcttccactgcaaatttcaaaagccttgtcaatggtcaagcgtgcagcttgttcagcggttctttctgaggagcggacaccgggttacattactaatgagagttgggtagaactctctgagatgtgttcagatagtgtaattgctacattctctgatgtagttaagtatttacagatgttaaatggagtatttttattttatgtatatactatacaacaatgttcttttttgttacagctatgcactgtaaatgcagccttcttttcaaaactgctaaatttttcttaatcaagaatattcaaatgtaattatgaggtgaaacaattattgtacactaacatatttagaagctgaacttactgcttatatatatttgattgtaaaaacaaaaagacagtgtgtgtgtctgttgagtgcaacaagagcaaaatgatgctttccgcacatccatcccttaggtgagcttcaatctaagcatcttgtcaagaaatatcctagtcccctaaaggtattaaccacttctgcgatatttttccacattttcttgtcgcttgtttttctttgaagttttatacactggatttgttaggggaatgaaattttctcatctaaaatttttctagaagatatcatgattttatgtaaagtctctcaatgggtaaccattaagaaatgtttttattttctctatcaacagtagttttgaaactagaagtcaaaaatctttttaaaatgctgttttgttttaatttttgtgattttaatttgatacaaaatgctgaggtaataattatagtatgatttttacaataattaatgtgtgtctgaagactatctttgaagccagtatttctttcccttggcagagtatgacgatggtatttatctgtattttttacagttatgcatcctgtataaatactgatatttcattcctttgtttactaaagagacatatttatcagttgcagatagcctatttattataaattatgagatgatgaaaataataaagccagtggaaattttctacctaggatgcatgacaattgtcaggttggagtgtaagtgcttcatttgggaaattcagcttttgcagaagcagtgtttctacttgcactagcatggcctctgacgtgaccatggtgttgttcttgatgacattgcttctgctaaatttaataaaaacttcagaaaaacctccattttgatcatcaggatttcatctgagtgtggagtccctggaatggaattcagtaacatttggagtgtgtattcaagtttctaaattgagattcgattactgtttggctgacatgacttttctggaagacatgatacacctactactcaattgttcttttcctttctctcgcccaacacgatcttgtaagatggatttcacccccaggccaatgcagctaattttgatagctgcattcatttatcaccagcatattgtgttctgagtgaatccactgtttgtcctgtcggatgcttgcttgattttttggcttcttatttctaagtagatagaaagcaataaaaatactatgaaatgaaagaacttgttcacaggttctgcgttacaacagtaacacatctttaatccgcctaattcttgttgttctgtaggttaaatgcaggtattttaactgtgtgaacgccaaactaaagtttacagtctttctttctgaattttgagtatcttctgttgtagaataataataaaaagactattaagagcaataaattatttttaagaaatcgagatttagtaaatcctattatgtgttcaaggaccacatgtgttctctattttgcctttaaatttttgtgaaccaattttaaatacattctcctttttgccctggattgttgacatgagtggaatacttggtttcttttcttacttatcaaaagacagcactacagatatcatattgaggattaatttatcccccctacccccagcctgacaaatattgttaccatgaagatagttttcctcaatggacttcaaattgcatctagaattagtggagcttttgtatcttctgcagacactgtgggtagcccatcaaaatgtaagctgtgctcctctcatttttatttttatttttttgggagagaatatttcaaatgaacacgtgcaccccatcatcactggaggcaaatttcagcatagatctgtaggatttttagaagaccgtgggccattgccttcatgccgtggtaagtaccacatctacaattttggtaaccgaactggtgctttagtaatgtggatttttttcttttttaaaagagatgtagcagaataattcttccagtgcaacaaaatcaattttttgctaaacgactccgagaacaacagttgggctgtcaacattcaaagcagcagagagggaactttgcactattggggtatgatgtttgggtcagttgataaaaggaaaccttttcatgcctttagatgtgagcttccagtaggtaatgattatgtgtcctttcttgatggctgtaatgagaacttcaatcactgtagtctaagacctgatctatagatgacctagaatagccatgtactataatgtgatgattctaaatttgtacctatgtgacagacattttcaataatgtgaactgctgatttgatggagctactttaagatttgtaggtgaaagtgtaatactgttggttgaactatgctgaagagggaaagtgagcgattagttgagcccttgccgggccttttttccacctgccaattctacatgtattgttgtggttttattcattgtatgaaaattcctgtgattttttttaaatgtgcagtacacatcagcctcactgagctaataaagggaaacgaatgtttcaaatcta

SEQ ID NO: 710 - DNA, 7412 bp, Homo sapiens
cgcttctgctcaacctagaccagccccagcttcagcctcagctcccctccttcctggatcgagcgcccgcactcccggccctgcagccacccgagtcccgctcgctgtcgcctgcacgcgagtcccccctggcacgcgctcccacatcccgggatcgtcccaacggcccctgcgcccttcctgggatcactccgactgccccgcgcgccctgggatcggtccatctaccccgcgtggccccagctgcttgcccggagcgccagctagcgctccccgctctccgctccccggcactctcggggggcccgcccgccctgcaccctggagctccgggccgcgagcctctgccaactcctctggaccctcgcggccgtgggcagcggctgccgcgcctgtctgcccgagggaggaccttcgcctctgcatttgtccagtaactctggctgtgccggatactgcttgggtaaaacgggcaccccaggaacatggcagacgaagatctcatcttccgcctggaaggcgttgatggcggccagtccccccgagctggccatgatggtgattctgatggggacagcgacgatgaggaaggttacttcatctgccccatcacggatgacccaagctcgaaccagaatgtcaattccaaggttaataagtactacagcaacctaacaaaaagtgagcggtatagctccagcgggtccccggcaaactccttccacttcaaggaagcctggaagcacgcaatccagaaggccaagcacatgcccgacccctgggctgagttccacctggaagatattgccaccgaacgtgctactcgacacaggtacaacgccgtcaccggggaatggctggatgatgaagttctgatcaagatggcatctcagcccttcggccgaggagcaatgagggagtgcttccggacgaagaagctctccaacttcttgcatgcccagcagtggaagggcgcctccaactacgtggcgaagcgctacatcgagcccgtagaccgggatgtgtactttgaggacgtgcgtctacagatggaggccaagctctggggggaggagtataatcggcacaagccccccaagcaggtggacatcatgcagatgtgcatcatcgagctgaaggacagaccgggcaagcccctcttccacctggagcactacatcgagggcaagtacatcaagtacaactccaactctggctttgtccgcgatgacaacatccgcctgacgccgcaggccttcagccacttcacttttgagcgttccggccatcagctgatagtggtggacatccagggagttggggatctctacactgacccacagatccacacggagacgggcactgactttggagacggcaacctaggtgtccgcgggatggcgctcttcttctactctcatgcctgcaaccggatttgcgagagcatgggccttgctccctttgacctctcgccccgggagagggatgcagtgaatcagaacaccaagctgctgcaatcagccaagaccatcttgagaggaacagaggaaaaatgtgggagcccccgagtaaggaccctctctgggagccggccacccctgctccgtcccctttcagagaactctggagacgagaacatgagcgacgtgaccttcgactctctcccttcttccccatcttcggccacaccacacagccagaagctagaccacctccattggccagtgttcagtgacctcgataacatggcatccagagaccatgatcatctagacaaccaccgggagtctgagaatagtggggacagcggataccccagtgagaagcggggtgagctggatgaccctgagccccgagaacatggccactcatacagtaatcggaagtacgagtctgacgaagacagcctgggcagctctggacgggtatgtgtagagaagtggaatctcctcaactcctcccgcctccacctgccgagggcttcggccgtggccctggaagtgcaaaggcttaatgctctggacctcgaaaagaaaatcgggaagtccattttggggaaggtccatctggccatggtgcgctaccacgagggtgggcgcttctgcgagaagggcgaggagtgggaccaggagtcggctgtcttccacctggagcacgcagccaacctgggcgagctggaggccatcgtgggcctgggactcatgtactcgcagttgcctcatcacatcctagccgatgtctctctgaaggagacagaagagaacaaaaccaaaggatttgattacttactaaaggccgctgaagctggcgacaggcagtccatgatcctagtggcgcgagcttttgactctggccagaacctcagcccggacaggtgccaagactggctagaggccctgcactggtacaacactgccctggagatgacggactgtgatgagggcggtgagtacgacggaatgcaggacgagccccggtacatgatgctggccagggaggccgagatgctgttcacaggaggctacgggctggagaaggacccgcagagatcaggggacttgtatacccaggcagcagaggcagcgatggaagccatgaagggccgactggccaaccagtactaccaaaaggctgaagaggcctgggcccagatggaggagtaaccaggaaaatcactgccggctagtcccaagcaaacgggctaggaggaaagattaaaaaaacaacaacaacaacttatttagtttggggaggggaagcatttttaagtgtgttgtaaaatcaaattttatatttcattttttgactcttgaaaaatgtctttgctccttggcagctaccagcagagactctatagctgtctcttagggcagtattttggggaagtggggcttgaagaagcagcctaatgaaccaacataccgttttgtgtgtggttttttttgtttgtttgtttgtttgttttgagacagagtcttgctctgtcacccaggctggagtgcagtgacatgatcttagctcactgcaacctccgcctcctgggttcaagtgattctcctgcctcagcctcccaagtagctgggattactggtgcacaccaccacactcagctaatttttgcatttttagtagagatggggtttcaccatgttggccaggctggtctcgaactcctaacctcaggtgatccacctgcctcagcctcccaaagtgctgggattacaggtgtgagccaccatgcctgcccattttgtggttctattttcatttttatttctttttttttttttgtcacgagatataagaaagtgctttttgccttgaatggacaattttagggctgtgctcactagtcttttcaggctggactgaaatgtcgggcccatggagccctgtgttttgtgcatcgggatgagaaatgaagcacttcacgctggctttcctaagtcacggggcgtgtattgccgtggcttagtgcaaagcattctttctcagagcatttagaggcatgcgtggcattttttcagtgggtgtgagattgcacaatacccaggctcccttctactgtggggaagggcctgcatgttggctgttttttaaacttctagttcaatttccttccataatgctactgattttctggcatacagccgaattccatcttttaagcatgctttctacggtgggcttttcaaaacaggtttgagttttgtatgcacacgtttactacctctaactcctacatcagctagtgtggaagagggtgcacctcaaagcttttacacgtaaggacagcggcttggaatgtgagagccttttctccaagcagacccacactctgcatctcagtggcagctcccacaacgtgactgcaatgtctcttatacagtattccttggtgttttcttagtgtctggatgttcttacgtgaaatctgctccccagccctggtccttggcattttctgcttgaagctgggctgattttcttgtaatttacagcaggacgctttcagcagcagtctcttgggattttatctaagatgtttgaggatgagagggcaagaactataaacactcattaattctagtagtctccccatggccagacaatggcgattgttatttaatgagcttttcctttcaatggaattcagctctcacattagtatgatttcatttgatgtttcaaatagcaaagatgctaggtgcggtggctcccgcctgtaatctcagcactttgaggagggccaaggtgggaggattgcttgagctcaggacttcaagaccagcctgggtaaacatggcgagaccctgtctctaccaaaacaacaaaaaaaagacagactgctttgatcaaccctaaatgcaaaagcagcctatttttctttgtttaaaagtcaaaacataaaaaagcagagtataacatacaaaccattcttaactattcattaaaatgggtccttcaacaccttagtggggtttgttgttgttgcttatgcagagagattattttctttttattattttataatttttgaaatagagatggggtctcactgtgttgcccaggctggtctcgaactcctggacttaagtgagcctcccgcctcagtctcccaaagcgctgggattacaggcaggagccactgagcccagccaagacttcagtgttgactgctttggaggcacaaacccatgcaagcgttagttccaaagttcagtgtgtacccttaaatgaacaatgaagcaggtaaaattacccttgaaaaaaatcccttggaccacccataaatgacagtgactttttcaatatggactcatcatagccagttttccttttgaagttggaactgatcacccttttgtcatctgtaccagatcagtagttggcttgtgttacattttgtgtgtgtgtgtgcgtgttttaaaccagtgcatataaattgtatgttaaatgtaagtaactttaagttgacttatctcttcacagtaatcaagcctcacgtaattcatgctttttaaattcagccagccccccctctctgaaattttattatgtaaataatttgtgttccctgatcactcgtttaagttcttagttgtatgtcatctcttctctagcaggaattggcaaacttttttgtaaaggggtagaaagtgaagattttaggctttgcaggccatatagcctctgctgcaaatgctcagccctgctgttgtaatgtaaaagctgccacagacactacatgaacacgaatgagtgtggctggtgttccaataaaactttatttacacaaacgggtggcccttttgggctgtagtttgtcaacccttgctctaacccttgactgagagctactttattaagccctgagggcaggagctatcccaattttgtgttccccagggcaccaaaacacagtgctttggcatagagtaggcactcaacaagtgtgtgaacagatggagagccagccctagtcagtgcactcaccctttgaggctctggttcctccaaacaatgattcgttgtctggattggctggaactgtcacccccgcaattctactccccacccacccatgtgaccttaatgtcagttgctggtctgttgctcttcggggagggagagatggcctggatacagagctaagcaaatgcttctttaagggcccttaaaagtgaaaagtaacttgcaagaggttgagatccttctgagctaggagaacttattccaccttcaaaacctagtttgggctgggtgcagtggctcacgccactttgggaggctgaggtgggcggatcacctgaagtcagctactcgggaggctgaggcaggagaatcgcttgaacccaggaggcagaggttgcagtgagccgagattgcgtcactgcactccagcctgggcgacagagtgagactccgtctcgaaaccaaaaacaagaaaaacccctagttttgtgccttctgaagatagttaggacatcttctttttccgcaaatgctggacatgccaaaaacctaacgcaaaacccaggacattccagcccaactgggacgatatcagagaccatcttcaagtgcaagaagcaggtgaaagcccaggaaattggcagagccaggattatcatccagtactttcatttcacaaatggagaaaccgaggttctgccagctagattttttttcacagtgtcactgctagcaagccactaagctggagctgggatttgagagctgctgctatttagaggatcttgggaataaaatttaaactggagtttaatggccctttcagttttgctataggcaagagaataaaatgaatgaatggataggtggctttatgggtgtaagaaagaagcgaaaaaaactcccaaaccccagtgttcctgaatatctgttctccccctgaccactctgggaatttatcaaatgcagctttgacctccaagccaagtaaactgctcttgttgctattttagtggtttttgtttttttaagacacaaggtctcactttgttactcaggctggagtgcagtggcatgatcataactcattgtaggctcaacctcctgggccccagtgatcctcctgcctcagcctctcaagtagctaaaactacagatgtgcaccatcacatctggctaatttttttttttttttttttgaggtggagtctcgctctgttgcccagattcaagtgcaatggcacgttttggctcactgcaacctctgcctcccaggttcaagcgattctccctgtctcggcctcccgagtagctgggactacaggcacctgccaccacgcgcagctaatgtttgtatttttagtagagacgggggtttcaccatgttggccaggctggtttcaaactcctgacattaggtgatccacctgcctcggcctcccaaagtgctgggattacaggcatgagccaccgtgccaagccacgcctggctaattttttaaaattattttttgcagagacagagtttcactatgttgcccaggctggtcttgaactccttggcctcaagtgatcctcccacctcagcctcccaaagcattggggttacaggcgtgagccactgcacctggccctgttttcatggcttttatttcctttcatcccacacatttgtctgcagtactagacatgttttacaaatcaacaagtttacacaagtatatgcagcttgttttggggggaaaggagacaaaatatgcatattttctgtgtggatttgtgcctcttaattgtgtttctagtctctaaggtgaccctttaacctactcaagatggggcccagagaagtggcctgcgttacagatttattttggcatatgtactaagttccattttctctttacaaataaagtgttttctttcttttctgtctcaga

SEQ ID NO: 711 - DNA, 4290 bp, Homo sapiens
gcagggcggggagaggcggtggctgtgggcgtccggccccgaacctgtcagacctggggagccggcctccagcagcgggcgcggcgggcgcgagcacgaccccactctcctgcggccgcgggtggagcagcgcgagcccgcctcgctgagccggccgggggcggggagatgagttgcggccccgcggcagcgccccaggatggggagggacgcgcggcactgccctcgagaactggcgctccggtgaagtaggcgccgccggccgtccgcctcccccaagccgttccgcaccgcggccgctcagcctctgccatggccggctctggcgcgtggaagcgcctcaaatctatgctaaggaaggatgatgcgccgctgtttttaaatgacaccagcgcctttgacttctcggatgaggcgggggacgaggggctttctcggttcaacaaacttcgagttgtggtggccgatgacggttccgaagccccggaaaggcctgttaacggggcgcacccgaccctccaggccgacgatgattccttactggaccaagacttacctttgaccaacagtcagctgagtttgaaggtggactcctgtgacaactgcagcaaacagagagagatactgaagcagagaaaggtgaaagccaggttgaccattgctgccgttctgtacttgcttttcatgattggagaacttgtaggtggatacattgcaaatagcctagcaatcatgacagatgcacttcatatgttaactgacctaagcgccatcatactcaccctgcttgctttgtggctatcatcaaaatcaccaaccaaaagattcacctttggatttcatcgcttagaggttttgtcagctatgattagtgtgctgttggtgtatatacttatgggattcctcttatatgaagctgtgcaaagaactatccatatgaactatgaaataaatggagatataatgctcatcaccgcagctgttggagttgcagttaatgtaataatggggtttctgttgaaccagtctggtcaccgtcactcccattcccactccctgccttcaaattcccctaccagaggttctgggtgtgaacgtaaccatgggcaggatagcctggcagtgagagctgcatttgtacatgctttgggagatttggtacagagtgttggtgtgctaatagctgcatacatcatacgattcaagccagaatacaagattgctgaccccatctgtacatacgtattttcattacttgtggcttttacaacatttcgaatcatatgggatacagtagttataatactagaaggtgtgccaagccatttgaatgtagactatatcaaagaagccttgatgaaaatagaagatgtatattcagtcgaagatttaaatatctggtctctcacttcaggaaaatctactgccatagttcacatacagctaattcctggaagttcatctaaatgggaggaagtacagtccaaagcaaaccatttattattgaacacatttggcatgtatagatgtactattcagcttcagagttacaggcaagaagtggacagaacttgtgcaaattgtcagagttctagtccctaattttatgtattttgggaactcctgccttatttatcctgcagtcacagacttgagagcaataaatgcaaacctaaatgagaaaatggaatccctgacagctgtgtccgtatcaagcatcagtctctcaaacagttgccccagcctgacagtgctagtctctgtttaatggtaaaaggagactttgccataattttcagatgaagatgtttcccaaacactgtttacagaatgagatgtgactctacagatacctcatagaagacaatccaagatcatacttcattaacttgacagagtacgtgtcttaaaggaagcatcaagaattcaatatttgcatttaaaaatactttttaaggccattttatattaagccagtgctggaaaactgaattttttttattatgtataataatctcgacacccagcttctggaattgctgctttctttttacagaaattactacccaacagatttcaggaagtactagtagttatcccaaaagtggaataagcatgtattcctaagtgtttcagaaatgttttatttcacacataagtcttaatgttattgttatgattatactttataaacaaccttttccagatgctacagggttttgaatctcaaagttaacatttttcattatttgtaatcttagaaccaaatctttatttattgtggtcactgttattaaatgatttaggaaatactttcaatattattctgaatggctgaagttagtcttaaactcaaattactatatgatgatttaaaacaaaataaaagagcgaggatgggggttggagtttcaggtttatgtcttcccgacatcacttttatcattcatgaaattgtcttaaaaaagcaagagactgcaaaatgtaaacagtaatcttctgtccctttaagaactgccaacaatttgtacaaaaaatgtggtacgttggttcctgcctccactccaggtcatctgtgtgtttagcctttcagggtaaactctagagggttcagtttataattcccacctttcacatatagttcaacaacattaatccagagagaattttatgttttatgatatgggttatgttttattatatattttatgttttatgatatgggttagggattctccatggactccagaaaccctaaaatacaattttgaggttttccaataataccatagcagaaatgtccaaggggttgggggaagatattactttgagaaaacagaaatgtaaaggatttttgaccttatatatgtgtgtggttttgtttttgtttttgttcttgagagagtctcactctgtcacccaggctggagtgcagtggcgtgacctctgctcactgtaacctctgcctcctgggttcaagtgattcttctgcctcagcctcccaactagctgggactacaggtacaccacacccagctcatttttttgtatttttagtagagacagggttttgccacattggcctgtctggtcttgaactcctgacctcaggtgatccgcctgccttggccttccagagtgctgggattacagcatgagccaccatgcctggcctgtatgtgtgtgttttaaagcactagatagggatggacattaaatctgtgttgcagggaaactaaacagaggtttccaaactgaaggcaacctaattgtaaatgcctgtgttaaagaggcagcttgactgttcatgtttcattttgcaaccattggttttgagattatcttttatgcacatttggagtcccttttcaacagtgacagtttcttacacgaagaatggatatggttattgggctcctctaagaatcagagtagggtaacaatgtaccaggcaaattgtaagttgaaattctagataagcatgcagatgacttacaatataaatgaagaataggaaacattttatcttcttaccaagtaccttactataagtaaacctaagataagaaaacccagatttacctataagattgttgggagttaatggtgtcaataaaaggattgatggtccctctaatgaaacccagtagatgtttgttgaattgaactgaaaatttatgtggccagacacagtggctcatgcctgtaatctcagcatttggggaggcaaaggtggaagtatccctcgaggccaagagttcatgaccagcctggtcttttgtagagaccctgtctctacaaaaatataaaaatcagccaggcgtcgtgcacacctgtagtatcagctacttgtaaggctgtggcagaagtgctttagcccaggaggttgaggctgcagtgagccatgtccacaccattgcactgcagcctgagtaacaaaatgagaccctatctcaaaaacaaaaaggaaaagaaaatatacatgatgggattcctattgtgaagtcatttaaaataatgacttgaatttctcagaaatttcaggagcatataaactatttaaatcaaaatattcttacatatagaaaccaagtaagaataaatgagagatatttcagtggacatctggacatatttatggactttgagtatctagcaagtagaaaggaaaaaaatattcatcatactctaatcatttttttatatctattgagcttgtttcttgtaaacttttctttatcttataaaggcatatctcgcttttgtatcgacctgttccttaaaaaaaaa

SEQ ID NO: 712 - DNA, 5743 bp, Homo sapiens
acgtgaccccagcacagctggaggcgggtccccgccctccccagggagcagccggttgaggcgggagcggtgcattgtgggcagaggggcgggggttgggaagatggcggctcccagcctcctcaactggaggcgagtttcttccttcacggggccggtcccccgcgcccggcacggacaccgagcggtggccatccgggagctgatgatcatctttggagggggaaatgagggcatcgcggatgagctgcacgtctacaacacggctacgaatcagtggtttctgccagctgttagaggagatatccctccaggctgtgctgcccatggatttgtctgtgatggtaccagaatattagtatttgggggaatggttgaatatggaagatacagcaatgagttatatgagttacaagcaagtcgttggttatggaaaaaagtgaaaccccatccccctccttctggtttacctccttgtcctcggcttggacatagcttctctttatatggtaacaaatgctatttgtttggtggcctggcaaacgaaagcgaagattcaaacaataatgttcccagatatttaaatgatttttatgagttggagctacagcatggctctggtgttgtgggttggagcattccagtgactaaaggggttgtgccttctccaagagaatcccacacagctgttatatattgcaaaaaagattctggaagtcctaaaatgtatgtttttggtggaatgtgtggtgctcgcctggatgacctatggcagcttgacttagaaactatgtcatggtcaaaaccagaaactaaagggacagtgccacttccacgaagccttcatacagccagtgttataggaaacaagatgtacatttttggtggatgggtcccacataagggggaaaatactgagacttcacctcatgattgtgaatggagatgtaccagttcattttcttacctaaatctggatacaacagagtggaccaccctagtatcagattctcaggaagataaaaaaaattcaagaccaagaccaagagctggccactgtgctgttgcaatcggcactcgattgtatttttggagtggaagagatggctacaaaaaagcactgaatagtcaagtttgctgcaaggatctttggtatcttgatactgagaaaccaccggcaccatctcaagtacagctgatcaaagccactaccaactcctttcatgtcaagtgggatgaagtgtctacagttgagggctatcttttgcagttgagtacagacttgccataccaagctgcatcatcagattcttcagcagcaccaaatatgcaaggagtcaggatggaccctcacagacaaggcagtaataacatcgttcctaacagtatcaatgatacaataaacagcacaaaaactgaacagccagccacaaaagaaacttcaatgaaaaacaaaccagactttaaagcactgacggattctaatgccattttatatccatctttggcatcaaatgcttctaatcataatagtcatgtggtggatatgctaaggaaaaatgaaggtcctcacacttcagcaaatgtaggtgttctaagtagttgcctggatgtaagaacagtaattcctgaaacatctgtatccagtactgtttccagcacacaaactatggtaacccagcagaccattaaaactgaatcatccagtacaaatggggcagttgttaaagatgaaacttcactaacaacattcagtaccaaatctgaagttgatgaaacatatgcactgcctgcaacgaagatcagccgtgtagagacacatgctacagcaacgccgttttctaaagagactccttcaaatccagtggccacagtgaaagcgggagaacgacaatggtgtgatgtgggaatttttaaaaataatacagctttggtgagccagttttatttgctgccaaaagggaagcaaagcatctcaaaggtaggaaatgcagatgtacctgactacagcttgcttaagaaacaagatcttgttccaggcacaggatacagattcagggttgctgcaatcaatggttgtgggataggtcctttcagcaaaatcagtgaatttaaaacttgtattcctggttttcctggagctccttctgcagtcagaatttcaaagaatgttgaaggtatccacctttcctgggaacctccaacctcaccttctggaaatattttggaatattcagcctacttggctatccgcacagcacagatacaagataatccaagtcaacttgtgttcatgaggatttattgtggtcttaagacatcatgtatagtaactgctgggcaacttgcaaatgcacatattgattatacatccaggcctgccattgtgttcaggatatcagcaaagaatgaaaagggatatggaccagctacacaagttcggtggcttcaaggtaacaataagaaagcacctttaaattgaattggtttttttactgaagctattgtgatgatgattatttattagtaactggttatgaagatttgtcatttaaaagagtattctctggctgtatttccagcagttatgaacttgagtttgtaaattgttcttaaaatgtatttgctgaattatagatccaaataaaagaaaagaagcaaagactctctgaaaattagtatatgagttcttccttacagatatagctcttttataaagaaaaacagtgaaattaagataaaagctagaaagctttattaccccaatatcttttataagggctgtgtaacccagtcatcctagagttattgagatgattctggtaactggctgttgtatactatgctgtcttatatagtaaatgttctctacattgtaaatgtcctacctttgagtactccttctatctttattctatatgagcagtgttcctctaacaactgtcttctattggataatatgtgtgatactataataattctaatagttatttgattcctttctttgtttacagttagcacagagcttaagaaattaaaaaagaggcaagtttagaaactgcttttgaacttttattattttccaagaatcatggtaaaatacaacaagaacaatgagttttcttgattcttaccaggccaatatatttgaatatatttttggccaaagcacttaacttatctggccctcattttcctcataacagatgagggagttaaagcagtttatcttttaggtccctttcagcactaaggttttgtgtttttagtagaagtgaagtatgtccctgaacattttcatctgtcttaatggctctaattttgcttttgctaaaattaaaatcttcataattgaattcaaaattaaagtatatgtcctcctattggagaaaaaaacaagcaccttaacaggacacaagttttaaaatagtgttttaaacatttgtaagatttttgtaaatgctctaaatgttttatttttgcattgtttttaccttgaaattgtataaacttttttactatgaaaatataagcattagacagctaactcaggttccattacaaccttaaagatacagataggcattataaacactctgctacaggtaacttgttttaaaccttttaggaatttcatggttccactgcctatttaaatctggaattaatatacagagcaataattgcagaaaagatatttcaaactaagagcttcaataactgcaggggcacaggtctatctttttttataccacataaccttatgccagtttaggttgactgagtagctatgtcctcaaatttcatgtatgataccccccagcaaagatggatttaattgtgcagaattgatatatatgtgtgttccagttactaatttaaagtgtatagaatattttaatatataatttttgtaaagaactgggatttttatactacagtatttgtaattaatgtgtctcactaattaagtttctcttgaagaaaatatgcaaattgttagacacataatgagtggtttccaaactctaaagataaaataaatgcactactatggtgttgttagaataccttttttgtggctgtatgaatctttactctttaaatgtgtactttacaatgtttacaaggagcttctctggtttgttatcccagcaatgcccttggtgagagcttcattctgcatttgtttaattcatatgctttgcttttggcatatgcttgctttttgcactagtagaattttaacttacctcattattatgtttgtaatcatttgtctagcttctgtaatgtatctgatataggctaaacaaatacttaaccaaagttaaaatacatggtaagcaattttgcacatattaaatattagggtttgttgtgtatatgtgtatacttaattataaaagaatatgaatggaaagttatactaaaagtatatgtttcaagcccagttattttaaagatctattgctttaatagaaaaagtttggcttttaaccctttcttctctgcattaattaacaacgtgcatcttgaagcccttctcctgataacaaggaataagttgattttaagcaaaggatagaatatttgtttgagtgtgcacatttatacctgtttagtatttgattcagttaagcctccactcttctggatcaggaggtgattctgaacctgtggttctaacatatgacttaactgtttagagggaagagaagtctttctatactgagggatttgttaaaatcataaatgtttttgccctgagacttagcccagattctattttttttttttttttggcatttgtacattaagcaccagtcatatttatctctgtgataagggattgctgactaaaaaatgccattaagaaatctctgtggctttgacattagtagttaataagagatcttagagctgtgtgctgatgaatagaatgaattggagcaaatagcaagagaagtgcatttagcttcttatgatttgcacattttctaaatgaagatccctttgtgtagcagtaggctgtatcatgcagatatttttcataggatttgcactgagttaaatgactttctttactcttcccagtcaggtaagcagttcaaatataacaagactttgtgccagtcctcttctgtgttctgcaactctggctctcataagtagtaaaaatatttttgatgttgcatgctctcagaattatgttttctaaaatatcatattggcttcattttagtttaataaacttctttggcaacttaattagacatagggtatatataaactcaattttatctgcattttttaaaaaattgaaataatctgattgcatgtatgaaggactcctgcctcattacccaattacataaatacaattatctataggaaggtgaaattgttgatctattatttcaaagacttgtagactagcaaagattcattctgattagaaataaggtctatagctaaagatatttttattttaaaaaattacagcccttgtaacaaaaatcatttgtaacattggatatgaagacattattagtatttaaaattattgtagtcatttgatcataaatgaagtagcttgcaaaatagacttggtctttgaccctttaaggtgtaactgactgactgttgtgtttttcaagactgattttaggcagttttatgtatcgtgtaccaatgatatgtaaaataaagcaccttttctactataaacaaaaaaaaaaaa

SEQ ID NO: 713 - DNA, 2892 bp, Homo sapiens
gcgccggcacacctattggcccccgcggcgtcccgtcgccgcgtcgcgttgctggcccgtcggagcgacgccgctcgggtcagtcggcggccggactgggaagatggacgcagctactctgacctacgacactctccggtttgctgagtttgaagattttcctgagacctcagagcccgtttggatactgggtagaaaatacagcattttcacagaaaaggacgagatcttgtctgatgtggcatctagactttggtttacatacaggaaaaactttccagccattggggggacaggccccacctcggacacaggctggggctgcatgctgcggtgtggacagatgatctttgcccaagccctggtgtgccggcacctaggccgagattggaggtggacacaaaggaagaggcagccagacagctacttcagcgtcctcaacgcattcatcgacaggaaggacagttactactccattcaccagatagcgcaaatgggagttggcgaaggcaagtccataggccagtggtacgggcccaacactgtcgcccaggtcctgaagaagcttgctgtcttcgatacgtggagctccttggcggtccacattgcaatggacaacactgttgtgatggaggaaatcagaaggttgtgcaggaccagcgttccctgtgcaggcgccactgcgtttcctgcagattccgaccggcactgcaacggattccctgccggagctgaggtcaccaacaggccgtcgccatggagacccctggtacttctcattcccctgcgcctggggctcacggacatcaacgaggcctacgtggagacgctgaagcactgcttcatgatgccccagtccctgggcgtcatcggagggaagcccaacagcgcccactacttcatcggctacgttggtgaggagctcatctacctggacccccacaccacgcagccagccgtggagcccactgatggctgcttcatcccggacgagagcttccactgccagcacccgccgtgccgcatgagcatcgcggagcttgacccgtccatcgctgtggggtttttctgtaagactgaagatgacttcaatgattggtgccagcaagtcaaaaagctgtctctgcttggaggtgccctgcccatgtttgagctggtggagctgcagccttcacatctggcctgccccgacgtcctgaacctgtccctagattcttctgatgtagagcgactggaaagattcttcgactcagaagatgaagactttgaaatcctgtccctttgaaaatcctggggtcgggggtggcacctgtgagagcctggggctcctggtgccgctgcgtttcatccatcccgcccgctcgcctgccgagggctgcgccccgtgctgcctccccccagagggccacccgctgtgctcgtggactgaggctgcgctgcccgggaggccttactgcttggtgtcagactgcccagctcagagtgcccgtcagggcctgtgcatccgcacgcggagccgtctgttaggagcttccagagtgttctctcgacactgccagccccgtgttagcacctgggcctcagtcccacttgctcccaggcgccggttctgtggttggtttggaattaaagtcctgtttgaagttgtcagacacagacatgaatttctgggcgctccctgagtcagagtctcagaagacctgtgcaggctggcgtgagaggagcggcagccacactgcggccccacgcccaaggactgggctgctctcgaggggggcgcgcccaccgctgtgtcctctctgcccagcctggcttaccaagggctacctcagtgggagatgaggttggaggaacgaaggcgaggttcctccttgctttggggagaaaagtattcaggaagtgggtgtgtgggaaacctgaagatggcgtgcacaggacacagcgtgggcggcctgggcagaagggcggctggctgtcctggagctgctgctggagcctgccctcagagtgtccctttccagtgctgtggcattctgtggcagcttccccaggtgtggtgacggggggggggcggggcctccacctgtgacagccaggcttgagggtggacggcgtgcctctcccaggagccttccccatgtccttgccttgctgagaattgccctcccatgccgctgaggtgttaggtggtttagggccaaaaggggaaaaccacttgagtcttgtggtgtgtggtgggcagacaccacagggtggcatcacctggtggcatttccagaacctcagccccgattccagcacccaccaccgcctgaccctgtgtaacctgctgtcccgggtcccagagtgcactctgccccgctgctctgctgcctgtcctgggaaagtatctttgccccactaggaaatgtaaacaggagggcttggggagcgtgggcacttttctcatgagcagctactgcggcgttggcaggactcgctgctgctgctgctgcttgtgtaggtcggggagccagagatccccgaggacgcgcgccggacagtcggcactgaccggcccacctggtagcagaggacacccccagccccccaagcattgaagacatagtgtatttcctcgtatcctttctcccttgggtgtagttggggtggggaagcagggaaggctggtgcgatctccattccttgggctccacgtccgagttcatggtgcgccgctgtgctgggagctgcagtggtaatgtgtgggacaccttgaccaaaggggagctttgtctcgtgtgttttgaaaaaggcttaatgaagagaatgttgttcattcttagtagtatagtttgcaattcttaatggcaaataataagtttcagtagaaaacaaaaaaaaaaaaaaaaa

SEQ ID NO: 714 - DNA, 3788 bp, Homo sapiens
atgctgtcatcaccagtaagataccccagcccggttggctaacccctagctcagccctgtttgtggttaggggagttctagacagaacataattagacccctgctacttcctgaaacctcagctaggactgcagggaggggtgcgaggctagccacgcaggcggggccctgggtcattttaaactctcagagtgaacgtcttgataggaccgacaagacgcatgacatgtacttagaaagcttatcttagagccacactgagattggaacccgcaaaatatgccagggaggaaggtgagcaagggacacgacactcacccggagaaacccagcaagcgcagcgaggctgtggggagaccggagccctgcacaccgccgggggaaggtgggccagcgccaccaccgtggagaacagcgcggaggcaccccacgagatgagacggaactgccgtgagatccagcaatgccaactgtgggtctgacccaggagaacggaaagcagggacgtgaacagccctcctcatgttcttgacaccgtcattctcagcagctcagctaaggcacagaggcagccgagcgtctgtcagcggagtcgtggctgagcagaacacgccacacgccacacgccacacgccacacgtgcaggattgctcaagatggaagggcacagtggaatatatatatatatttatatttttggcgagaccctggaggacacactgaatacaatggaataccatcccgcctttgaaaggaagggaaatcctggcacacgctgcaacaggagggagcttgaggacactgtggtgagtggagcacgtgagacacggaaggacacacgctgaagacacgcagagatgcccacccacgtggggaggtgacaggggagcccagcgcacagagacaaagtggaatggaggcctgggggctgggagcaaatgcggagcgagtgcttcctggggcagagtctccgtttgggaagatgagaaggttctgccgacggatgctggcgatggttgcagaagaatgtgaatgtgcccaatgctactgaaaaacggttacaatggaaacgccaccccagtgaccaccactgccccgtgggcctccctgggcctctccgccaagacctgcaacaacgtgtccttcgaagagagcaggatagtcctggtcgtggtgtacagcgcggtgtgcacgctgggggtgccggccaactgcctgactgcgtggctggcgctgctgcaggtactgcagggcaacgtgctggccgtctacctgctctgcctggcactctgcgagctgctgtacacaggcacgctgccactctgggtcatctatatccgcaaccagcaccgctggaccctaggcctgctggcctgcaaggtgaccgcctacatcttcttctgcaacatctacgtcagcatcctcttcctgtgctgcatctcctgcgaccgcttcgtggccgtggtgtacgcgctggagagtcggggccgccgccgccggaggaccgccatcctcatctccgcctgcatcttcatcctcgtcgggatcgttcactacccggtgttccagacggaagacaaggagacctgctttgacatgctgcagatggacagcaggattgccgggtactactacgccaggttcaccgttggctttgccatccctctctccatcatcgccttcaccaaccaccggattttcaggagcatcaagcagagcatgggcttaagcgctgcccagaaggccaaggtgaagcactcggccatcgcggtggttgtcatcttcctagtctgcttcgccccgtaccacctggttctcctcgtcaaagccgctgccttttcctactacagaggagacaggaacgccatgtgcggcttggaggaaaggctgtacacagcctctgtggtgtttctgtgcctgtccacggtgaacggcgtggctgaccccattatctacgtgctggccacggaccattcccgccaagaagtgtccagaatccataaggggtggaaagagtggtccatgaagacagacgtcaccaggctcacccacagcagggacaccgaggagctgcagtcgcccgtggcccttgcagaccactacaccttctccaggcccgtgcacccaccagggtcaccatgccctgcaaagaggctgattgaggagtcctgctgagcccactgtgtggcagggggatggcaggttgggggtcctggggccagcaatgtggttcctgtgcactgagcccaccagccacagtgcccatgtcccctctggaagacaaactaccaatttctcgttcctgaagccactccctccgtgaccactggccccaggctttcccacatggaaggtggctgcatgccaaggggaggagcgacacctccaggcttccgggagcccagagagcatgtggcaggcagtggggcctcttcatcagcagcctgcctggctggctcccttggctgtgggcaggtagcacgcctgctggcagaggtacctggtggctgccctgttcgcatcagtggcgatgactttatttgcggagcatttctgcaagcgttgcctggatgcggtggtgcattgtgggccctctgggctcctgcctcagaatgtcagtgagcaccatgctggaggtcacccagcactgtggcagcgcccaggagggcatagggcagcctaccacctccaagggggcaggcgccctcatctggggttgggtctgtgctgagctggagggcctctagggaaccgtggggcagggtggccagctgctggctcccagagcgcagcccaggcgtcctcaacggggagccccaaatgtccacgcccagaacaacagttggcaggacaggtgtgacacagccacagcagaggcaaggggtgccaggagtccccagcggcatcctcggggagatgctggtgaggggtccgtacagggtggggtccccacccctagccccttactgaggggggagtgcagcagttggcctgcttgtctggcggagaaagccagctccctgcaccctcggggctgagtcagatctgggtctgccgcaaaggccttgcctagaccaggtcacactgatgccctggtttccctatctgtaaaatggggccaatgacacctacctcactgggtcaccatcgagatcaatcctcctccctgccccgacacctcgggcacatcgcatgcactcagagcacagagccgggcagacgcagcacctgcatggggagcccagtgcccggcacagcacaggggcttccagggaggccgcgcagggccgtggggctgagccacgctctcgttttgtcaggcagctatgcagttgctcttccttgtttttgttttgtttttgtttttgtttttaatatttatttttttagagacagggccttgctctgttgcctgggctggagaacagtggcaccatcatagctcactgcagcctcaaactcctgggctcaagcgatcctccccgctcagcctcctgagtagctgggactacaggtgtgcaccaccacacccagccaaaacagccatcctccccttgagagtcatcagaaaaatacattaggaaaatgtgtttagaaataaaagcacaaggcagggcagtgctcacgcctgtcatcccagcactttgggaggccgagacgggaggatcagttgaggtcaggagtttgagaccagcctcggcaacatggcaaaatcttgtctcttttttttggtattaaaaaaatcataaaaataaaagaaataatgcaatttaaccttcaaaaaaaaa

SEQ ID NO: 715 - DNA, 5552 bp, Homo sapiens
gagaagagcagctcacccttcgcagccgcgatgggggaagacgacgccgcgcttcgggctggcagcagggggctctccgacccgtgggcagactcagtgggagtgcgaccccgcaccacggagcgccacatcgccgtacacaagcggcttgtgctggccttcgctgtgtccctcgtggcattgctcgcggtcacaatgctcgctgtgctgctcagcctgcgcttcgacgagtgcggggcgagtgccacgccaggcgccgacggtggcccctcaggctttccggagcgcggcggcaacgggagcctccctggatcggcccggcgcaaccaccacgcaggcggggactcctggcagcccgaggcgggtggggtggccagtccggggaccacgtcggcccagccgccgtcggaggaggagcgggagccgtgggagccgtggacgcagctgcgcctgtcgggccacctgaagccgctgcactacaatctgatgctcaccgccttcatggagaacttcaccttctccggggaggtcaacgtggagatcgcgtgccggaacgccacccgctacgtagtgctgcacgcttcccgagtggcggtggagaaagtgcagctggccgaggaccgggcgttcggggctgtccctgtagccggttttttcctctacccgcaaacccaggtcttagtggtggtgctgaataggacactggacgcgcagaggaattacaatctgaagattatctacaacgcgctcatcgagaatgagctcctgggcttcttccgcagctcctatgtgctccacggggagagaagattccttggtgttactcagttttcgcctacacatgccagaaaggcatttccttgttttgatgagccaatctacaaggctactttcaaaatcagcatcaagcatcaagcaacctatttatctttatctaatatgccagtggaaacttccgtgtttgaggaagatggatgggttacggatcacttttcacagacccctctcatgtccacatattatttagcctgggcaatttgcaacttcacatacagagaaactaccaccaagagtggggttgtagtacgattatatgcaagacctgatgctatcagaagaggatccggggactatgctctccatataacaaagagattaatagaattttatgaagactactttaaagtgccctattccttgccaaaactagatcttttagctgtgcctaagcatccgtatgctgctatggagaactggggactaagtatttttgtggaacaaagaatactgctggatcccagtgtttcatctatttcttatttgctggatgtcaccatggtcattgttcatgagatatgtcaccagtggtttggtgaccttgtgacgcctgtgtggtgggaagacgtgtggctgaaggaagggtttgctcactactttgaatttgttggtacagactacctctatcctggctggaacatggaaaagcagaggtttctgaccgatgttctgcatgaagtgatgctgctggacggtttggccagttcccatccagtatcacaggaagtgctgcaggcaacagatattgacagggtgtttgactggatcgcatataaaaagggtgctgctttaataagaatgctggctaattttatgggccattcagttttccagaggggtttgcaagattatttaaccattcataagtatggtaatgcagccagaaatgatctctggaatacattatcggaggctttaaaaagaaatgggaaatatgtaaatatacaagaagtaatggatcagtggacactccagatgggttatcctgttatcaccatcttgggaaacacaacagcagaaaatagaataataattacccaacagcattttatctatgatatcagtgctaaaactaaagcacttaaacttcagaataacagttacctgtggcagattccattaactattgtggtaggaaatagaagccatgtgtcttcagaagcaattatttgggtgtctaacaaatcagagcaccacagaataacttatttggacaaaggaagctggctgctggggaacatcaatcaaactggctattttagagtcaactatgacctaaggaactggagattattaattgatcaattaatccggaatcatgaggttctttctgtcagtaaccgagcgggcttgatcgatgatgccttcagcctagccagggctggctatttgcctcagaatattcctctggagattatcagatacctgtctgaggagaaggattttcttccttggcatgctgccagccgagctctttatcctctagataaattactggaccgcatggaaaactacaacattttcaatgaatatattttaaagcaagttgcaacaacatatatcaagcttgggtggccgaaaaataattttaatggatctcttgttcaagcatcctaccaacatgaagaactacgtagagaagttataatgctggcctgcagttttggcaacaagcactgtcaccaacaggcatcaacacttatttcagattggatttccagcaacaggaacagaataccactaaatgttagagacatcgtatactgtacaggagtgtcactactggatgaggatgtctgggaattcatatggatgaaattccattccaccacagcagtttctgagaagaaaatattattggaagccttaacttgcagtgatgacaggaatttattaaacaggcttctaaatctgtcactgaattctgaggtggtgctggatcaagatgcaattgatgtcataatccatgtagctcgaaatccacatggtcgagaccttgcctggaagtttttcagggataaatggaagatattaaataccaggtatggagaagcattgtttatgaattccaaactcatcagtggtgtcacagaatttcttaatactgaaggtgaactcaaagagctcaagaacttcatgaaaaactatgatggggtagctgctgcttctttctcacgagctgtggaaactgtcgaagccaatgtgcgctggaaaatgctttaccaagacgagcttttccaatggttaggaaaagctctaagacactaatatatgtatcttataaacaaacaattcaactcagaagtttatgagaagacacgctttttgtggaatgaggaaaatgtactacctagaaaatggccagattttcagtgttaacgtgtgggaggaattttttttttagtttttattttttggttttgggggatattttttatttgtttcattcattctgttctgtttctctactgggtgttcctctctaaagaaactcttgcaagtgaaactagccatgattgcttcagctgtacattccttgctgtacaggaccaaatatgatagtgatgcatgttgatgttacagtcaatttggaaaaacatattcagaatatctgtgcatggatatattgtcctgcctgtgttccagcatgcttatttcaaacgtccagtgttgtgtgtgaatatgtgttacacctaggatgggcattatgcaaaagcacaaagattatatatgacaatcagtattgcaatgaaagaaaaactaaaaacagaaatgatattctcaattttgggcaatgtgagaggtaaaatagcccttgacatgatgaacatcacttatttcagcacttggattgtctggcaatgattactgtgttgctaactcattttctttgagttaaagctgtgtatacattttaaaaggcatatagatagtgtatgcatatgtatatgtacatagggaagccccatatgtatatagtatgttgtacactgcacatgtacaaagaatgtcttcagatcaaagaaaatttatctctttttataaacttaaggacagttgcaaaaggcttcaaggaatttatctcaacattattctttctatgtcctaactaaatttctcaactgttatgaatttttcatctacttcttgaacagtggtctattctgctacatgaagatgaatacaaacaaaatttttgtataaactactattccagttctcctgtgtcagtcttgcctatagattttgccatcgttttctgtcaaagttccttttgcatgaaacaattatgcaaacttataattattagtgctgaaaaagagtttattttccatcttgtttgttttcctaccttatgctgagtagtccagagagttaaaaaaattctctgcatgttggtcttttaagtctgttttgctctaatcctccattaagcgagcatacctcaagtgggtctattagcatttaatgaccttttgtgccagttgtgccatcccttaagatgaaaagttccttttcttgtgttaatgtacaaagcttttcttttggcactgacaactgtgttctacctgggaattttgaatagccattttcatggctgtgtgttgtgtaacacaaatgtttttaaatggtattctcacccagtaggccagctctccaaacgttgcttagatgcttcaaaattagcatattttaagtttaccagtataaaataccaatgcaactactctacatagccaaatgtttgtaaatcacgtcttattttcctgaggtttttcactccaccaaatcttacaaatcattgaaagaaatatattctaacagtacgcactgaatagtgaaaataattagacattttaagaaccagagccatagaattattttaaattagtagaaaagaggagctatttccgaatctatagaataaagtaccacctaaaactgaattttatcatataagcaagtaatacctattagtcatacctaaatttttcagcacttcattcaattaaaatacatgaattttaaatattttacatgatgtgaataggcatgataatacttttagtataaaatctaaactttttccatttatcagaaatgataaaatccagttaccacatatcacgtttataaaatccttaattaaatgagtaacttctaaaatataacaatactaaatatcacactgcgatggaggtcccaaatatgtggtctatcaccactgaattcatgtaatagataagaaaaaaattagaggtggatgtcttgttttgtgtcatgaattactaaaatctcttagtagttgtggtatatttttgagtaaaattaccatttccagatttgagtttgaagggcttttatagttgtattttcctcctcactgttaataatcataatcctttttcagtattttagtggccttgaacaactggtttatctacaatctcaaatcctaagtgtataattatgtgcaatgttcaatacctcatataatacttgctcaacagtatagtggtaccaatggcattaagatggtgtttttgttctacatatttttcaataatttattctttctaatgttgaaattatatcaggctttaccggtttttttagttgtttaaataagtaatattttcaaaagaataaaataaccaatgatatctcttggaataatctgtaaaacgtagttataaaattctattttctactta

SEQ ID NO: 716 - DNA, 3600 bp, Homo sapiens
agcggcgggacggccacaccctgcgctccgcgcgggctcgggtggggtctccgctcctgcgccctgcgccctgcgcgccgcagccgcaaccccgacggcgccccaaacgctgttgcgccgcgcgccccgcccagcccggcctcgcgctggtcccggtctcgccccgcagccctcgatctcccgtgacttcctcggccaggccgcctgcgcctctgggaccatgttgcgctggctgcgggacttcgtgctgcccaccgcggcctgccaggacgcggagcagccgacgcgctacgagaccctcttccaggcactggaccgcaatggggacggagtggtggacatcggcgagctgcaggaggggctcaggaacctgggcatccctctgggccaggacgccgaggagaaaatttttactactggagatgtcaacaaagatgggaagctggattttgaagaatttatgaagtaccttaaagaccatgagaagaaaatgaaattggcatttaagagtttagacaaaaataatgatggaaaaattgaggcttcagaaattgtccagtctctccagacactgggtctgactatttctgaacaacaagcagagttgattcttcaaagcattgatgttgatgggacaatgacagtggactggaatgaatggagagactacttcttatttaatcctgttacagacattgaggaaattatccgtttctggaaacattctacaggaattgacataggggatagcttaactattccagatgaattcacggaagacgaaaaaaaatccggacaatggtggaggcagcttttggcaggaggcattgctggtgctgtctctcgaacaagcactgcccctttggaccgtctgaaaatcatgatgcaggttcacggttcaaaatcagacaaaatgaacatatttggtggctttcgacagatggtaaaagaaggaggtatccgctcgctttggaggggaaatggtacaaacgtcatcaaaattgctcctgagacagctgttaaattctgggcatatgaacagtacaagaagttacttactgaagaaggacaaaaaataggaacatttgagagatttatttctggttccatggctggagcaactgcacagacttttatatatccaatggaggttatgaaaaccaggctggctgtaggcaaaactgggcagtactctggaatatatgattgtgccaagaagattttgaaacatgaaggcttgggagctttttacaaaggctatgttcccaatttattaggtatcataccttatgcaggcatagatcttgctgtgtatgagctcttgaagtcctattggctggataattttgcaaaagattctgtaaaccctggagtcatggtgttgctgggatgcggtgccttatccagcacctgtggtcagctggccagctacccattggctttggtgagaactcgcatgcaggctcaagccatgttagaaggttccccacagctgaatatggttggcctctttcgacgaattatttccaaagaaggaataccaggactttacagaggcatcaccccaaacttcatgaaggtgctccctgctgtaggcatcagttatgtggtttatgaaaatatgaagcaaactttaggagtaacccagaaatgatgttgcattttttgctttagcctgataattgaaactttcaacaatctctggagtgactttttctcctcgaattgaaacaagtctatggcaaaagaagctgcatttttttcacaaaagggaagatggtaacaatggtcacttcaaacttttgggctaaattatatgtacacagaaatgttcaaaatcatagttttaatgtgttttgaaaaggccacacaattatactttatcttttcttaataatcctgcaaatctctgccctgaatccgaaatctgaaaatgtactggcttgaacaaaatttgttttgtgtgttagagttataaatcattaatctttatttcgggtggtttacgtttatgccagttcctttatatttaaatttcttgttttatatattttgaatgtctttatagatttctttaaatttccttatagaaccattaatagaaaatcattacatttaaaatataccttacagcaaaagcatccaaataagtatagggtttatgtccttatttttctttcagctgaatacgaatgaacacagtggtggaatttctgaagggaagtgatgaaattatatttatttcagtgggcacttttccattttaccactgtaccattatttggttcctggagttatacactaattttcagtatattactgttaaattaccaacacaaggcaatttatttgaaagattccgtttatcctgccattgctttgaaaagcagcaggaaacgaaatcctttgacttgtatcagcttctgcagagcatctttgttttcctttgtcctttgtttcctaccttttgaatcagattccgttttagtcaggaagacttcttgggaccattcttagtaacctgaaatttcttttttaattgcatgaagtggattgatcatgagcaaatgatgtgcttatttctccctcactgttgaatatctttgaacttgctgttttcaatatgggcagcacaaaggtgagagatacatattaatagtagtatgtattactcttatacattagatacctatatttaaatgaaaggcccaatttgtaaacatatacattcatattctctcttgccccaagttttaggaacatgttaggatataggagacttaatttataataatgagagcatttttttattttactaaagccatttttatagtcaactatcttttcttatttgtgtgattagaacttagaaaaatatttactagttgaagttattatcagtttttaatttagttcttaaactcatttcacttctaataatttctgttataaatttccagcattttaatgaaaatctaatgatgtaataggcattttctttatttgaacctacctcttttattttctgaaccaaagagaaagatggactggtgtttgtgaaacatttttaaaaatgtagtttcatttatattagttatgtttgataaatgtctcagtatttttataatatgataagcctgggattctacttttagggttatttgtacttttgagtaatatataaagtgacaatattaaggtacatgatcagctctttctatttttactcgtaaaaattatggaaatgaataattttgctaacaactttgaaatttcaaacttctggaaaatatgaaaatattcattgttcattatgaatttaaattgtaaggtatgaatgtgatttgtctgtacatcttgtatcttttccaaaaaatgattctgtatcttttggaaaaaagccgagagttgaagatagtatatttctggtagtactgaatatttacttacagtttctatcaaaaatatatatttgtttctaaaattacttgttttccagtttttattttttttagagaaaattcttaagtctcagtttcctaattgaaaaaaaaaaattataaataaagcaaaaattgtatcctaaaaaaaaaaaaaaaa

SEQ ID NO: 717 - DNA, 4611 bp, Homo sapiens
gggtcgcgtcagtgcggagacagcggtgtcctgcgcgtcttcgggtcagtacggggggccgcgtcgtagggactcactggcggtgcgcgacctgggctggctccgggggtggcgggcgcagctgctgtgacagcttattgcaggagtgaccaggacactacctcctagaagtaatgcccacagaaagcgcaagttgttcgactgctcgccaaacaaaacagaagcgcaaatcccatagcctttctatacgaagaactaacagctcggagcaggagaggacgggactgccaagagacatgttagaaggacaagattctaaactgccttcctcggttcgcagtacacttctggaactgtttggtcaaatagaaagagaatttgaaaacctttatatcgaaaacttagaattacgtagagaaatcgacactcttaatgaacgtttagctgctgaaggacaagcgattgatggagcagagctgagtaagggccaactcaaaacaaaagccagtcacagcaccagccagctctcccagaaactgaagaccacttacaaggcttccaccagcaagattgtctccagctttaagaccacgacatcgagagctgcctgccagctcgtgaaggagtacatcggccaccgggacggcatctgggatgtcagcgtggccaagacacagccagtggtgctcgggactgcatcagccgatcacacggctttgctgtggagcatagagacagggaagtgcctagtcaagtacgcaggccacgtgggctcagtaaattctatcaaatttcatccctcagagcagttggctctcactgcttctggagatcagactgctcatatctggagatacgcggtgcagctgccgacaccccagcctgttgctgacactagtatatctggggaagatgaagtagagtgctctgacaaggacgagcccgacctcgatggggatgtgtccagcgactgccccaccatccgcgtcccactgacatccctcaagagccaccagggcgtggtcatcgcctccgactggctggttggggggaagcaggctgtgactgcctcctgggaccggacggcaaacctgtacgacgtggagacgtccgagctcgttcactctctgacagggcacgaccaggagttgacgcactgctgcacacaccccacccagcggctcgtggtgacctcctcccgtgacacgactttccgcctctgggatttcagggacccctccatccactcggtgaatgttttccagggacacacggacactgtgacttctgccgtgttcaccgtgggagacaacgtggtttcaggcagcgatgaccgcacggtgaaagtctgggacttgaaaaatatgagatcccccattgcaactattcgcacggactctgccattaacaggatcaatgtatgtgtcggccaaaaaatcatagccctcccccatgacaaccgacaagtgagactgtttgatatgtcaggagtgcgcctggcgcggcttccccggagcagccgacagggccacaggagaatggtatgctgctcggcatggagtgaagaccaccccgtgtgcaatctgttcacctgtgggtttgaccggcaagccattggttggaacatcaacatccctgcattgctacaagaaaaataaggacaccggcagcccttagtttcactgtttgccagcacagacctttgatgggtgcaggcttttctgcgtattaatcagccatttttgtgagagtttgaccctggaaagggtgctttgtatatgttcttttcacatagtgcccagcttgcatgaaatgtacagagaaatgtgtggtcgtattttttacttttgtcttgtatatgtatgtatattgggtcctctgggcagtagaggcaaagctcacctcccatgtagcacatgaaatgcttgtgagttgttgacattggacaggtgaacagtagggcattacatttgtgtgaattaaatgtgaacttctgtattacgttgcggcgtcggcagtcctgcgttccctggagtaactgtacgtatctgcctttgctgggaagactgtggggctgcctgtgttggctggcgaccagcaggattgctccaggattttgtgtttacctcgcgtgaagttcagcacgtgctgtcgtgtagtcagcttctactctaatttctgttacagttctgcaaaggtaacctggagtttagaagttaaaaaaaagcatgggatgttggatttgcaccatttggagtttctttaggaaagaaaagttttctgcttttttatagaaaatcatttcagtctcccgaggtctcatgctagcaaattttgaaataggattctaatcactgatttcaaatattaagcaaaatgtaaagcactttaatttatagctatggttataaacaggttttagatgtttcaaatgacttgtccactgaatgtcacttgaccttgataagaggccgcctgcacacagagcccagttaattctccgcacctcggttgtgtgcttccgaatgggctcactcccgtggtggtgtttgagagccaacaacactacctcagagacgggtctttgggaaactttgggtctcactgttgcctggctggagcactttggtttatagctggaatactgagttcagttcagaaggcaggaaagacagtcacaccgacgtgtcctgaaggtgtaggctctccacttaggcgcacaagctgacggctgcagccagcaggccccggtgacgagacacttccaggtcttgtggtggggacgcctctcagtgccagtcccgccactgctgagtgagcctggtgttcttgccttcttggaaattactgctcacctggtatctgtacgttaatgtttcttgctgagttacagttttgataaagaggctctcatttcctgtgtcttgtatattcagtcctttcaatacgtccacctggaggctcaccacttggagagacacaggaaggtaatatttacagctgtcatgtgacatccccaggtctttgtgttttgccctgttttacggtgaggtaggagggaacccatctggggaccggtaggtgcaggtgcagtaggacgtgggacttttggacccgtcctttggtgcagctcgccagggatgagaggcacctccctacttgggtcttcaggagctggtccaaggagcttcgaatctaagtcatctagaatgaccctgaaatgactgacagccccgggcccaagaaaaacccataaccacctcagatggatctgacgtggctaagggacaaacagcaaatatttcagtcattttgattttacaaataaaaaatgtgttgtgtttttgtccgacattatttcctgactgcactgttctgagaatggagtccacctggtccctctggttgattagaatctcaggtttcagctcctgctgtcctgagcgaacttgcctgatgcagggctgtgctgtgtccagatgttgctggggcctcactttttctcttggctggaggtccaattgccagagcctcccacactgcacatacaaaggtctgagcccagggcagcttctggggccactgcacaggccacctgcttgggttcctcggagtttaatttgaaagtctgggtgtcttaggatgatggttaggaacattgaaaaatggctgcaaatagccaaatcaaacttaagaaccagatctctgccagattaaacatttttgaagcttttaaaagtcaatattcctagtggccactgagttccaggcacactggtgccctttactgccacagctgctcaccttgtctggcaaactggagggacctcagaaactggactcctgcatgtccttgggggcgcagccctgtggtgctcaggcagagctctcaggagccggggcaccttgctgttcgctgctgtgtcgtcttctaatgtgagctcatccactgctgctgcagcgtggtgatcaggagtcacagacaagatcggggatggtgtgtgtgtgtgtgtgtgtgtgtgtgtgcacgtgtgtgtggctaaattaagtcatactgtcaaccacacgtgatctcgtctgaaacagtgtttggaagtgggaacagttttgtcctgtatgctgatgtgtccagaatttcatttaatgatagacggaaaatgtgtggttactgaaaactgtatatgatacagaatttcataagagccatgctgttgggcaaagcaactctttttcaaccactgctcatcagtttctgtagagacaaaaactctgtacatattttggaatctgaagaatcctatgtaaatcatttgttacttaagtctgtgaaaaacatatttctttggaggaaaatgtatgcatttataagtgttccatggaatcagtttttattgtatcgatataattgtctctaagtgttgactgtcttcattgcaatatgaaattcattaaaatgtccatgttccataattactattataaaagctttgtgttattgggagtcttattatttttatagtttttcatgttttgctttggtgaaacattgtgaatgactatataaacatcacgatgagctagaaattgaacaaatataatactggtcactcg

SEQ ID NO: 718 - DNA, 1185 bp, Homo sapiens
gtgattacggagatgccaagtgggtattgactgctccaggatgtggatggagggtgtgaaaaccagggtggggtgacgcaggctctgggtcatgatagggagagcaggcagctgggtcctgggctggaggactaaaataagggacgccaccttcaggggtgacacatcagcccaggccttcccaacgggtttgaccagttctgttctgatggtattcctgtgccactgggctggtccctcctccactcctcccctataaagcctcttggggttcccaggcacccagactcagcccaccccagctttgggggccagtacatagccatgatcctcaactggaagctcctggggatcctggtcctttgcctgcacaccagaggcatctcaggcagcgagggccacccctctcacccacccgcagaggaccgagaggaggcaggctccccaacattgcctcagggccccccagtccccggtgacccttggccaggggcaccccctctctttgaagatcctccgcctacccgccccagtcgtccctggagagacctgcctgaaactggagtctggctccctgaaccgcctagaacggatcctcctcaacctccccggcctgacgacccttggccggcaggaccccagcccccagaaaacccctggcctcctgcccctgaggtggacaaccgacctcaggaggagccagacctagacccaccccgggaagagtacagataatggagtcccctcagccgttctgttcccaggcatctccaggcacccacgccctctccaccctctgattccccgtgaattcttcccaatttagcctgtctccttaaacctcttcctcattccctcggttttattctgaacccgtaaggtggtgttctcaatatttcctgtcccctcctgagatccatacttagtcctcacatcgcccgttttttcctctgacagcctaagcctactctcctacctcgcctccaggcctcggccgcacctacctcccacccggtcttcctgcccgcgcgatcgctggggcagggctatggtactgtgttcccttctgccacctggtggccggcggcaggaactatcagtagacagctgctgcttccatgaaacggaaaaataaaaatcatgttttcttaaaaaaaaaaaaaaaaaaaaaaaaaaaaaaaaaaa

SEQ ID NO: 719 - DNA, 6500 bp, Homo sapiens
tcctgctatacccacagtggtggtcatctcttctgatcttcacagccaatcagctcccaaggcccctgacctcagctcagcttttgtagatccttatgacaccatcctttaagactggaatcctagggcaggctgttttattcccgcctcctgaggcctttctgaggatctgtggcttgtctctgtcctgagggtgaagatggatgacagatgctacccagtaatctttccagatgagcggaatttccgccccttcacttccgactctctggctgcaattgagaagcggattgccatccaaaaggagaaaaagaagtctaaagaccagacaggagaagtaccccagcctcggcctcagcttgacctaaaggcctccaggaagttgcccaagctctatggcgacattcctcgtgagctcataggaaagcctctggaagacttggacccattctaccgaaatcataagacatttatggtgttaaacagaaagaggacaatctaccgcttcagtgccaagcatgccttgttcatttttgggcctttcaattcaatcagaagtttagccattagagtctcagtccattcattgttcagcatgttcattatcggcaccgttatcatcaactgcgtgttcatggctacagggcctgctaaaaacagcaacagtaacaatactgacattgcagagtgtgtcttcactgggatttatatttttgaagctttgattaaaatattggcaagaggtttcattctggatgagttttctttccttcgagatccatggaactggctggactccattgtcattggaatagcgattgtgtcatatattccaggaatcaccatcaaactattgcccctgcgtaccttccgtgtgttcagagctttgaaagcaatttcagtagtttcacgtctgaaggtcatcgtgggggccttgctacgctctgtgaagaagctggtcaacgtgattatcctcaccttcttttgcctcagcatctttgccctggtaggtcagcagctcttcatgggaagtctgaacctgaaatgcatctcgagggactgtaaaaatatcagtaacccggaagcttatgaccattgctttgaaaagaaagaaaattcacctgaattcaaaatgtgtggcatctggatgggtaacagtgcctgttccatacaatatgaatgtaagcacaccaaaattaatcctgactataattatacgaattttgacaactttggctggtcttttcttgccatgttccggctgatgacccaagattcctgggagaagctttatcaacagaccctgcgtactactgggctctactcagtcttcttcttcattgtggtcattttcctgggctccttctacctgattaacttaaccctggctgttgttaccatggcatatgaggagcagaacaagaatgtagctgcagagatagaggccaaggaaaagatgtttcaggaagcccagcagctgttaaaggaggaaaaggaggctctggttgccatgggaattgacagaagttcacttacttcccttgaaacatcatattttaccccaaaaaagagaaagctctttggtaataagaaaaggaagtccttctttttgagagagtctgggaaagaccagcctcctgggtcagattctgatgaagattgccaaaaaaagccacagctcctagagcaaaccaaacgactgtcccagaatctatcactggaccactttgatgagcatggagatcctctccaaaggcagagagcactgagtgctgtcagcatcctcaccatcaccatgaaggaacaagaaaaatcacaagagccttgtctcccttgtggagaaaacctggcatccaagtacctcgtgtggaactgttgcccccagtggctgtgcgttaagaaggtcctgagaactgtgatgactgacccgtttactgagctggccatcaccatctgcatcatcatcaacactgtcttcttggccatggagcatcacaagatggaggccagttttgagaagatgttgaatatagggaatttggttttcactagcatttttatagcagaaatgtgcctaaaaatcattgcgctcgatccctaccactactttcgccgaggctggaacatttttgacagcattgttgctcttctgagttttgcagatgtaatgaactgtgtacttcaaaagagaagctggccattcttgcgttccttcagagtgctcagggtcttcaagttagccaaatcctggccaactttgaacacactaattaagataatcggcaactctgtcggagcccttggaagcctgactgtggtcctggtcattgtgatctttattttctcagtagttggcatgcagctttttggccgtagcttcaattcccaaaagagtccaaaactctgtaacccgacaggcccgacagtctcatgtttacggcactggcacatgggggatttctggcactccttcctagtggtattccgcatcctctgcggggaatggatcgaaaatatgtgggaatgtatgcaagaagcgaatgcatcatcatcattgtgtgttattgtcttcatattgatcacggtgataggaaaacttgtggtgctcaacctcttcattgccttactgctcaattcctttagcaatgaggaaagaaatggaaacttagaaggagaggccaggaaaactaaagtccagttagcactggatcgattccgccgggctttttgttttgtgagacacactcttgagcatttctgtcacaagtggtgcaggaagcaaaacttaccacagcaaaaagaggtggcaggaggctgtgctgcacaaagcaaagacatcattcccctggtcatggagatgaaaaggggctcagagacccaggaggagcttggtatactaacctctgtaccaaagaccctgggcgtcaggcatgattggacttggttggcaccacttgcggaggaggaagatgacgttgaattttctggtgaagataatgcacagcgcatcacacaacctgagcctgaacaacaggcctatgagctccatcaggagaacaagaagcccacgagccagagagttcaaagtgtggaaattgacatgttctctgaagatgagcctcatctgaccatacaggatccccgaaagaagtctgatgttaccagtatactatcagaatgtagcaccattgatcttcaggatggctttggatggttacctgagatggttcccaaaaagcaaccagagagatgtttgcccaaaggctttggttgctgctttccatgctgtagcgtggacaagagaaagcctccctgggtcatttggtggaacctgcggaaaacctgctaccaaatagtgaaacacagctggtttgagagctttattatctttgtgattctgctgagcagtggggcactgatatttgaagatgttcaccttgagaaccaacccaaaatccaagaattactaaattgtactgacattatttttacacatatttttatcctggagatggtactaaaatgggtagccttcggatttggaaagtatttcaccagtgcctggtgctgccttgatttcatcattgtgattgtctctgtgaccaccctcattaacttaatggaattgaagtccttccggactctacgagcactgaggcctcttcgtgcgctgtcccagtttgaaggaatgaaggtggtggtcaatgctctcataggtgccatacctgccattctgaatgttttgcttgtctgcctcattttctggctcgtattttgtattctgggagtatacttcttttctggaaaatttgggaaatgcattaatggaacagactcagttataaattataccatcattacaaataaaagtcaatgtgaaagtggcaatttctcttggatcaaccagaaagtcaactttgacaatgtgggaaatgcttacctcgctctgctgcaagtggcaacatttaagggctggatggatattatatatgcagctgttgattccacagagaaagaacaacagccagagtttgagagcaattcactcggttacatttacttcgtagtctttatcatctttggctcattcttcactctgaatctcttcattggcgttatcattgacaacttcaaccaacagcagaaaaagttaggtggccaagacatttttatgacagaagaacagaagaaatactataatgcaatgaaaaaattaggatccaaaaaacctcaaaaacccattccacggcctctgaacaaatgtcaaggtctcgtgttcgacatagtcacaagccagatctttgacatcatcatcataagtctcattatcctaaacatgattagcatgatggctgaatcatacaaccaacccaaagccatgaaatccatccttgaccatctcaactgggtctttgtggtcatctttacgttagaatgtctcatcaaaatctttgctttgaggcaatactacttcaccaatggctggaatttatttgactgtgtggtcgtgcttctttccattgttagtacaatgatttctaccttggaaaatcaggagcacattcctttccctccgacgctcttcagaattgtccgcttggctcggattggccgaatcctgaggcttgtccgggctgcacgaggaatcaggactctcctctttgctctgatgatgtcgcttccttctctgttcaacattggtcttctactctttctgattatgtttatctatgccattctgggtatgaactggttttccaaagtgaatccagagtctggaatcgatgacatattcaacttcaagacttttgccagcagcatgctctgtctcttccagataagcacatcagcaggttgggattccctgctcagccccatgctgcgatcaaaagaatcatgtaactcttcctcagaaaactgccacctccctggcatagccacatcctactttgtcagttacattatcatctcctttctcattgttgtcaacatgtacattgctgtgattttagagaacttcaatacagccactgaagaaagtgaggaccctttgggtgaagatgactttgacatattttatgaagtgtgggaaaagtttgacccagaagcaacacaatttatcaaatattctgccctttctgactttgctgatgccttgcctgagcctttgcgtgtcgcaaagccaaataaatatcaatttctagtaatggacttgcccatggtgagtgaagatcgcctccactgcatggatattcttttcgccttcaccgctagggtactcggtggctctgatggcctagatagtatgaaagcaatgatggaagagaagttcatggaagccaatcctctcaagaagttgtatgaacccatagtcaccaccaccaagagaaaggaagaggaaagaggtgctgctattattcaaaaggcctttcgaaagtacatgatgaaggtgaccaagggtgaccaaggtgaccaaaatgacttggaaaacgggcctcattcaccactccagactctttgcaatggagacttgtctagctttggggtggccaagggcaaggtccactgtgactgagccctcacctccacgcctacctcatagcttcacagccttgccttcagcctctgagctccaggggtcagcagcttagtgtatcaacagggagtggattcaccaaattagccattccattttcttttctggctaaaataaatgatatttcaatttcattttaaataatacttacagagatataagataaggctacttgacaaccagtggtactattataataaggaagaagacaccaggaaggactgtaaaaggacataccaattttaggattgaaatagttcaggccgggcgcagtggctcatgcctgtaatcccagcactttgagaggccaaggcaggtggatcacgaggtcaagagatcgagaccatcctggccaacatgatgaaactccgtctctactaaaaatacaaaaattagctgggcatggtggcgtgcgcctgtagtcccagctacttgggaggctgaggcaggagaatcgcttaaacctgggagacggaggttgcagtgagccaagatcgtgccactgcactccagcctggtgacagagtgagactctgtttcaaaaaagaaaagaaaagaaacatggttcaaattatatctaaacaaaaaagaataagaaacaaaaaacacattaaaattttaagttgtattttctatgtttctagatacatcatttttgtttgatattttcctgatgcaagtatgtggtttatcacatgtagctcttttgcatgctaaatgaaaattcaaaacttgccaataaatgaatagcttattgcagacattttttaccaacattaattattttgggtttgtttaaaacctagaggcacaatcttgacttgtcaattactaccctttcacaagctaccatctcagatatatatatatatataaattcaataaagctttctgtttgtgttcc

SEQ ID NO: 720 - DNA, 2100 bp, Homo sapiens
gtgctcagagagagagagactaagacggataacgcgtcatctcgccttcccaaattttcccccctcgctagaccgggtccaaaacctccatccggagccggcaggagaggagaacgatgtttaactcggtcaacctgggcaacttctgctctccgtcgcgcaaggagaggggcgcagatttcggcgagcgagggagctgcgcctccaacctctatctgcccagttgcacttactacatgcccgagttctccacggtctcctccttcctgccccaggccccctctcgtcagatctcctatccctactcggcccaagtgcccccggtccgggaggtctcctacggcctggagccatccggcaagtggcaccatcggaacagctactcctcctgctatgcggcggccgacgagcttatgcaccgggagtgcctgcctccttccaccgtcaccgagatcctcatgaaaaacgaaggctcctacggcggccaccaccaccccagcgccccgcacgcaacccccgccggcttctactcctcagtcaacaagaacagcgtcctgcctcaagccttcgaccgtttcttcgacaacgcctactgcggtggcggcgacccgcccgccgagcccccctgctccggcaagggcgaggccaagggggagcccgaggcacccccggcctcgggactggcgtcccgggctgaggcgggtgccgaggcggaggctgaggaggagaacacaaatcccagctcgtccggttcagcccactccgtggccaaggagccggccaaaggagccgcccccaacgccccccgcacccgcaagaagcgctgcccttattcgaaattccagatccgggaactggagcgagagtttttcttcaacgtgtatatcaacaaagagaagcggctgcagctgtcccggatgctgaacctgacggaccgacaagtgaaaatttggtttcagaacagaaggatgaaagaaaagaaactgagcagagaccggctgcagtatttctcgggaaatcctctgctgtaacctgcagaccgggcccttttgggggcggggggaggggaaaattattttattttatttttattttttattttctaactcgtcttctttccgccggtggaaaactggactgtggccagggctggcccccaccgctgtggccggcactccattccggaacctcctggaccctctatctgactctcgctgtgggacagggaccgggcctggaaagggggtgaagggaagtgtctgatgcacggcgagtgaacaccgttggcgccgaggccaagactttgatttaaaagaaaacacacctcggcgacaatgtcttgctgctcggattaggtgggggaggggcgacagtagtgagcgcctgagccgaacaatcctcgaactaaaagccttcccttgcccatgtgaaaagatccgctaagacagcatgtctgccagcggaaacttctcgagctcccccctctaccccgccccaccttgccccactactttagggggcagctaaatgtgatcctgccttgctgtgaaatttctgtaccttcaacctggtgttaggtgtgcaaagtccgtgtcctacctccgtcttcgccaaggccccgcccgagcctagttgttctccccctgaatgtgtagaaccttcctttgaaatttcttaatcggtgcattgaggtttccacatctttttccaagcagtgccccacttcatggatttatagctatagtctatgcagtcgttacctcttttttttttttttttaagaaaattgaagattggggtggtggaggcagtagggagatgggattgggcacctcccccgtgctggggcctggatttttgtaaataaatttcccaagcgtttctttccacctggagggaaagggggggacgcccccagtgagattcaaatcacgcatctctactcctctgcgtgagtgcgtgtgtacatgtgcactccccaccctgctcccttcccagagggattgctgtgaaatttttttggtggcaaataaagataaatttcattctgttcaaaaaaaaaaaaaaaaaaaaaaaaaaaaaaaaaaaaaaaaaaaaaaa

SEQ ID NO: 721 - DNA, 6284 bp, Homo sapiens
acacacacacacacggcacctgggctaggcccggacacctgtctgcagcatggataagtatgacgacctgggcctggaggccagtaaattcatcgaggacctgaacatgtatgaggcctctaaggatgggctcttccgagtggacaagggtgcaggcaacaaccccgagtttgaggaaactcgcagggtgttcgccaccaagatggccaaaatccacctccagcagcagcagcagcagctcctgcaggaggagactctgcccagggggagtagaggccctgtcaatggagggggccgcctgggcccacaggcccgttgggaagttgtgggcagcaagctgactgtggatggtgctgccaagcctcctcttgctgcctcgacaggggcacctggggcagtcaccaccctcgctgctgggcagcccccgtacccaccgcaggagcagagatccaggccatacctgcatggcacgaggcatggcagccaggactgtggttccagggagagcctggcgacttctgagatgtctgctttccaccagccaggcccctgtgaggatccttcctgcctcactcatggagactattatgacaacctctccttggcaagcccaaagtggggtgacaaaccaggagtgtcccccagcatcggcctgagtgtagggagtgggtggcctagctccccggggagtgacccaccactgcccaaaccctgcggggaccatcccctaaatcaccgacagctctccctgagctccagcaggtcttctgagggtagcctcggtggtcagaatagtggcattggtggccgcagcagcgagaagccaacaggcctttggtccactgcctcctcccagcgggtgagccctggcctgccttccccaaacttggagaacggagcaccagctgtggggcctgttcagcccaggaccccttctgtgtcagcacccttggccctgagctgccccaggcaaggaggtcttccaagatcaaactcggggctggggggtgaggtttcaggtgtgatgtccaaacccaatgtggacccccaaccctggttccaggatgggcccaaatcttacctttccagttctgccccgtcatcctcgccagctggtctggacggttcacagcagggtgcggtccctgggctggggccgaagcctggctgcacagaccttggcactggtcccaagctcagccccaccagtcttgtccatccagtgatgtccaccctgcctgagttatcttgtaaagagggtcccctgggctggtcttctgatggtagcctgggatctgtgctcctggacagccccagctcccctagggtaaggctgccctgccagcccctcgtcccaggtcctgagctgagaccctctgctgctgagttgaaattagaagccctcacccaacgtctggagcgagagatggatgctcacccgaaggctgattactttggagcctgtgtgaaatgcagcaaaggggtgtttggggctggccaggcctgtcaggccatggggaacctctaccatgacacatgcttcacctgtgcagcttgcagccggaagctgagaggaaaagccttttattttgtcaacggcaaagtgttttgtgaagaagacttcctgtactctggtttccagcagtcggctgacaggtgttttctttgtggacatctgatcatggacatgatcctgcaagccctggggaagtcctaccaccccggctgtttccgctgtgtcatctgtaatgagtgtttggatggggtgcccttcaccgtggactcagagaacaagatctactgtgtccgagattaccacaaggtgctggcccccaagtgtgcagcctgtgggcttcccatccttccacctgagggctcagatgagaccatccgtgtcgtgtccatggacagagactaccacgtggagtgttaccactgcgaggactgtggtctggagctcaatgatgaagatggccaccgctgttatccgctggaggaccacctgttctgtcactcctgccacgtgaagaggctggagaagagaccctcatctacagcccttcaccagcaccacttctagccagagccacttgcagacatcacggcaggggatgaggagccggggttgctgctgctgcttccggtggcccctggggtggaagtggggtaggggaagaggaggggcaggagggagagttcctgtgagcatgtggggggtgcctttcctttaaccagggaggtgaacactacctgcctcctgcgtgtattttccaagtgcttttctctgttgccacattttcctcaggttactcaggaaaatgctccagcatgtgcgagcacatgacctgaggttgcatcatagcaccaaaggaatcctcctgtcccctctgggaacatttcatgcttcagagggagaggtttttattgagcttgtttcacaatatccccttgaagggacagctcagctgccaatacattcaaccctttctcttccttcaggaaaatacctatacccaaatgttccctcccccgacatatatcatggcatgatttaaggcttcttttcacctgagagcttcagttcttctgcagaatggctgcaaatttaattgcattaaggcaagaaggaagctctaatgtgtgctttgtatcctaagataaatttgcttagaaaaccagagtcaagatttgaaataggtgaggcagggtttcctccttagacactgacagcattctctgtaccccttcaaatccttactctcctaaaggcagctgagtccgcgacagaaatttgccctatgtgagtaaaacatactttgggagaagaacttggtgcaggcaccaggatttttttttttgcccacgtgtttgcgctgtttttctctggagttctcaagagttggtgacttggaaggccgcttctgcaaggcaagtctcaggaacccatgcaggtacatcgcttgcacctgtttttagcttatttaatgacgggcttttgggaagagctgcccgcatactgagagacagcttcttataaacaaggagagtttttgtgtgtgcgagatctctaagccagcgtgggagggagcgcctcaggataagttattatattcatttcgttggtttctctcctgcccaattcttggcacaggcattatgtttgaagaaaccaggataaggtacactgcttttgtctgtttaatttttttagttgtttcccttcactttcagtcttccacacacaaaaaatacctcacagagcttcaccaaatcacagattcaggaggaatttggctttcacactggactcagataccttcttcagtgtgttggaaatcactggcttcacacaggcccaactccagctggtcagggcagagtgatcgtaactaaaggtcagtggggaatagatccgattcagtgcttttgccttatgcatttcagcatcctggctccccagggtggcaggagctgagggagggccacacactggcaagatttcaagaccactctctgcactgaagaggtaaaatttgcactgcaagtcacatccctgaggccagaggtcagtaccctttggtatttcgattagaagaagctgcaaaagaaaggcagcccattttaccattgccagccaggccggggacacaggagccggtgtgtgcactctgcctcctcaccttgcacccagagcaagaggactgggtgctgggctgcagaggccggtcagtggagcccctagcacgtgtgaactcaggcttttcattgggcccggctccacttctaggccatgttttgactcatttggtaaccattgcctgtaagcagcacagaattggtgccatggattatcttttccatgttgatggaattcattctgttggaatcctttggccagatgtcacttcagccagggtgtgcatcatcattggttctttttcacaggctgagcctcctgaaaacccatgaacgctggggctggggaagtgaaccctgaggtggggaccctctcttcccatcaaatcatccagctcagtgtggggcgtggcaggggggtaaatgaagccagccaatgtgttaacctgtctctgtcaacctaagaatgttggccttactgacacacctttgctccatgttcaagaccagaagtagctgggatttgtttgcaaattgggtaattagtttaaaaatctgtgattacatttttaaatgaaattttcaaagtggcctagattgaggtgattcagataggtttgcgaatataccattttatattgttgagaaagaacaaaaagggaatttccagatgtcctagaaatcctagcaacagatttctctggttgtcagtttccctggagaaggcgccagataggaatctccaatcagttgtttttctcttcgcttcaggcccttacacaaaagccatgaagagatgttcacctacccggtattttaaatgttctgtaaattattagccaaatagaactgtaatggggttgtatttatgggcgcctagaaagaaaacacaaggacttggtaggccaggaagaaaagattttaaaatttagaatgaatagcccttctgggttttctttttgacaattcttggacttgaggtaaaacaaggaggattgtggccggatttcagatcccaaagccagcctccatcttaggcctttgcctcattgtgccttttaggttttcttacccaccgtctcctgttttgtcttttttttcttttctcctacccctatcttgggacattcagaaactgcctgggtggtttgagaagagacaacccagtttgatctgcaatacaaggatccattcgtaatctctctctcactgatgttattcccccatctgccgtcttggttcatctcaccacagaagggcatttagtcctacccagccatcggctgcgtatgacagcaggatggcacttcccatttctctgtggttagtgctcgagtgaaaacctctttcagctgagtcctctgaggttctgctgttgagtcctgggtggctgatggaatgattgaggaggtctggtcaccctcaagcgccgtcatcgccttgtttccatgggcttctgtcacacaaaatgaagaacagaaatgttaggacttaagagaatgtttggaattcacacctctttgcagtcctttcaaggctgctgctctgtgctgtgtcccatgcatgtgaaagtagagctgtgatggctgctgggacgcttgcaaagatcatgtgtgagaattgagcacaagaccacaaattattactgcttgatgcgcttgttaaaactctatctgccaggaaaccaaattttcttttcttttctttttttttttgagacagggcctcactctgttgcccaggctggagtgcagtggcgcgatctcagctcactgcagcctccacctactgggctcaagtgatcctcccacctcagcctcccgagtagccgggaccacaggcgtgtatgactggctacgcctggctaatttttgtatttttaatagagacgagtttcaccatgttgcccaggatggtctggaactcctgggctcaagtgatctgcccacttccgcctcccaaagtgttgggattatggccattagccactgtacctggcacaatttttttttgtaccctcctttatgccaagaatcagtcctaatttctttactatgtgaagtaacttttaaaggtaatagaaaaggccaggcacagtggctcatgcctgtaatcccaggcgccgtggctcacgcctgtaatcccagcactttgagaggctgaggcgggtggatcacttaaggtcaggagttagagaccagcctgaccaacatggtgaaacactgtctctactaaaaatacaaaattagctgggtttggtggcgcacgcctgtaatcccagctacctgagaggttgaggcaggagaatcgcttgaacctgggaggcagaggttgcagtgagccgagatggtgccattgcactccgacctgggcaacagagcgaaacactgtctcaaaaaaaaaaaaaaaagtaacagaaaaaagagtgaaatatattagctatcttttattctgagccaaaacttgacagatgtgggaaatcttcatatagtgtatgaaaatttcattgtacagggaaattattttcctctgtgtcttttcttttactataaagtgattcagaattttactgttactataaaattatgcaaagtattgtgacaaaactgcatcaatttgttgactattaaagtgctccttgaacatta

SEQ ID NO: 722 - DNA, 2708 bp, Homo sapiens
gccgcgggggcgggcgccggtaggggccggacagggtagggcccggagggcggtggcggcggagcgggcggcatgggtcctggccgccggcttcgctgagacgcgctcgcgtgggctgccctcccgggcccgcagtggtcgcggcggcatgaagggcgctctggggagtcccgtggctgccgctggcgccgcgatgcaggagagtttcggctgcgtggtggccaaccgcttccatcagctgctggacgacgagtcggacccgttcgacatcctgcgcgaggccgagcgccggcgccagcagcagctgcagcgcaagaggcgcgacgaggcggcggcggcggccggggccggtccccgcggcggcaggagcccagccggggcctcgggccacagagccggcgcgggcggccggagggagtcgcagaaggagcgcaagagcctcccggcgcccgtcgctcagcggcccgatagccccgggggcggcctgcaggcgccgggccagaagcggactcctagaagaggggagcagcaaggatggaatgacagccgtgggccggaggggatgctcgaaagagctgagcggagatcctacagggaataccgaccctatgagacagagaggcaggcagacttcacagctgagaagtttccagatgaaaaaccaggtgataggtttgatcgagacagaccgttgagaggacgtggaggcccgagagggggtatgcgcggcagaggcagaggtggccctgggaacagagtttttgacgcttttgaccagagaggaaagcgagaatttgaaagatatggtgggaatgacaaaatagcagtcagaactgaagacaacatgggtggatgtggagttcgaacctggggatcgggtaaagataccagtgatgtggagccaactgcaccgatggaggaacccacagtggtggaggagtcccagggcaccccggaagaggagtctccagccaaagttcctgagttggaggtagaagaagaaacccaagttcaagagatgactttagatgagtggaaaaatcttcaagaacagaccagaccaaagcctgagtttaacatccggaaaccagaatccactgttccttccaaagccgtggtgattcacaagtcaaaatacagagatgatatggtaaaagatgactatgaggacgattcccatgttttccggaaacccgccaatgacatcacatcccagctggagattaattttggtaacctccctcgtcctgggcgtggagccagaggaggcacccggggaggccggggaaggatcaggagggcagagaactatggacccagagcagaagtggtgatgcaagatgttgcccccaacccagatgacccggaagatttccctgcgctgtcttgaaagagccctgtttcccagcaccgcggagctgcactgcacacctgtggggagacttttccagctgggccaagggagtcagactctaagaacaatagatgttgcttttcccgtgtcatgtaaatttgttgcacttttttgggctgagctgttagaggggcttctccagaggctcgagagcaggccatttcccaagaagatgaagaatggtgactgtgtttttattgaaggaatttcaaatgaagaataatgtttaaaatgtgtatatagagatagtatagactcctccgcggaagcatggagggaaaggaggttgtaaaatagactccatggagactcttaggaagcagtagattcccgggggctgtgcctttagcgttagaggaaacacatagagctggaactgttaatggaaagcagtcacagctgagttttcggagaccaagaaattaaaatacaattgcacttactgtttacttgtaaatgttatcttctctcctggaatattttgagttctggttttcacttaaccaatcatttaaaaatcgctattgtgtagccactggccaccactctgtgacacagaatcagagaaagcgttgatttttaatggtgatttaaactacctcgtggtttctgtgtgtgtgcacacacacatctagtgtttgggtggtttttaggaagaatattaagtatgtgacttcaaaaaccatgttatttaacctgccaatcaaatggaaagggatcatggcaaaagcaaataccgcatccttttcttccgcagaactagagtcagagttcggcagctgcgtacaaaggcctctgccctcggcttgagcaaaagttgtaaataactagtatttattaagcacttataagcagtttttctcacttagtcctggctccagttctagagttcctctttattgcttttggtgaaagtttggggttgggggtacacctcagaggttcagtaattcacctggagtcccaccctgaacagagctggacccagagccacacacgcccgggaacacacactgtgctggggaggaagtgggcctaggagggcctgcaggtccaggcagctgtagagctgctagaagctggggtgttgctctccccgctttctcatagacacagaggtactgtctgcctgttgtcacacagttcatatgctcgcttgagatggaatctgaaccttggtcccaggatctgtgctttttcccactttgccacactgtctaaggtggctttgaactggaacccaagtgcaaataaaggttggtattcgctcctgaaaaaaaaaaaaaaaaaaaaa

SEQ ID NO: 723 - DNA, 1952 bp, Homo sapiens
gcctctggctgctctgttaacgtgtcccgcgagcgaggcgcgtcgcaaaaggtcgcggcggaacttccctgcgcttttcagaccatactctttacggtactaggcactgctgagctgggagatgtcggcggcgtgttgggaggaaccgtggggtcttcccggcggctttgcgaagcgggtcctggtgaccggcggtgctggtttcattgcatcacatatgattgtctctttagtggaagattatccaaactatatgatcataaatctagacaagctggattactgtgcaagcttgaagaatcttgaaaccatttctaacaaacagaactacaaatttatacagggtgacatatgtgattctcactttgtgaaactgctttttgaaacagagaaaatagatatagtactacattttgccgcacaaacacatgtagatctttcattcgtacgtgcctttgagtttacctatgttaatgtttatggcactcacgttttggtaagtgctgctcatgaagccagagtggagaagtttatttatgtcagcacagatgaagtatatggtggcagtcttgataaggaatttgatgaatcttcacccaaacaacctacaaatccttatgcatcatctaaagcagctgctgaatgttttgtacagtcttactgggaacaatataagtttccagttgtcatcacaagaagcagtaatgtttatggaccacatcaatatccagaaaaggttattccaaaatttatatctttgctacagcacaacaggaaatgttgcattcatgggtcagggcttcaaacaagaaacttcctttatgctactgatgttgtagaagcatttctcactgtcctcaaaaaagggaaaccaggtgaaatttataacatcggaaccaattttgaaatgtcagttgtccagcttgccaaagaactaatacaactgatcaaagagaccaattcagagtctgaaatggaaaattgggttgattatgttaatgatagacccaccaatgacatgagatacccaatgaagtcagaaaaaatacatggcttaggatggagacctaaagtgccttggaaagaaggaataaagaaaacaattgaatggtacagagagaattttcacaactggaagaatgtggaaaaggcattagaaccctttccggtataatcaccatttatatagtcgagacagttgtcaaagaagaaagttatcctacctcgccaagtggtatgaaattaagtgaccaaatgaagtgcactcttttcttttggaattagattcatgactttctgtataaaattcaaatgcagaatgcctcaatctttgggagagtttcagtactggcatagaatttaaatgtcaaaattctttctgaaaccctttctcctagaaactaggaaataataggtgtagaagactctccctaagggtagccaggaagaagtctcctgattcggacaaccatgaggggtagtggtgctagggagaaggcaaccttcactggttttgaactcagtgcctaagaaagtctctgaaatgttcgtttttaggcaatataggatgtcttaggccctaattcaccatttcttttttaagatctgatatgctatcattgccttaataatggaacaaaatagaagcatatctaacactttttaaattgataattttgtaaaattgattacgttgaatgctttttaagagaagtgtgtaaagtttttatattttcacaattaacgtatgtaaaaccttgtatcagaaatttatcatgtttactgtttaaaatgattgtatttataaaattgtcaatatcttaatgtatttaatgtagaatattgctttttaaaataatgtttttattttgctgtagaaaaataaaaaaaaatttgattataaaaaaaaaaaaaaaaaaaaaaaaaaaaaaaaaaaaaaaaaaaaaaaaaaa

SEQ ID NO: 724 - DNA, 2719 bp, Homo sapiens
gggtgggggaaaggaaccggaaacgggatggggagctggaccagcagattatgagcttacagaaagcctggcctacattttactctttttggatttcttcctcatcaagagactgctgcagtgcctgtcatgtgacagcggcatggacatatgccccaggctttcctgctggggtccatccatgagcctgcaggtgccctcatggagccccagccctgccctggaagcttggctgagagcttcctggaggaggagcttcggctcaatgctgagctgagccagctgcagttttcggagcctgtgggcatcatctacaatcccgtggagtatgcatgggagccacatcgcaactacgtgactcgctactgccagggccccaaggaagtactcttcctgggcatgaaccctggaccttttggcatggcccagactggggtgccctttggggaagtaagcatggtccgggactggttgggcattgtggggcctgtgctgacccctccccaagagcatcctaaacgaccagtgctgggactggagtgcccacagtcagaagtgagtggtgcccgattctggggctttttccggaacctctgtggacagcctgaggtcttcttccatcactgttttgtccacaatctatgccctctgcttttcctggctcccagcgggcgcaaccttactcctgctgagctgcctgccaagcagcgagaacagcttcttgggatctgtgatgcagccctctgccggcaggtgcagctgctgggggtgcggctggtggtgggagttgggcgactggcagagcagcgggcacgacgggctctggcaggcctgatgccagaggtccaggtggaagggctcctgcatccctctccccgtaacccacaggccaacaagggctgggaggcagtggccaaggaaagattgaatgagctggggctgctgccactgctgttgaaatgagtgcccttggggccttgcatgggacacattcaagacctcgaagtcattcttggccaagcagatgacaacacatctcctggactggagcaaaaggtccttctgtgcaccctggtcgctgggaaacgtattctttgatctgttgaactgtcttccaacctgccatggcagttttgacactactcctgtttgccctcctgattcctgctttctttaccttttaacattgcccctttcaggggaccccactttgtagggaatctgcagaaggtgtgcttttgcacttgcagactgctctacctcagtgtttccttgggagactttattcagctgagagtgccctagacagtaacttctaaggtcacgtttactatttcagaggaaatatcttgccaggatacctacccatccttatagaacagttacctttagctgacccctttcctcacagggaccaagacaaagcatgggacatgaaattaagagtgaacttcttatgggaggctgcagctggatcagaggaaaaatccagtgtgacagagtgcaagtcagaagacctggcttttcatcccagctttgaaacttggaactttttgattgacaaattaataaacctctctatgcctcaggctcctcatctgtaaaacagggatgcctaccttatggggttggtgtgaggattaactgagatcacacttgaaagtgccttgcatgggcttggcatgtgggtgctcattacatagtcttcttgttttcttgcctctgggttgaggattcacagcactgcactacaagggtagcccctctccattctggataccttgctaggagagagtctgggcttccacctgcggccagggtgaagggaaaattcttgccatgtcagagatggatcaatgactatgaaaaaactagcctgtgattttttttcactctaagcattaagagctcctaaagccttttgtcttgttacttttttccccctcttgcatgctagaggtggaaggtagtcatttagatttcccccctcttccctcttcattgttggccaggggttctcttgggcagctgggggaaggatgtagtagatctctcttttttttttttttttgagatggagtctcatgctgttgcccaggctggagtgcagtggcatggtctcagttcactgcaacatctgctttcccggttcaagtgattctcctgcctcagcctcctgtatagctggaattacaggcatgtgccaccacgcctggctaatttttgtatttttattaaagacagtgtttcaccatgttggccaggctggtctcaaactcctgacttcaagtaatccacctgtcttggcctcccaaagtgctgctgcctggctggatgtagcagatctccaattgccttaccaaacctgcagggtctctgttaagtgtctgttaggggtcttatatgatactctggacaccgtgagaaacaggtgatggggcagatgggaacctggtatccaactcattttttatgtctgctgaatggttgactgggtgcccctttggtaagggctgggaaagtgaaccaagttgggagcagagcaggtcttgagaccaccttaatgaggaacacatggtctacttcctatctcctgggacacaggtcatttccagcttccagaattagtaagatttttcatataaatcctcccctacttcattgtataataaagaatttggcctttgtcttcagttcctgaaaaaaaaaaaaaaaaaaa

SEQ ID NO: 725 - DNA, 3430 bp, Homo sapiens
gggcgcggcgggccgggccggcgggcggcggactatgaggcgcccaccatggtgcgatgcgaccgcgggctgcagatgctgctgaccacggccggagccttcgccgccttctcgctcatggccatcgccatcggcaccgactactggctgtactccagcgcgcacatctgcaacggcaccaacctgaccatggacgacgggcccccgccccgccgcgcccgcggcgacctcacccactctggtctgtggcgggtgtgctgcatcgaagggatctataaagggcactgcttccggatcaatcacttcccagaggacaatgactacgaccacgacagctcggagtacctcctccgcatcgtgcgagcctccagcgtcttccccatcctcagcaccatcctgctcctgctgggtggcctgtgcatcggtgctggcaggatctacagccgcaagaacaacatcgtcctcagtgccggcatcctcttcgtggctgcaggcctcagtaacatcatcggtatcatcgtctacatttccagcaacacaggtgacccgagtgacaagcgggacgaagacaaaaagaaccattacaactacggctggtctttttactttggagctctgtctttcattgtggctgagaccgtgggcgtcctggctgtaaacatttacattgagaaaaataaagagttgaggtttaagaccaaacgggaattccttaaggcgtcttcctcttctccttatgccaggatgccgagctacaggtaccggcgacggcgctcgaggtccagctcaaggtccaccgaggcctcgccctccagggacgtgtcgcccatgggcctgaagatcacaggggccatccccatgggggagctgtccatgtacacgctgtccagggagcccctcaaggtgaccaccgcagccagctacagccccgaccaggaggccagcttcctgcaggtgcatgactttttccagcaggacctgaaggaaggtttccacgtcagcatgctgaaccgacggacgacccctgtgtgagccgcctgccctttctctccgctccagcctctccccagaacggctctttttgtcacacaggatggcatgtgatcctcaagacgacgaacaatgaactaaagccaaatgcagccctccctggcctccagaggtggcgtgggctggctttgcacgaaggttgtgctgggagaccggacccggggctgcagaagaagctgaaggctgactttgtcccctccccgaaaaagggtgttttgatgcctcagggtctctgaaatctcccgggaagccccagagctttcctgaggctgcctggccttgatcaacttgggaagacaaaattgagccattatctcctcttggaaacgaatcttgccagaaaaacgggatttcagggccttccctccctgcctgggtgtcgggccaccagaaggctctgccggacgccaagaagacggtctctgggctcttgtcagctgcttttgaacctgaggttcctgcgtcgttgagccagaaatcagaccaccgaagctcactcccttcctctccatctctccctctctccaagactctggcagtggcctatgatcctgaagacagctctgcagccaactggtgctttggcctttgcgctgtcccggggccagcttccctcgacctggggaggccgtggcctgtggaggaggcccaggtaaaggctgggggctgttgctggctatcctctttgcttctggaagtttctgcctcactcagaatgggcaggacagacccactgactggacttcagagtctggagggttccatcggtcaggggaatggcggccacgtgacctcttgccgtgccccttgtcatagacccaaggagcaactctgtcccctgagcgttgggggtcccgggggagaggtggacagacacctccctccaactggcatttggcaacaggagcctggacttctgtgcaagaaagggagacctaagggtgaacagtggccaataaaaaccctagagaacaaacatccatttcctaggtggttacaaatcataacttcctgcaaatcaacgccaggagagcaacttaccttcatttctttgtcttaaaaagtagcagcaactggccccacaactcctgtcattgtaagttattctgccaccacctaacaggacggagtggagtgagtttggataaacggaccgagctgggcttctcttcctccctacagaggggagatctcagcactttgtccggagctgaggaagtggtttctgtgttttacagtttttccagccattcttttcttccccctcctgaagcaagcaaagagcgtggaggcgtgtgcaggcttggaagaagaactctccagaacatggaacttaaccctcttttgtataaaacatgtgctttctaaagaaaaattgtttcttattttttgagactccttgatccaccctggaacagtcgcctgtagtcctggtagctgttgtgcttggaaataacgagcgcatccttgcctcagctacctgctcacagcccatgggtggactcggccccctggggttcagacccaggtccgttcggcctagtgatgatgtcatcgtccatcccatcttcctttgcccccaggaaaggacgcatccaccggtagcggccccagctgactgtcgccgtgtgctggggatctgaaatgaggcctgccagggcccctgtgtgctgtgctccagagccttcgctcccatcagggttggcatcatctgatggcatgtccaagtgtgcccagcagcggatgctgaagcaccagagctcaaggccttcacctgctctaggccagccctgtcaccacctccactgccatgaccaggccgaaggcagggaacgccctccccagtcccgctgtccagcaaggccccgagacttttcttctgtgatttccaaaagcaaggcagccgtgctgttctagttcctctccatccgccacctcccctcccgctgccccagaagtttctatcattccatggagaaagctgtgttccaatgaatcctacctcttgcccagtcccaggcagagtaagcagggcccacctagggaccaagaaagagtaggaagaaggggacgagccgggagcaaaaccacctcagacacccgggccttctcagccttctccccgcggccagctgggtctccggggaccctgggccctgggccgcccattcctggccctcccgctgcatctcagacctgacacccaacggggggatgtggtggcctgtgcccaccttctctccctcctcccgacccgccccctcgcccccacccctgtgtgtttcgccagttaagcacctgtgactccagtacctactactggttttgggttggttgttctgtcttttttttaattaaataaaaacatttttaaaatgtt

SEQ ID NO: 726 - DNA, 4601 bp, Homo sapiens
cgggccggggcgcgcaggtcccgtcgccggtgagcacgggctccctctcgcgtggcctcgccgggtccgcctggcctgcccacctccggagccacctctgcccccgcatgggctggcgaagttgggaggagcgagctggagccagagcgcgcgccgggcgcgccccgtcgctgcctgactcggcgcccgcagttcgggcgcagcacgccggccgcaggagcacggatgccccccggagccgcgggctggcaggtctggggtcctgaggctgctggcagactatgggtacaacggccagcacagcccagcagacggtctcggcaggcaccccatttgagggcctacagggcagtggcacgatggacagtcggcactccgtcagcatccactccttccagagcactagcttgcataacagcaaggccaagtccatcatccccaacaaggtggcccctgttgtgatcacgtacaactgcaaggaggagttccagatccatgatgagctgctcaaggctcattacacgttgggccggctctcggacaacacccctgagcactacctggtgcaaggccgctacttcctggtgcgggatgtcactgagaagatggatgtgctgggcaccgtgggaagctgtggggcccccaacttccggcaggtgcagggtgggctcactgtgttcggcatgggacagcccagcctctcagggttcaggcgggtcctccagaaactccagaaggacggacatagggagtgtgtcatcttctgtgtgcgggaggaacctgtgcttttcctgcgtgcagatgaggactttgtgtcctacacacctcgagacaagcagaaccttcatgagaacctccagggccttggacccggggtccgggtggagagcctggagctggccatccggaaagagatccacgactttgcccagctgagcgagaacacataccatgtgtaccataacaccgaggacctgtggggggagccccatgctgtggccatccatggtgaggacgacttgcatgtgacggaggaggtgtacaagcggcccctcttcctgcagcccacctacaggtaccaccgcctgcccctgcccgagcaagggagtcccctggaggcccagttggacgcctttgtcagtgttctccgggagacccccagcctgctgcagctccgtgatgcccacgggcctcccccagccctcgtcttcagctgccagatgggcgtgggcaggaccaacctgggcatggtcctgggcaccctcatcctgcttcaccgcagtgggaccacctcccagccagaggctgcccccacgcaggccaagcccctgcctatggagcagttccaggtgatccagagctttctccgcatggtgccccagggaaggaggatggtggaagaggtggacagagccatcactgcctgtgccgagttgcatgacctgaaagaagtggtcttggaaaaccagaagaagttagaaggtatccgaccggagagcccagcccagggaagcggcagccgacacagcgtctggcagagggcgctgtggagcctggagcgatacttctacctgatcctgtttaactactaccttcatgagcagtacccgctggcctttgccctcagtttcagccgctggctgtgtgcccaccctgagctgtaccgcctgcccgtgacgctgagctcagcaggccctgtggctccgagggacctcatcgccaggggctccctacgggaggacgatctggtctccccggacgcgctcagcactgtcagagagatggatgtggccaacttccggcgggtgccccgcatgcccatctacggcacggcccagcccagcgccaaggccctggggagcatcctggcctacctgacggacgccaagaggaggctgcggaaggttgtctgggtgagccttcgggaggaggccgtgttggagtgtgacgggcacacctacagcctgcggtggcctgggccccctgtggctcctgaccagctggagaccctggaggcccagctgaaggcccatctaagcgagcctcccccaggcaaggagggccccctgacctacaggttccagacctgccttaccatgcaggaggtcttcagccagcaccgcagggcctgtcctggcctcacctaccaccgcatccccatgccggacttctgtgccccccgagaggaggactttgaccagctgctggaggccctgcgggccgccctctccaaggacccaggcactggcttcgtgttcagctgcctcagcggccagggccgtaccacaactgcgatggtggtggctgtcctggccttctggcacatccaaggcttccccgaggtgggtgaggaggagctcgtgagtgtgcctgatgccaagttcactaagggtgaatttcaggtagtaatgaaggtggtgcagctgctacccgatgggcaccgtgtgaagaaggaggtggacgcagcgctggacactgtcagcgagaccatgacgcccatgcactaccacctgcgggagatcatcatctgcacctaccgccaggcgaaggcagcgaaagaggcgcaagaaatgcggaggctgcagctgcggagcctgcagtacttggagcgctatgtctgcctgattctcttcaacgcgtacctccacctggagaaggccgactcctggcagaggcccttcagcacctggatgcaggaggtggcatcgaaggctggcatctacgagatccttaacgagctgggcttccccgagctggagagcggggaggaccagcccttctccaggctgcgctaccggtggcaggagcagagctgcagcctcgagccctctgcccccgaggacttgctgtagggggccttactccctgtccccccacccacagggccccacgcaggcctggggtgtctgaggtgctcttggctgggagcggccctgaggggtgctggccttgaaatgattcccccacttcctggagagactgagcggagttgggagcctttttagaaagaactttttataggacagggagacagcacagccatcccttgcaaaccaccaaggtgtgtggctgacctccagggaggagcactcactggagtgctcacaaggtgcacactgctgtgtgtaccttgcagacaggccggcgttcagcctccaaggggctcactcccccagttgccaaacactgtggatctctctgtcctcttctcccctctctcagattggcctggcagcccctggcacagagcagacccggccactggtagctccccacttccttactcctgctgctctgccattgccgctccccttgttgctgcccaagcactgccctcgggcgtctggcagcctgaggtgggtggaggggacagtgttctggatagatctattatgtgaaaggcagcttcacccagttttctggactctcatgcccccatctccgacctgggagacttcaggaatgacaacctacccagcctggtggggctggcaggatggtggaggtttctcaaggagctggagacttcagggagcccctctcatggggaggaaagagcttccagggggcgaacgcagcacagaggaagaggcctgctccacttgtctgggaacctgggcaggaggcacagaggaagccaaggcctggagctgcaggtcccccggcatctctctctgtcccggcagcccaggatggcctggtgcccccacctgctgcagcaggagccccaaggagtgctagctgagggtggttgctggggtggtcctcatggacagtgaggtgtgcaagggtgcactgagggtggtgggaggggatcacctgggttccaggccatccttgctgagcatctttgagcctgccttccggtgggagcagaaaaggccagaccctgctgagttagaggctgctgggatccactgtttccacacagcgggaaggctgctgggaacaggtggcagagaagtgccatgtttgcgttgagccttgcagctcttccagctggggactggtgcttgctgaaacccaggagctgaacagtgaggaggctgtccaccttgcttggctcactgggaccaggaaagcctgtctttggttaggctcgtgtacttctgcaggaaaaaaaaaaaaggatgtgtcattggtcatgatatttgaaaaggggaggaggccgaagttgttcccatttatccagtattggaaaatatttgacccccttggctgaattcttttgcagaactactgtgtgtctgttcactaccttttcaggtttattgtttttatttttgcatgaattaagacgttttaatttctttgcagacaaggtctagatgcggagtcagagatgggactgaatggggagggatcctttgtgttctcatggttggctctgactttcagctgtgttgggaccactggctgatcacatcacctctctgcctcagtttccccatctgtaaaatgggagaataatacttgcctacctacctcacaggggtgttgtgaggattcatttgtgattttttttttttttgtacagagcttttaagcattaaaaacagctaaatgtgaaaaaaaaaaaaaaaaaaaaaaaaaaaaaaaaa

SEQ ID NO: 727 - DNA, 4361 bp, Homo sapiens
cttccccgccccacggaaaggggaggagcttgggctgtttgaatggctttgggatggagcaggggagagagtggctccgtttgcctccccgctttggtgatgctgtgcgagcggcttcgggggccctggagacgtccgagtcactgagggtgggctgggactcggggcccgcgtcccatctccccgccgattggtccgccccccgtgcgagtgtaacacagccagcctcgaagacttccctctgagttggaatgataatgaccgaatcccgagaagttatagacttagaccccccagctgagacttcccaggagcaggaagaccttttcatagtgaaggtggaagaagaagactgcacctggatgcaggagtacaacccgccaacgtttgagactttttaccagcgcttcaggcacttccagtaccatgaggcttcaggaccccgggaggctctcagccaactccgggtgctctgctgtgagtggctgaggcccgagctgcacacgaaggagcagatcctggagctgctggtgctggagcagttcctgaccatcctgcctgaagagttccagccctgggtgagggaacatcaccctgaaagtggagaagaggcggtggccgtgatagaaaatatacagcgagaacttgaggaacgcagacagcagattgttgcctgccctgatgtgcttcctcggaagatggcaacacctggagcagtgcaggagtcctgcagcccccatcccctgaccgtggacacccagcctgagcaagcgccacagaagcctcgtctcctggaggaaaatgcccttcctgttctccaagttccttcccttcccctgaaggacagccaggagctgacagcttcacttctctcaactgggtcccagaagttggtgaaaattgaagaggtggctgatgtggctgtatccttcatcctggaggaatgggggcatttggaccagtcccagaagtccctttatagggatgacaggaaggagaactatgggagtattacttccatgggttatgagtccagggacaatatggagctcatagtgaagcagatttctgatgactctgaatcacactgggtggcgccagaacacaccgaaaggagcgttcctcaggatccagactttgcagaagtcagtgaccttaaaggcatggtacaaaggtggcaggtcaaccccactgtggggaaatcaaggcagaatccttcccagaaaagggatctggatgcaatcacagacatcagccctaagcaaagcacacatggcgagagagggcacagatgcagcgattgtggcaaattcttcctccaagcctcaaactttattcagcatcggcgcatccacactggagaaaaaccgtttaagtgcggagaatgtgggaagagctacaatcagcgggtgcacctcacccagcaccagcgcgtccacacaggggagaaaccctacaaatgtcaggtgtgcggaaaggctttccgggtgagttcccacctggttcagcaccacagtgtccacagcggagagaggccctatggctgcaatgagtgtgggaagaacttcggtcgccattcgcatctgatcgaacacctaaaacgccacttcagggagaaatcccagagatgcagtgacaaaagaagtaagaacacaaaattaagtgttaagaagaaaatttcagaatattcagaagcagacatggaactatctggaaaaacccaaagaaatgtttctcaagttcaagattttggagaaggctgtgagtttcaaggcaagctggatagaaagcagggaattcccatgaaagagatactaggacaaccatcttcaaagaggatgaactacagtgaagtcccatatgtccacaaaaaatcctccactggagagagaccacataaatgtaacgagtgtgggaaaagcttcattcagagtgcacatcttattcaacatcaaagaatacacactggggagaaaccattcaggtgtgaggaatgtgggaaaagctacaaccaacgcgtgcacctaactcagcatcagcgcgtccacacaggtgagaagccctacacctgtcccttatgtgggaaagccttcagagtgaggtcccaccttgttcagcatcagagcgtgcacagtggggagagacccttcaagtgtaacgaatgtgggaaaggctttgggaggcgttcccacctggctggacatcttcgactccactcccgagagaaatcccatcagtgtcgtgaatgtggggaaatcttttttcagtacgttagcctaattgaacatcaggtgctccacatgggtcagaaaaatgaaaaaaatggcatctgtgaggaagcatatagttggaacttgacagtgattgaagacaagaagattgagttacaagagcagccttatcagtgtgatatctgtggaaaagcctttggttatagctcagacctcattcagcattacagaactcatacagcagagaagccctatcaatgtgatatatgtagagaaaatgttggccagtgttcccacaccaaacaacatcaaaaaatctactccagcacaaaatcccatcaatgtcatgaatgtggcagaggcttcactctgaagtcacatcttaatcaacatcagagaatccatactggtgagaaaccttttcaatgtaaagaatgtggaatgaatttcagctggagttgtagcctctttaaacacctgagaagccatgagaggacagatcccataaataccttaagtgtagaggggtctctgttgtagaatagctcttaattttagagaaaccttcctggagggaaaccatactcctataatgagcaaagtaacaacttcaagcatttttccagcgttaccatcaaactcacaaataggttgaaatcctttagttataactcagcctttaggaacaccggagaacccacaataatagaaatcttttcgtgttccccattgagaaatgctttagttagcatcttcatgcttggaaatctagacaagaagagaatccatggatggacatggtcgaggaattcggaaagcctgcagttgacattcagtcttcacttgaaactcaaaactgacactaggaacagcttcatgagttcagtagaagtaagctttatttgtagcttctgccttgtttgacggcgtatctattcagggaagcgcacagtaaaagaattccttagcatgatgtctgttttggtacctcagcaatgaaccttttctagaaattattattccaaccactagaataccctagtcactattcccactttgagcattaacccctttgaaaagaaatggacttaaagtatctctgttttggcaaaattcaggttcaggggctggatggtatgtgtttctgctgccttattcaatccaccacttctctgtgaaacactctaccttgtttttggtttgattctactgatgtcagggtttagccggtagaaggagtagttcagtttgtcaattcaggagaaactgtactggtcagtcacatcttacggcgaagggagagggaccttaggggagcagagaagacaggcaaagttgtggactgtttgatcttgtattacccacaggaatgagggcagctaaacccatagaaggagttggaccaaggcgaattacgagtcctggtcccagcagtatgtgtgctgacttctgggtgccccagaaatagacctctcctgtagagtggtgatatacagaatgagtttcagtttgcattgcagctgggattgaaagtaatcagtcgtgagcaggcaggcaggaggtcctgttagccctgccttccaggaaggttggggtgggagttttgagtgggaaagaggatgacatgtgtgagagagttctgagcctgtttgctagggagagtgagtgagtgctcttgggcactgctcaggccgtttctgctgacttgcctggcttacaataaatgcccaataaatatttgttgaccatatgtgttgtacactgtggtgccctgtccagtcccctctaccaagctgagacccccatccccagctgctctgagtttgggctgcaagtgctcacagctcttgttctccagaaactggagaattgccctcaggagatgagagccatctcacctcacccaggagtcacttcctctctacaccccaacacctggttcatttgattaaagcggagaaaactccagggtgctatgactgctctggcacccttggatcaggccaagctagactttttctgagccttcatccgtgctaagctctctcccttctctatcctgtttcattccctccctcaaaggcgtttcccaaataaatcacactgtcaatcaaaaaaaaaaaaaaaaaa

SEQ ID NO: 728 - DNA, 3334 bp, Homo sapiens
gcacgagccccgggctgccggcgcgggcgccgcggcacgtccacaggctgggtcgcgaggtggcgatcgctgagaggcaggagggccgaggcgggcctgggaggcggcccggaggtggggcgccgctggggccggcccgcacgggcttcatctgagggcgcacggcccgcgaccgagcgtgcggactggcctcccaagcgtggggcgacaagctgccggagctgcaatgggccgcggctggggattcttgtttggcctcctgggcgccgtgtggctgctcagctcgggccacggagaggagcagcccccggagacagcggcacagaggtgcttctgccaggttagtggttacttggatgattgtacctgtgatgttgaaaccattgatagatttaataactacaggcttttcccaagactacaaaaacttcttgaaagtgactactttaggtattacaaggtaaacctgaagaggccgtgtcctttctggaatgacatcagccagtgtggaagaagggactgtgctgtcaaaccatgtcaatctgatgaagttcctgatggaattaaatctgcgagctacaagtattctgaagaagccaataatctcattgaagaatgtgaacaagctgaacgacttggagcagtggatgaatctctgagtgaggaaacacagaaggctgttcttcagtggaccaagcatgatgattcttcagataacttctgtgaagctgatgacattcagtcccctgaagctgaatatgtagatttgcttcttaatcctgagcgctacactggttacaagggaccagatgcttggaaaatatggaatgtcatctacgaagaaaactgttttaagccacagacaattaaaagacctttaaatcctttggcttctggtcaagggacaagtgaagagaacactttttacagttggctagaaggtctctgtgtagaaaaaagagcattctacagacttatatctggcctacatgcaagcattaatgtgcatttgagtgcaagatatcttttacaagagacctggttagaaaagaaatggggacacaacattacagaatttcaacagcgatttgatggaattttgactgaaggagaaggtccaagaaggcttaagaacttgtattttctctacttaatagaactaagggctttatccaaagtgttaccattcttcgagcgcccagattttcaactctttactggaaataaaattcaggatgaggaaaacaaaatgttacttctggaaatacttcatgaaatcaagtcatttcctttgcattttgatgagaattcattttttgctggggataaaaaagaagcacacaaactaaaggaggactttcgactgcattttagaaatatttcaagaattatggattgtgttggttgttttaaatgtcgtctgtggggaaagcttcagactcagggtttgggcactgctctgaagatcttattttctgagaaattgatagcaaatatgccagaaagtggacctagttatgaattccatctaaccagacaagaaatagtatcattattcaacgcatttggaagaatttctacaagtgtgaaagaattagaaaacttcaggaacttgttacagaatattcattaaagaaaacaagctgatatgtgcctgtttctggacaatggaggcgaaagagtggaatttcattcaaaggcataatagcaatgacagtcttaagccaaacattttatataaagttgcttttgtaaaggagaattatattgttttaagtaaacacatttttaaaaattgtgttaagtctatgtataatactactgtgagtaaaagtaatactttaataatgtggtacaaattttaaagtttaatattgaataaaaggaggattatcaaattcatatatgataaaagtgaatgttctaagtctctcaaactagcgttttatgtaataatatgtaatataaataaaactatggtaaatgtgacaagcatttaataggaaaatgctaaggaggcctcataaatgacccataattaccaacgtagaatttttcagtacatttagggttgctggatttagcaaataaaaataaagattgcccagttagatttgaatttcagataaacaattagttttttaatattttacatggaatatttggaaaatacttatactaaaaaattatttgtttgaaattcacatttaactgggagtcttgtattttatctggcaatcctaaaatacattggtatgaaacaaatcacttttagaagtatattgctattttgattgggttgtttttgtgtgtagaaacgtacaataacaactcaaaggcacaggagatttctaaacattgtgaaaagttgaatagattatatatttattctcataatactttcactaatactaaataaaatttggggaacactttttatttttatataatttccaatttacagaaaagtttcaaaaatagtacaaagagctctcttacccagattcactaattgttcatacgtgctttatctttcatgctttctctgtacacacacacacacacacaaatttttcctcaatcatttgaaagtcagttataggcatcatgccccttaaaccctaaatacttcagtgtgtaatactgaataattactaaaaatgattttctcagaaaaaaaaactcccacaattctggaactataatactgtaagccttagaataaataatactttcaagttccaatctaaagttctttttgagttttgttgcccgttttatgcttgatgtgtatagtaatagggtaggctatttattttattaaaattttttttagagacaaggttttgctgtgttgcccaagctggaacttgaacgactgggctgaagtgatcttcccacctcagcctcccaagtagctgggaatacaggtgtctgccaccatacccagtttcatttttgttttttatacccgaagttcatttcctttgtctccctaaaactgaactgtaattttgggaggttttcattagtggaagctcttcatttataaagctatttgaaggggtttaggaatttatatcacatggtaattgtagagaaaaagaagctatatacctcaaaatcgtgccctctttacatatgtcttatcaggtataacatgttgaaatgtcacattagtagtaaagtggggtttatttatatagtggttaagaaatgtcagtttacactgctgtatacttcttcttctgtgtccctaaggcctggtacagtgccaagcacatacttggtatccaataaatatttgttggatgaaaaaaaaaaaaaaaaaaaa

SEQ ID NO: 729 - DNA, 7978 bp, Homo sapiens
ccttggctatggagaggcggcccccgagccaggccctccgccaccgcccccgggccatggccccccgccgccacccttcctcgcgcggcccggcccgcggggctcccggccgccgcagctgatggtgttccgcaacgtgggtcggccgccggaggaggaggacgtggaggcggccccggagccgggaccctcggaactgctgtgtccccggcaccgctgtgccctggaccccaaggccctgccgccgggcttggcgctcgagcggacctggggcccggcggctggactagaggcgcagttggcggctctggggctcgggcagccggcggggccgggggtcaagacagtcggtgggggttgctgcccgtgtccgtgtcctcctcagccgccccctccgcagccccagccgcctgctgccgccccgcaggccggggaggaccccacggaaacgagcgacgcgctgctggtcctggagggcttggaatcggaggccgagagcctggagactaacagctgctcggaagaggagctcagcagcccgggtcgcggaggaggagggggcggccggcttctgctgcagcccccaggccctgaattacctccggtgcccttcccgctgcaggacttggtccctctggggcgcctgagtagaggggagcagcagcagcagcagcagcagcaacctcccccgcccccgcctcctcccgggcccctccggccactcgcgggtccttctcggaagggctccttcaaaatccgcctcagtcgcctctttcgcaccaagagctgcaacggtggctccggcggtggggatgggaccggcaagaggccttctggagagctggctgcttcagctgcgagcctgacagacatgggaggctctgcgggccgggagctggacgcggggaggaaacccaagttgacaagaactcaaagtgccttttctccggtctccttcagccccctgttcacaggtgaaactgtgtcgcttgtggatgtggacatttctcagcggggcctgacctctccacaccctccaactccccctcctcctccgagaagaagcctcagcctcctagatgatatcagtgggacgctgcctacatctgtccttgtggctccgatggggtcttccttgcagtctttccccctacctccgcctcctccaccccatgccccagatgcatttccccggattgctcccatccgagcagctgaatccctgcacagccaacccccacagcacctccagtgtcccctctaccggcctgactcgagcagctttgcagccagccttcgagagttggagaagtgtggttggtattgggggccaatgaattgggaagatgcagagatgaagctgaaagggaaaccagatggttctttcctggtacgagacagttctgatcctcgttacatcctgagcctcagtttccgatcacagggtatcacccaccacactagaatggagcactacagaggaaccttcagcctgtggtgtcatcccaagtttgaggaccgctgtcaatctgttgtagagtttattaagagagccattatgcactccaagaatggaaagtttctctatttcttaagatccagggttccaggactgccaccaactcctgtccagctgctctatccagtgtcccgattcagcaatgtcaaatccctccagcacctttgcagattccggatacgacagctcgtcaggatagatcacatcccagatctcccactgcctaaacctctgatctcttatatccgaaagttctactactatgatcctcaggaagaggtatacctgtctctaaaggaagcgcagctcatttccaaacagaagcaagaggtggaaccctccacgtagcgaggggctccctgctggtcaccaccaagggcatttggttgccaagctccagctttgaagaaccaaattaagctaccatgaaaagaagaggaaaagtgagggaacaggaaggttgggattctctgtgcagagactttggttccccacgcagccctggggcttggaagaagcacatgaccgtactctgcgtggggctccacctcacacccacccctgggcatcttaggactggaggggctccttggaaaactggaagaagtctcaacactgtttctttttcagaagttttgtttttgatatttatattacttggtatggaaaactcaccttgaaggcagttggggtttgtgcccgttggattgaaagtggtgcgaagggtgagcaggtccaaagaaggggtgggaggagggaacaggggacggccattcagctggtgccaaaggcagagttagagtctgtgctgtgggcctggaagatgggaggaggggcttgaggtttgcaaaggactgggagttcctgaggaagggggaatctgcctcttgttgccatgggcagctgttgtaggagcaggagagaaaggagggtgggtggtctcgaaaagaatattgggcaaaacctagccaattggccttagctgggagaagtagtgactcctgcatccttttttaaggtttaggaacctgagttcagaaacacctctcatggaagctgtactagttgtgatttacttaattccttaagttccatgacctgaagttaaccccgttcttcctctgctctcaacccattgccccttgagataactgtacatgtcactctgatcatggtaacagcatccctattgcttctgccagctgtcatggcaatcgtgtttcccatcacctgggcggttcagagccagtcatgggctgctgaatttaatggagcatgtttccaggttcttcatggcaaactgtactcatgacttaggagtgagtgttacttccatgtgcctgtcagcttgtgagggggaatgtggaggaaggtgagaaatacagctcccacagttgtgctcttcctagaggaagctctcagaacgcagccctcacgggatttccttaggtcagaggagagcatcgcatctcacgtttttaggtttatcactgccatcccacttctgggatgggaggtagcaagggcttctgtattttcttgtgttcattctagcaacccagacatttccggatcagatcctgctggtctccactcactggaaagtctgccagatgccgatttgagagctgcctgtccctgctttcaggaggagcggggagaaaaactccaatggtctttaatggtttctgcagctggccatggccaattcatatgacattgtgagtttgctttcttatagagctgctctggggagaggtttgctattgagatgtaacagtggagctgttgggtcttcatgactcctttgcgtgtgttccatgggactctctttctgggttccccatgcttatagttgcctcgtgtcacaagacagatactaatgtcaggtttgtggcttcctgatggtttgggtggggccccagtgtcctggtaatttataggactgcctcatctgggagcattgccttcttccttagtcccacgtggagtgaccagtcttcctccttgtagctgaacagggaggaaacttgcaccattacctgactgtggaagggtggcccacaagatgagctgtgcaccataaacacagcccacctctgatttgtcatgtggtacctcttctttccttggcttccatggtagtattaccaactaagcaagattgtgatcccagaaattggcttagcatgtgagtgttgcctcgtgagagtacaagtaatataactcgccatcttgcaggaagtgccaccccaatatagagcctgaagttggaatctgttgagatccttgggtggctgatatacagcctgggatctttcttttttttgttccttttcaaccacccataattttaatattattttttagtgtgtgtgtgcctggctttgcgctagatattgtagaaaacaaaaaaggtaaaagacgtaatatgtggcctaagggagcttttaggtgactgctgcacatcaagcagaaaatcaaggactatctaaagacgtttatagtagataagatcagggtagaccagatggtctgggaaagttctgtgcctctgaggctttgggttgtagtcaatggcaggacagacagtgagatgaaaaacacatgagcaaaagcaaggaagcagaaatctgcatggcatgtactgaacagtgcacagccctgttagagcaacatggttaaagaatcctttccagtgcggttttctagatggaagcttcccagccaccaggcagacctgagtgccgaggggttatgatggtgaggtggagcccaaagcccaaaggagtcagcaaggctcctgcccattgccagggcctcactatggtcagctcaggccatgtgagggaggcagagcctccgcaccccctgtgttactggggtttcttctggagaactcatacattcaggtacaaaacaaaccaactgaggaggtgtgacccaacctcaccacccacctttctcctcctggggagtgtcgtgttgaactgtgtctgtgtcagtgcactggtcccagccctggccgcagcctagtcctttctctgtggagtgggctgcaaaacagcagcgcaagaggagacagtcttcgtcaggtgtgggtgtttggtgcctgcatgggtggccttgcacagagcagttaggggaagatgagggggaggcatggggctgggccagctctctgggatacagcctggtcagagagtaaatggagcagaggaacaggtgtggcagcacctgcccttcacctccctgaccaggcccgtccctccttcgccagtgctgtgcagagctcatttaaatgtattcctttctaggtctgggcgcggtggctcacgcctgtaatcccagcactttgggaggctgaggtgggtggatcatgaggtcgggagttcaagaccagcttggccaaacagtgaaaccctatctctactaaaatacaaaaattagctgggcatggtggcatgcgcctgtagtcccagctacttgggaggctgagacaggagaattgcttgaacccaggaggcggaggttgcactgagccgagattgcgccactgccctctagcctagacgacagagtgagactccatctcaaaaaaaataaataatttctttctggttgtattttcaagtcacaaattggaaaaggcttacatctagggacccactgttgattcctaagttgtgggtgggtgatatcagtggcctcagtgcctgcataaccctcacctgtttatgactgatctactgtaaccttcctcaggttgagagtgagctgctgtgagccagtgacaactactgctacaacttgctgttacttgaaattcgtgtgctatgttggtagcacaggagtaggcgggcgggggttttggtgtgggcactaggtaagtgggtggcaaccggctctttgggaccattggtgctgacctttgcctggtcacctgcctgtgcctaggccaagtgaatgttacatcttggaacctgagccatggaggtggcgccacctccctgaggagaaaggtgtggccaaaggaaactcctgcatggctcctgctccttccccttccctacatttcacttgggctaatgatgtaagccccccttgaggttggggatggtgtggagatagctgcagacacccctgtaacagacatccaggaagaattagggagtgggggtaattatagttcctaggtctaggggtgagaggtgggagtagaaccagaagtgccctggaatccagccgtgtcagccctcaccccagggcccccaggaaagcatggcctgcttgaagccctctgctccctgcagaaactggggcgaggaggagctttttccttcagttagatctttcccttccctgctgcctcgctcccttagctttggagccctaaagttagtggacaagacactgggataaagctctatggctgctggaaggaggtctgagtctgtgtgtgtgcatatgcatgcatgtgtgtgtgtgtgtgtgtcctcatttgcagaagtcttgctaccagttagggtgttaagagcatctccactgggcggagacctggcatttgttttccactgttaagagaatgacacaccccctgtcatgtaagggaggagctattgagttagacattttccctatgggaatcctcggtttggtttgtgggaaaggagggaatggataagtgatttttatctctaatcgtcaacacagctgttcttccactgaatttgtgctattgcatacatgtagccatctttcttttcactgcagcagtgtttatcagtagttcaaaatgatttatttgctcctggggagtaaaaccttttttattaaaaaaagaaaaagaaaaaaaaaagaaagaaaagtgtgcccccctcctatgctgcgatagctataaaatgattgggtcacaaaggtcaagtctgcacgtccctgtggtagaccctgctttcacattggagccttcacactcagcacaaaatgattggaggccttgataaaatggagagcaaagtcttgggagcagtgaaatgggggttggatcatagagacaggcgctggggactcgggtactgcagttaggaaagtagcgttatgagttgtactgaaaatgttgattctctaatctgccagaaaaggacctgtcttttcatgcagatttcatattgtctttgtccttttcattgcttcttgaccttcctggcaggtgtcgctcagtttcttcctgtttcccttcctgtcctctccacacctgctatcccgtcccactcccatctacctcccgggaagccagccctgcatgctgagtttgtgacctgcttcattcccatttcatttctagagggtttagaggtgacctggaaccgttccctttccctctcctaccccctcctctgcaacaccaagaggcctggaggggcagacagaaagcagccagccacggcgggaagacatgcatgtttggttgcagctggactgcgatcgtagttcctcctggagatagagtgtgaggaacttaggacactcttcctcagactctgggatcatcacataccacactgccccgctcagagtttcgtcctgagctccctaaccagctcaggtggagcagaagcctgctctcactcctccatctctggtgctcccttgggcggggacctgtccctcactcttaggcccagaacctgtccaagggacaggtagggtccaggtgccactttgggtagctggctgttggaatgcccacactggtgctgcctgtggcatagccactgctgtacgtttttggttgtttttaagaaactcgatgaagaggggtgtcattctgggctcggggtggttgccaatttttcaccagaaagggagccaccccttgcaaccacttctgtctccgttagccccccctctgccctcctccaagccaaagcgtggcctggcttttgtcttcccatttagttttcctcttttacccttccttttgtgcttaatttattaaaatagttgctgtataatttattttcataaactataaaaaaatactaaatggttaaaatagacttgcaggccaatcttaaatggggtgggaggggtctgagggtgggatggggaaagggaaagaggttttgatataaacaaaacaaatgcactttgggtgtgttttggtatttttctggggatagagggggtggggttagggatgtccctgtagattagttccagaatggggtgtctgtatatactgtattaataggcatgtttgactctcgtaaagggacgttagtagctgctgcaggtcctgtttggaaaccccatgtacaattcccagttttttgtaagtgtcagtgcgagagacatttgactcttgtgtttgtatctcctttttatgattgctgtacctacccatgtctttttggggaggggtgaaaagagatttgaaataaaaatgtttagaaatta

SEQ ID NO: 730 - DNA, 4018 bp, Homo sapiens
ttcctccacttcctggactgcgcgaccggaggcctagcgggcgcgcgcccgcaccatcgactcgccaacgagagaaggtcctggggcacggacaccgacgggttgcgactgtgacgtgaggtgttctcgcgcgcgctagcgcgcgtctccgggtgccgctgacgggcgtgcgcgcttgtgcggagccggaggtgggggccgaaccagccaaggttgcgggggccgcagagccggacgaagacggagggcggagccggcttcgggactgcggagactacacaccgagcgagcgcctgggcccgaagggagcgatgctgtggttccagggcgccattccggccgccatcgcgacggccaaaaggagcggcgcggtcttcgtggtgttcgtggcaggtgatgatgaacagtctacacagatggctgcaagttgggaagatgataaagttacagaagcatcttcaaacagttttgttgctattaaaatcgataccaaaagtgaagcctgcctacagttttcacaaatctatcctgtagtgtgtgttccatccagtttctttattggagacagtggaattcccttggaagtaatagcaggaagtgtttctgcagatgaacttgttacaagaattcacaaggtccgacagatgcatttgctaaaaagtgaaacatcagtagcaaatggcagtcagtcagaaagttcagtgtctactccatctgcgtcatttgaacctaacaacacttgtgaaaactctcagtccagaaatgcagagctttgtgagataccacccacttctgatacaaagtcagatactgcaacaggaggagaaagtgcaggccatgccacttcctctcaggagcctagtggatgctcagatcagagacctgcagaggacctcaacatccgagtggaaagactaacaaaaaaacttgaagaaaggagagaagagaaaagaaaagaggaagaacagagagaaattaagaaggaaattgagaggagaaaaactggaaaagaaatgttggattataaaagaaaacaagaagaagaattaacaaaaagaatgctggaggaaagaaacagagagaaagcagaagatagggcagctcgagaacgtataaaacagcagattgcattggaccgtgcagagagagctgctcgttttgcaaagacaaaggaagaagtagaggctgccaaagctgctgccttgctagcaaaacaggcagaaatggaagtcaagagggaatcttatgcaagagaaagaagcactgttgcaagaattcaattccgtcttcctgatggttcttcctttacaaatcagttcccttctgatgctcctctagaagaggcaaggcagtttgctgcacagactgttggcaacacttacggtaatttttcgttagcaaccatgtttcccaggagggaatttaccaaagaagattataaaaagaagttactggatttggaacttgccccaagcgcttcggtggtactgttgccagcaggaagaccaactgcatccattgtacactcttccagcggagacatttggaccttgttgggaacagtgctttatccattccttgccatctggagattaattagcaatttcttgtttagtaatccgcctcccacacagacttcagtgagagtaacatcgtcagaacccccaaaccctgcatcatctagcaaatcagaaaaaagggaaccagtgagaaaaagagtgctggaaaaacgtggagacgactttaaaaaggaggggaaaatttatagattaaggactcaagatgatggtgaagatgaaaacaacacttggaatggaaattccactcaacagatgtagtgtgacaagtataatatgtgcaataatcattgtttctcttatgatttaattcaactaaaattctactggagaagtgggactgctttatattttccaactggtctataaaatgtctctttattcctgcttagtgggtgtgggttgaaggtgtttaactcagaaaagtaaagacaggaaataactctctgctaggtccttgcttatatggcaaccactgctagaaccctaaaagaaccaaaaatctgccacagcctgcctccatcagcttcttatttagtatttcatatgcccattagccctatgcttcagatgacacgttttgtttagagctactttgctccaagactcttaagcccaaagtaactggtatgtcactgagtaacttgactcggtgtcagagcattttaactagccactcagatgagaatttatgtttaacttctctttttactcatcagctgcaagcaaaatcttgtagtttttaatcttaaacactgaataaaaaaactttcccctaaattggaatgatcttagttttgctttgagttttgttatctagcatctttttgttgcacagggctctattgaggtcctatgtctctgatttttttttttccccagtattgccctggagctgtctctggaaagtagctggcgaggttaccttaactatcactgaagaaagaaattttctgacacactgatggcatgtgacttgtctcctaagtcagtgaggcatcactttgtttgcataaagtatacggtttgttaaggcctttgttcttgtgagatgcaaaacagctgctagtctgcaacctagttttccctctcacctttaactgacgttttgtcctcaataattacacaaggacctagagtacctataggacaaaaagtatagaataaaaatatgcctttagtcatttggtttttcttaaaaagttgagattcttaatctgacttacatgttactttatccgtatgtctttgttagtggagaccgctaaactaatgatgtttgaaaacagttcctctgttttagattggaagatagcactctagagtggacatacggaaagactgtgactttattttgtaatgggaggaagaaattttctcagagcaaactttctattttttacctgtgaaataacagtgactttttaaaatggtgacagtgttggcaaggaaacagcaacacaggctgcgctgttggtaggagtgaaaaccagtataattcttctgaaaaacatttatcagaaacttaaaatatttcataccgtttgatccagtagcttcttctaaatcataaatgcagacaatgtttaggtaaagacatactcattaagtgttatttattttactcaagaactggaaaccaactaaatgccttctatagaagtaatttttgatgaggagaaatggtacaatactaattaacaacttggtttaacatgtttactgagcatctgttaagtgttgggggaaaaagcagcaggatccagagctataggtacagtgtgatctcagctttgcaaacacattttctacatagatagtactaggtattaatagatatgtaaagaaagaaatcacaccattaataatggtaagattggtttatgtgattttagtggtatttttggcacccttatatatgttttccaaactttcagcagtgatattatttccataacttaaaaagtgagtttgaaaaagaaaatctccagcaagcatctcatttaaataaaggtttgtcatctttaaaaatacagcaatatgtgactttttaaaaaagctgtcaaataggtgtgaccctactaataattattagaaatacatttaaaaacatcgagtacctcaagtcagtttgccttgaaaaatatcaaatataactcttagagaaatgtacataaaagaatgcttcgtaattttggagtaggaggttccctcctcaattttgtatttttaaaaagtacatggtaaaaaaaaaaattcacaacagtatataaggctgtaaaatgagaattctgccccctcacctcttaccccagtactattctccagaggtaatctattaacaatttcttatgtaattttcagaaaatttgtatgcgtatataagcaaatatgtaatctttattttttaaataaatgggatcatattatatattctaaaa

SEQ ID NO: 731 - DNA, 6342 bp, Homo sapiens
cgccgctcaggccctggagcggacggttcctactgcggctgggcaccggctccgctcccgcgtctgcccgcgctccagctgcgcctggcccggccccggcccggctcggcgtggccccggcctccaagcgaaggcgccgctgccgctgggccgctcccagggccatgaggaagcggcggcagccactgcggcccgcgtcaaggacttctccagacaggttatgttacctgcagaggctgccctgaagctccctgtggcctggagactatgtacaagaggaatggtctgatggctagcgtgttggtcacctctgccactccacagggcagcagcagctcggactctctggagggccagagctgcgactatgccagcaagagctatgatgccgttgtcttcgatgtcttgaaagtgaccccagaggagtttgctagccagattacattaatggatatacctgtgtttaaagctatccagccggaggaactagccagctgtggatggagtaagaaggagaaacacagtcttgcccctaacgttgtggcctttacccggaggtttaaccaggtcagtttttgggttgtacgagaaattctaacagcacagactttaaaaataagggcagaaatcctcagccattttgtgaaaatagccaagaaacttctagaactcaacaaccttcattctctcatgtctgtggtatcagcattacaaagtgctcccatcttcaggctgacaaaaacctgggctcttttaaatcgaaaagacaagactacctttgagaaattggactacctgatgtcgaaagaagataattacaagcggacacgggaatatatccgaagcctgaagatggttccaagtattccctatctaggaatctatcttctggatttaatctacattgattctgcatatcctgcctcaggcagtatcatggaaaatgaacaaagatccaatcagatgaacaatattcttcgaataattgctgatttacaagtttcctgcagctatgatcacctcaccaccctgccccatgtgcagaagtacctgaagtccgtacgctacattgaagagctccagaagtttgtggaagacgacaactacaaactgtcgctcagaatcgaaccaggaagcagctctccaagactagtctcttccaaggaagatcttgcaggtccctctgctggctccggttctgcgaggttcagccggaggcccacctgtcctgacacatctgttgctggcagcctccccacacctccagtccccagacacaggaagagccacagcctaggcaacaatatgatgtgtcagttgagtgtagttgagagtaaaagtgcgacattcccatcggagaaagcaaggcacctactggacgacagtgtcctagagtcccgcagcccccgaaggggcctggctctgacctcctcctctgctgtcaccaatggactctccctaggcagtagtgagagctcagagtttagtgaagagatgtcttcagggctggaaagccccaccggcccgtgcatctgttctctggggaactccgcagctgtgcccaccatggaggggcctctgagaagaaaaaccctgctcaaggaagggcggaagcctgcgctgtcctcgtggaccaggtactgggtcatactctcaggatccaccctcctgtactacggagccaagtccttgcggggcacagacagaaaacactataaatccacacctggcaaaaaggtttccatcgtgggctggatggtgcagctgcccgatgaccccgagcacccagatatcttccagctgaacaaccctgacaaaggcaatgtttacaagtttcagactggttcccgatttcatgcaatactgtggcacaagcatttggatgatgcatgtaaaagcaacaggcctcaggtacctgcaaaccttatgtcatttgagtaagtctctgcaggacgtggcatgacttcagaggcttctgggaacccaggctgggcctggtggtgaagagcagtcctgggcacaggctgtgagccagggtgctgggaaactcacagctggactcaggggacacggcctgtggcctcaccatcccagagggcttcaccagtgtgggatccacctgtcagtccccagcgactctcatgacactcattctgcagcaccgcctcttggggcagtggtcagaccccacacgccctctctgggcccaccacctgcatctgcgactagagagcacccggcccacgttgggttctcagtgctttctactgcacagagtggacagcgctaactaacctgtgagaggggcccgagagaaggaacagctgtggaacaggctttttacaccccaagtgcatggggttgctcgcccacagggctgcctcagattttgtacaaccccgaagcgtcctctgcgtgtgcgtgctgtacgtgtgtgtgtgtgtgtgagcgagtgtgaactcttcaagaaacatgcattttggcacaagactcgtgacatcacacacttcattcgctttgaggccctgctttaaccttaagttatagccctgtccaccgaggaaggtcagggtgagagcctagattcctcctgtgtcaagggtccctcgcattcttttactgtaaacaaacaatgccttaaattgtgtcttgttttctgttcctatgggtgctattcatctggaaggcctgcttccaggcctctttgctgtcagcccttctgagacaggacctggcttcaggactgtggactgggctgctggcctgcttgcttcctcccttccccattcctagcagggcctgaggccctcctcttctcgcccttcccaccatgccagaatgggaagttgtgacgttgcagctccaaccgacgtgctcatagtgatcagctgtgcaggagccatgaggcaccaacctctccccgcagggcaaagcctgtgcccccatcatctcactcctttgcctgcactgccagggtggggcccaccaagattcctgatcatgacgggaagctgagtgaccctgaggccttaagcttccccagtcttggccccaaatgcagtcaccagcaagttttccattttccaagtccaagggcacaattgttgatgaccgtgtgacaatagagcgaagccccggggagtgaacggtccaacctctgcattcagttaggagctcttcacatgaatcacatccttatctgtcaccttgtgtcacattttaaagtgacttttattttgcacaaataatttttattcagaataataaatcactctttatcatagtatcttctcttccctcttcccctttagtttggatagcctaactctgagaagttaacccttaaacagttttctggaagagactgaatttctgggtccttgcagctgtgatggtttcagagctcagactgatcaggcatcaagctaccctcaagagtttctgggctggatgtttcagaacaacatctacaccagtaaagtgtaataggtcagtttcaaaacgaccaaaagacccaccactgtattttgaccaaataatgacaacttctttagaaatttgaatggcttggtgaggaaagtagttgtcaccagggcctcattttgtagttgagccttacaatgcttagtagttcatcttctttttgagcaaagactagaatactttcctcctaagagaaactcccaggtgataaaagttgatgccatcaaaccttgacaccgggtgctctgcacacccacgcggatgttgcacctcattctcccgatgactattcaaatcagcatctagaggctgaatgacaatgccaaacactccacctctgatcagaaccatgcagtgttaacactttaacctacattgaatctgattctacctgttaacttttaaaaagtcgtaagtttggatgaaagtgcaagatgtggaacatcaactacctattttccttgggtttttccactctgcaaactgtcctggtttttcacaccaatgaagtattatagatgccaatccaaaacctcagaatttcaggcaccacaaaaacaggtaattttctatcccttataagtttgtcttttctttcagaaacatctcttagcctaatttgaaatagcacaatcacaattcaaaatgtttagtcttctcactaattgagtctgcttccacgtcctctcccaggaacattcttagctcggactcttgaagaatctctttagattttgttggcaaaagccttatagaagcagtaagaggcttgaccacgccggaagagtcctggagctaaagctggaagacactcagctctctaagcaggggctcggccaaacatgggagttaagtgctgcttgtcttcccagtgttggtttgaaccctgtgagcctgagacagagagggccaggcaccaaccacaaggcgggaaagtccatgggtagaccctccccctggagggaagcatttctagtttttgctccttgactgtccagagtgtacaaatgttcataacgccattgaagggattatttcttgcatgcatatgctgaatttttttaagcaaatggatcatggcaccccaaaatgaaagttatagaaagctgtctacaactgtggagttggtagctggtaacattgttgtctcaagaacaactcacctctctccctaggactaatttttgtctctctcagttgaacatgttttgtcattcaagatcagtcaggtgcattctggcaactgacatacttgatggaggattgattcggtagagagcagtagaaatcttgttctaactgtgcctggtgagagactttggccccctccctccctataaggctgtggaacctgaggaagtagatacttgaagagattctgtttaggaagaaactcactctcttttgccagttgaatttatagagcattttttttcttaccaagatggccagtatcattttacccccacctcccaagccccaagaggtgtaccttttcagatgccattttacaggcggaaatgctccatgaaacaggaagccacttgcaagcaacatctgctctgttcctcaggtggggcccagagcccttccccgagactgctgatgtctgtaaccactggggagcactgccaaaaatacagctttctggtttgtgagcccataaatgacttaaatcagctttacatcatttttacatatcaagtggtttcatgttaaaaaacaaactcctagtcctttagaaataacagattctctgcacaaaaccacccattcattcatttattcattcacagcactagcaagtgctgcctatgctgagaacaagtcagatctgatccctgccctcatggacctgaccactcaacaaacagtccccaccacacctatctccttaggcaagactttgcctctctcctagtcctgagtataaatcctgtgcatagattcctctagaaaggcatcaaaaggctcaacagactgaatggcctcttggtctgcgaaaattcagttgcaatgaggatgaagtcactatcctagaggctgcttggcccagaagagccaggcacagagctgcagttgggcacgccaaggattccaaaggtggaatgagagagtagggtcaaactgtcacagtatctgctccataggtttctgtttttaatttcaatgttaaatacaactacaatatgagcgagaactgcattttcttgggtgttgagaacttgtaccatggacttcagaccgccttgcagccgtatgctgcacaagcgtgtacaccccctgggcagcctcaaaaccccgcttacagcagcaacacaggagatcatctgtccattttagaaccattaatctctttatccattgctgaacgactgtgactattcagtaacgaagtaatagtaattaattagtatggtataatctttaataaatttcgtgccaaaatgcatggttttccacttagcattcaaaatgttgcatagagagtagttttcaatttcttatgtactcttcgaagtaagttgaaaatcagtttctacattttaattcgtttcctgttaaatctgttgcactctcctgggctgtctttttctccagcagacccctgcatgcagttgtgtaaggactttctctaattcttgtgaatcgtctcacccgcagtaaccactgaacgtcaatcagccctccatggggttctttcgatttttggtgaagtattttgttacctcagtcttgtatcaagttgctgtatttttcagcttgttacattgataataattatttcactaattaaatactttaatgtacaaacatctttgtttactttgaaattaaatgtgttttccaatgaaaaaa

SEQ ID NO: 732 - DNA, 4997 bp, Homo sapiens
agactctcggtctgtccgctgggggcgcgcgcggtgtgtggcaggcggcagcggcgctggcggccgagtgcgcttgtcacgcgtggcggtgcgtggttgctaggggcgcctgaggctgccgggtagcccagcaggccgagggaggaagtagcgtggagccggtgccgagccggggcgaagctggatcccctagatagactgtcttcaagctcactgatattttcctctgcttgatccattgtgctgttgagagcctctagtaaatttttcagactgacagacttcaaggatgcagctgctactaccggaggtgtgtggcaccttacctcagcaaggccatgagaccgtgtggccatgatgtgggcccctcatggcctcagcaggaacacagcactatagtattggcctccgccagaaaaacagcttcaagcagagtggtccctcaggcacagtacctgccacgccacctgagaaaccctcggagggcagagtctggcctcaggcccatcagcaagtgaagccaatctggaagctggaaaagaagcaagtggagacactgtcagcagggttgggcccaggcctcttgggcgtcccaccccagccagcatatttcttttgccccagcactttatgtagctctgggaccacggctgtcattgcaggccacagcagttcctgttacctacactctctcccggacttgttcaacagcaccctgctataccgccgctccagctataggcaaaaaccgtaccagcaactggagtctttctgcttgcgttcgagcccgtcagaaaaaagccctttttctctccctcaaaagagcctccctgtcagtctcactgccaacaaggccacttcttccatggtcttctccatggcccagcccatggcctcctcatccacagaaccatacctctgcttggcagcggctggggaaaacccttcagggaagagcctggcctctgccatctcagggaagatcccatctccactctcttcctcctataagcccatgctgaataataattccttcatgtggccaaatagcacgccagtgcctttattgcagaccacacagggcctgaagccagtatcgccacccaagatccagcctgtctcctggcatcattcagggggtactggagactgtgcaccgcagcctgttgaccataaggtgcccaaaagcattggcactgtcccagctgatgccagtgcccatatcgccttgtctaccgctagctcccacgacacatccaccaccagtgttgcctcttcctggtataaccggaataacttagccatgagggcagagccactttcctgtgctctggatgacagctctgattcccaggatccaactaaggagattcggttcactgaggccgtgaggaaattgaccgcaagaggctttgagaagatgccgaggcaaggctgccagcttgaacagtctagtttcctgaaccccagcttccagtggaatgtcctcaacaggagcaggcggtggaaacctcctgcggtaaatcagcagtttcctcaggaggatgctggatcggtcaggcgggtcctccctggtgcctcagataccttggggttggacaatacagtcttctgtaccaagcgtatcagcattcacctccttgcctcacatgccagtgggctcaatcacaaccctgcctgtgaatctgtaattgactcctcagcatttggagaaggcaaagctccaggtcccccttttcctcaaactcttggcatagccaacgtggccacccgcctctcttccatccagctgggccagtctgagaaggagagacctgaggaggccagggagctggactcatctgatagggatattagttcagctactgacctccagccagatcaggctgagactgaagatacagaagaagaactagtagatggtttggaagactgttgtagccgtgatgagaatgaagaggaggagggagactcagagtgctcctcattaagtgctgtctcccccagcgaatcggtggccatgatctctagaagctgtatggaaattctgaccaaacccctttccaatcatgagaaagttgtccgaccagccctcatctacagtctctttcccaacgttccccctaccatctattttggcactcgggatgagagagtggagaaacttccctgggaacagaggaagttgctccgatggaagatgagcacagtgacccccaacattgtcaagcagaccattggacggtcccacttcaaaatcagcaaaagaaacgatgactggctgggctgctggggtcaccacatgaagtctcctagtttccgatccattcgagagcatcagaagctaaaccatttcccaggctcattccagattgggaggaaggaccggctatggcggaacctgtcacgtatgcagagccgctttggcaagaaggagttcagtttcttcccccagtcctttatcctgccccaggacgccaagctcctgcgcaaagcgtgggagagcagcagccgccaaaagtggattgtgaagccaccagcatcagctcgaggcattggcatccaggttattcacaagtggagtcagctccccaagcgaaggcccctcctggtacagaggtatctacacaaaccctacctcatcagcggcagcaagtttgacctgcggatctatgtttatgtcacttcctacgatcctctgcggatttacctcttttcagatggactggtccgctttgccagttgcaagtattcgccttccatgaagagccttggcaataagttcatgcacctgaccaactacagtgtcaataaaaagaatgccgagtaccaggccaatgcagatgaaatggcttgccagggccacaaatgggcactgaaggctttgtggaactacctgagccagaagggagtcaatagcgacgccatctgggagaagataaaggatgttgttgtcaaaactatcatctcgtcagagccctatgtgaccagcctgctcaagatgtatgtgcgacggccctatagctgccatgaactctttggttttgacatcatgctagacgaaaacctcaagccctgggtcctggaagtcaacatttccccaagcctccactccagctctccactggatatcagcatcaaaggccagatgattcgtgaccttctgaatctggcaggttttgtcctgcccaatgcagaggatatcatttccagccccagcagctgcagcagctccaccaccagcctgcccacctcccctggggacaaatgtcgaatggctccagagcatgtcactgcacagaagatgaagaaagcctattatctgacccagaaaattcctgatcaggacttctatgcatctgtgctggatgtcctgacaccagatgatgttcggattctggttgagatggaagatgagttttctcgccgtggtcagtttgaacgaatttttccttctcatatctcctctcgctatctccgcttttttgagcagccacgatatttcaacattctcaccacccaatgggaacagaaataccatggcaacaagcttaaaggagtagatctgctccggagttggtgctacaaagggttccacatgggagttgtctctgattctgctccagtgtggtctctcccgacatcacttctgactatctcaaaggatgacgtgatactcaatgccttcagcaaatcagagactagcaagctgggaaaacaaagctcctgtgaggttagcctactactctctgaagacgggaccacgcccaaatccaagaagactcaagctggcctttccccttatccccagaaacccagttcctcaaaggacagtgaggacaccagcaaagagcccagcctttctacccagacgttacctgtgatcaagtgctctgggcagacttcaagactttctgcttcctccactttccagtcaatcagtgactccctcctggctgtgagcccataactggcctctctccaaaagcctctgcccaggagcatgggcatcagctacctcacgggaaccagcctgctgttcagaccagtctgaccccctacccctttcaccctgtccctcctcagagtattttttgaagtggttgcattatagagatgggtatttgtagggccggagggatggtagtgatggggagaaggtgaggaagggtcaccctctgtcacctgtctgcctggctggcacctcatatctcagcagagaagccagtggtggccacgcagccttataaagcaggttttggtttctaccttaagtgagccatgtgtggtttgtctgggggccctggtgtggttgctgagttgtagctcaagaggagaaaacatacagaacatatttggaccggaaatcctttgttctgaatttgagggggtcttctgaggtccttacttccttaggtctttcctcacccctctcccaccgctgtcctgaggagaaacccttgaacttcctcagtagacaggcggagaggccacaacatgccgaacccatttcctgtcatcctagtcttgggtcttcaccgcctccttccaaatacccaccctgccagcagccctaggtcttcctgttctgaccccccatcactgctcgttcagccttctagatgtctctctcgtggacatctgttctttagctgttggctttctctgaggtgtgagagggtctatgaactttgtgaatttcccatggccccagtgaaggagcccagataatcccagtagctgttacctgtctccatgtatcaaaggacacagtccagggggagggtggaaggagatgtggtttctctatagtgcaacaaacatggtttctcaatgttctgctgtgcagcaagcagggtctggcggcttggtaggtgggtttcaggagcagtcactattgtaggatgggcttccaatcaaacctcagactaaactcttgtactgaactgattctacctccctcctctagactcagtaaacagtgactattcaataaa

SEQ ID NO: 733 - DNA, 8626 bp, Homo sapiens
cggggcgtgcgcgtcctcctccccaggcccgccgcctccctgccaagaatctgagagaggccgagtggagttcggtccttctctgaacacttttagctgagagtaccagcatccaactgggagcgttgtcattgcatttccacattcccaggaaagcccaggtgctggctgccagctgctgcgccccccatgtagaaggtgcacctcctgggagcaggcacgtcttttggctcttctgaccatggagagataggacggtccctgcagcccgcgcgacagaaagctgtgccgccaccaccggccgcgcccgtccttcggatggatcgcaacagagaggccgagatggagctgaggcgaggccccagccccaccagggccggccggggccacgaggtggatggggacaaggctacctgccacacctgctgcatctgcggcaagagcttccccttccagagctcgctttcgcagcacatgcgcaagcacacgggcgagaagccctacaagtgtccctactgcgaccaccgggcttcccagaagggcaacctgaagattcacatccggagccaccgcacggggactctgattcagggacacgagccggaggcgggcgaggcgccgctgggtgagatgcgcgcctccgagggcctggacgcctgcgccagccccaccaagagcgcctcggcctgcaaccggctgctgaacggggcctcgcaggccgacggcgccagggtcctgaacggggcctcgcaggccgacagcggcagagtcctgctgcggagcagcaagaagggggcagaggggtccgcatgcgccccgggggaggccaaggcagcggtccagtgctccttctgcaagagccagttcgagcgtaagaaggacctggagctgcacgtgcaccaggcgcacaagccgttcaagtgcaggctgtgcagctacgcgacgctgcgggaggagtcgctgctgagccacatcgagagggaccacatcaccgcgcaggggcccggcagcggcgaggcctgcgtggagaacggcaagcccgagctgagccccggggagttcccgtgcgaggtgtgtggccaggccttcagccagacctggttcctgaaggcgcacatgaagaagcaccggggctccttcgaccacggctgccacatctgcggccgtaggttcaaggagccctggttcctcaagaaccacatgaaggcgcacggccccaagacgggcagcaagaacaggcccaagagtgagctggaccccatcgccaccatcaacaacgtggtccaggaggaggtgatcgtcgccggcctgagcctctacgaggtctgcgccaagtgcgggaacctgtttacaaacctggacagcttgaacgcccacaatgccatccaccgcagagtcgaggccagccgcacgcgcgccccggccgaggagggggcggaggggccctcggacaccaagcagttcttcctccagtgcctgaacctgaggccgtcggcggccggcgactcgtgccctggcacgcaggccggacggcgggtggctgagctggacccggtcaacagctaccaggcctggcagctggccacgcggggtaaggtggccgagccggccgagtacctcaagtacggggcctgggacgaggcgctggccggggacgtggccttcgacaaggacaggcgcgagtacgtcctggtgagccaggagaagcgcaagcgtgagcaggatgcaccagccgcgcaggggcccccgcggaagcgcgcgagcgggcctggggaccccgcgcccgccggccacctcgatccccgctcggccgcgcgccccaaccgcagggccgcagccaccaccggccagggcaagtcctccgagtgcttcgagtgcggcaagatcttccgcacctatcatcagatggtgctgcactcacgcgtgcatcgccgcgcgcgccgcgagagggacagtgacggggacagggcggcgcgggcccgctgcggatcactcagtgagggtgactcggcctcccagcccagcagccctggctccgcctgtgccgctgctgactccccgggctctggcctggccgacgaggctgccgaagacagtggtgaggagggcgcccctgaacctgcaccagggggacagccgcgccgctgctgcttttccgaagaggtgacttcgaccgagctctccagtggagaccagagtcacaagatgggagataacgcctcggaaagagacaccggcgagtccaaggcagggatcgcagcttctgtgtccatacttgaaaacagtagcagagagacttctagaaggcaagagcagcacagattttctatggacttaaagatgccagcatttcaccccaagcaggaggtgcccgtccctggtgatggtgtggagttcccttccagtacgggagcggagggccagacgggtcaccctgcagaaaagctgtccgatttgcacaacaaggaacactctgggggagggaagcgggcgctggccccagacctcatgccgctagatttaagtgcgaggtcgacgcgggatgaccccagcaataaggagacggcctcctccctgcaggcggctttagtcgttcacccgtgtccttactgcagccacaagacctactaccccgaggtcctgtggatgcacaaacgcatctggcaccgcgtcagctgcaactccgtggctcccccgtggattcagcccaatggttacaaaagcatcagaagcaatttggttttcctttcccggagcggacgcacgggccccccgcctgccctcggtggcaaagaatgccagcctttgctccttgctcggttcacccgcactcaggtgccaggggggatgccggggtccaaaagtggctcttctcccctgggagtggtcacaaaagccgctagcatgcctaagaataaggagagccattccggaggtccctgcgctctgtgggcgcccggccctgacgggtatcgacagaccaaaccttgtcacggccaggagccacatggcgcggccacacaggggcccctggccaagcccaggcaggaggctagctccaaaccggtgcctgccccgggtggcgggggcttcagcaggagcgccacccctacgcccaccgtcatcgcccgggctggcgcgcagccctcggccaatagcaagcctgtggagaagtttggggtccccccagcgggggctggctttgcccccacaaataagcacagtgccccggactccctgaaagccaaattcagtgctcagcctcagggtccacctcctgcaaagggcgaagggggcgctcctcctctacctccccgcgagcccccctcgaaggcagcccaggagctgaggactctggccacctgtgctgcggggtccaggggcgacgcggccttgcaggcccagcccggcgtggctggggcgccccccgtcctacactccatcaaacaggagccggtggccgaggggcatgagaagcgcctggacatcctcaacatctttaagacgtacattccaaaggactttgcgaccctctaccagggatggggtgtcagcggccctgggttggagcacagagggacactccggacgcaggcccggccaggagagttcgtctgcatcgagtgcggaaagagcttccaccagcccggccacctcagggcccacatgcgggcacactcagtggtgtttgagtccgatgggcctcggggttctgaagttcataccacctccgcagacgcccccaaacaagggagagaccattctaacacaggtaccgtccagacagtgcctctgagaaagggaacctaaaggcgtgtttccgacgcaccccaggtccccgtaacggccattagcagtaccctcacgatgtcccagcagcctcccacctgtgacctggccgctccatggaagaacagccggggaactcctgagcagacacctcacatcccgagccgctgcgctggagtggaaactgaaggcagatgcctctccttgttaaacgttcagaaataaatgaagatgctatattctagaaatacatgtagatactatatacgcatttacgtgctcatcgtccatagtcccatattttcttataataaacagtagtactggcaggcacagtaggggcacaaggcatctgtcttattcaagacaagtttgagacactggaaaaaaagatacttgttgtgtgtgttggacagagtggcgaggctgagcactgtcacaggggcctcccatgttaagagggactgtggggatgatgtcagaacaagacgtggtggatttgaggttgatcgagtattaatactactgcctctccttgtcttagtgggtatttaaaatagtaaataagagagaggaaggaggtgacgttcaggtgctgtgggaagcaggcttggcggaggggtatgatgatgagaccctcattgttcactggctccatcgcactcctccctggggccgtgtgcctgttccattcttcccaccattcgaactgagcgaatctggcaaaggagacacgtctgtgggaatgcgtagattccgcctcggaagagagctagcgcaacactaagaaaagcaggcttcttgtttattctcaggacctttttgtaacagggctacattctgcaaactgcttacaaaggaagactatacgtcttaacaaattatttagccactgagtcctcccgattcggacctgttttagtaatggcagaagaatccctgagcaggttcaggtgccctagatgactagggtgctgagctctggcgccttctgtccccactctttgcctccccgccccttccctgagccaccccagcaagtgggtgtcttttctccctgggcctggtgacctccacaggatgagtgactttgttcataaagggtggggatcaccagccccttgggtgggggacggcttcatatacctcttcctcagtaatgcaaatgcgagtttttgtggtgggggttaaggcccataacaaaggatcttaaaccatgcagtgtacgcaattgaaatggtattccacagatataaatattttcttttcccattgccgtgacactatgtgtgatggtaatatttctgagagtttcagatttttgcacatatgattttatgcattatcaaaagttactgctgccttgaatgaaaatgttctgtgaaattttttgcaaaagctttactaggtttttttttaattgtgaaattttgtaaaggcaggaaatggattaaaacgagcatgctaaatatatttttcaaaaaagcaataattttacatgtacagaaattatcctaacctttaatactggcgagagcaacagtttacttaatacggtaatggactagtgcagtttttgtagacagtgggcttctgatacaaagtcttgtttaaacacagacacacacacacacaaacacacacacacaccctaaagtgtgggtttcctgttctaatgatttgttgaatattattatattattattattattattattattattgttattgttattagtaatgtttggttctggattctacttgttactgagtttaaattacttgacggttcaggttactttgcaacactttcaaacgatgcaatgtaactggctagcttatatatatatatatatatatatatatatatatttttttttttttttacttatttttttctgatattcttacaccagatatgtacgaaaatgatctgtcctgttggtgtaattaggaatgtccatgcagatacagttaaacaactgtaattgactgttctgtaaagttattttgggcaaagttgcggagacacattcctctgtccacctaagaaatcagaagactcttctgttgatttatgtttaatcatttcagtagtttccccacagtgatcatttctgcattttctggcttttgttttcttggctgaaagtgaatggtgactgttaggaatgtcagggactagtgacccagtcctgtttctctgtgttttagttattaaaaagaaattctgtacccaaagtgacacgaaagtgtagtctacatttttactgtttcagaagcggcatggaaaagtgcagttggcctttggagctggaagtgtcttgctggtgaggctccatcctggaggctctggtggggagtgggctggcgctggggccctgccggccgcgtgctggatccttcctggcttgcaggagagcaggcgtggaggacagtcagcttgcggggccgcgcagggtgcacagagtgcaggaggaaggttttcacccagttaaacagactggggagcccccccaagaacgccatcccttgaggccagctgtgggcaggcctggatgtgtggtcccttccttccacccatcgtcagtattgtgttggtttgttaatttgttgatttggtcatagtatttaatatgatttgtgtttccttatttatttagccaccgttttgattgcctttttttttccgaatggtaatttctgcatgatacacttctgtacgttgtcttctgactgttacagactttctactacctctcccgatctgctgtttccttgtttcttaacaggattttttacagtgttgcgtctaatgtaacttagacaataaagggtttggttgtctacactgcagcttctcggtgtctctcccctgctttccgctcgctgcttcccgctctgcccctgctggggcctggctgcaccctggcctgccttcctatactctcctgtttcctgctcatatctcttcctcatttttgcgttcaaataacacacagctaatgagcttctaaaaatcttttcaggttgttcacttgtattccttaatttgaagaatgaatatttaaattctctcaaaagtcagatattgaggatcttctctgggaaattggccactgtacctgcccacctttctgcctggttccctggaaggtcttattgtcatcttagacggacagatttcattctcagcaccatacagatttggcttcaaagccaggtgaattttgcctttgaggctctgaaaagtattaagtgttttaagaggtcccccaatatttacttatttattttttaaaccaagaaagacactggttccctgaaaagcaggtgcttcaggaagtagcaattgggagttgcatacagttacttcgtcagagaaaggagcgcccagtatgacaggcccccacccctgatccggccactgtgcacaggtcgctgagggtgtgagaacacctctgcaggggctccggcacatgtgggtttcatcgtctcacactccttcaggctgcaggggttgagtgcagaaagggcaagcttcatctccatggtgcctctccaggctggcaactctggtcggcctctgttctttggacagagagggtgtaggttacagggtcagtagggatgctttctggatcaaagaaagtgggtgtagtgcttagtctgttgtgtggaagagggcacctcctgggctttcgtggctggagactgtctaccaacattccttccttcaaactagacaaaccctcctctgccacccccagcaaattctcagaggtttccaagctgtagaaaaaggaaggaaggaaggacggcattcacatagctttactttctgcttcaaaatgtcttaagtagcatatgttgttttactgcttttaactttggtgagttctaatttcagaacgttttgttcactgagcaaaaaaacagatgaaacaaccacaggccaggacttcaagtgaggaggacgcctttgtttgccgtggttggtgggagcacacgccggagcccggtaacgtgcctgtgggagtgaccaagggccacccgcccaagggaaaatgttcattcttcatcagctttgctaattctgctttgaggcagtaaaatgcaaaagaccatagaatttgtatttctttttttaaaatacaatttataacattatattttgtactctttatattagaatttgtaactagattgatgtatttaactatttctgaaaaagtaattcaatgttttagttgtgtgataaaaatatttagataaaacatattcattctattggaatttgaaataaataaaaacatcttggagttctgagatttgtaagacatttttccccaatttcagagggtggcgtaaatcgtttgacagcccgctttggtctgtggttatttatttttgttggctgaacataaaccaaagtgttaatgctctttatttatggaagagttttagggtaattcacaagatcgttcatctgaacagatgcccagatggcccgagtggtttttttccaactcttttgtggactcgaggacatacagttttttaatggagacgctgtgtttttctcattttctttcacagcacacatgttatttccccactgaatacacccactgttcttacccttgcactgtcacccatacaggacgcacagggatggacgcggacggaattctgactcagccacacctggaggaaattattgtgtcaaaaatgtggggacacaagggctggcactgtggtttgcaatggtttactgatgagacagcaaaaatgagacaggaccatcagatgcaataaagattctaatttaaaaaga

SEQ ID NO: 734 - DNA, 8482 bp, Homo sapiens
aaataaagttttttcaatggaaggcttgcagctcttgaggacctgccaaatggaagaaggacagagacctggagccctatggaaagttctgacaccatgtgtggaaggacatggcttttaacacgtgtggtgactggagtagctgcagctgaggacagccaccctttcttcgtctctgctgagcgaaggctacacggcccttcctccttgcagctgtttcaccttctaccttgcgtggagccaggcttttgcaccgaatctgagatgccattttaaacagaagactccatcctcttgaagatgggaaattcttacgctggacagctgaagacgacacgctttgaagaggtcttgcacaattccatcgaggcatccctgcggtccaacaacctggtgcccaggcccatcttttcccagctgtacctggaagctgagcagcagcttgccgctctagaaggtggtagccgagtggacaatgaggaagaggaagaagagggagaaggagggctggaaacaaatggccccccaaaccctttccagctgcaccctctgcctgaaggatgctgtaccacagacgggttttgccaggccgggaaggacctgcgccttgtctccatttccaacgagcccatggatgtccctgcgggctttctcctcgtgggggtcaagtcccccagcctgccggaccatctcctggtgtgcgccgttgacaagaggttcttgccagatgacaatggccacaatgctcttcttggtttctctgggaattgtgttggctgtggaaagaaaggcttctgttacttcacggaattctccaatcatataaatctgaaactgaccactcaacccaagaagcagaaacacttgaagtattacctggtccgtaatgcacaagggactctaaccaaaggacctttaatctgttggaaaggctcagagtttagaagccggcagatccccgccagtacttgttccagttccctcttcccagccctggagagcacggctgccttccccagcgagcccgttcctgggacgaaccccagcatcctgatgggagctcagcaggcaggaccagcttctgatcacccctcactaaacgcagcaatgggtccggctgttttcaacggcaaagattccccgaagtgccaacaactggcaaagaataacctgttggccctgccgcgaccatcggctttaggtatcttgtcaaactccgggccccccaaaaaacgccacaaagggtggtctccagaatctccatcagctccagatggtggctgcccccaaggtggtgggaacagagctaagtatgagagcgcaggcatgtcctgcgtgccgcaggttggcttggtgggaccagcttcagtcacctttccagtggtggcctctggagaaccagtgtctgttcctgacaacttgctgaaaatatgcaaggccaagccagtgatatttaaaggccatgggaacttcccttacctctgtgggaacctgaatgacgtcgtggtcagccccctcttgtacacgtgctaccagaattcccagtctgtctcacgggcatacgagcagtacggcgcctctgccatccagcccatctccgaggagatgcagctcctgcttaccgtctactacctggtccagctggccgcggaccaggtgcccttgatggaggacctggagcagatcttcctgcgctcttggcgcgagtcgcacctgaccgagatccggcagtaccagcaggcgccgccgcagcccttcccgcccgcgcccagcgccgcggcacccgtgacctccgcgcagctgccctggctggccagcctggccgccagctcctgcaacgacagcgtgcacgtcatcgagtgtgcttactccctggccgagggcctctccgagatgttccggctgttggtcgagggcaagcttgccaagaccaactacgtggtcatcatctgcgcctgccgcagcgcggccatcgactcctgcatcgccgtcaccggaaaataccaagcccggattctttccgagagccttctcactcctgcggagtaccagaaggaagtcaattacgagctggttacggggaaggtagactcgctgggggccttctttagcaccctctgtccagagggtgacattgacattttgctggacaaatttcaccaggaaaatcaaggccatatttcttcctcactcgctgcctcttctgtcactaaagcagcatccctggatgtcagtgggacaccggtgtgcacaagttacaatctggagccacacagcatccggcccttccagctggcagtagcgcagaagctcctctcccatgtgtgttccattgcggattccagcacccaaaatctggacctgggatcctttgagaaggtggactttctcatttgcattcccccctcagaagtgacctaccagcagactctgctccatgtgtggcattcaggggttttgctggagcttggtctgaagaaagagcacatgacgaagcagagggtggaacagtatgttctgaagctagacacggaggcacagacaaaatttaaggcttttctgcaaaactccttccagaacccgcatacactttttgtcctaatccatgaccatgcgcactgggatcttgtgagtagcactgttcataacctctattctcaaagtgacccgtcggtgggattggtggaccgattgctcaactgcagggaggtgaaggaggcccccaacattgtgacacttcacgtgacctccttcccgtatgcactgcagacacagcacaccctcatcagcccctacaacgagatccactggcctgcctcctgcagtaatggagtggacttatatcatgaaaataagaagtacttcgggctgtcggagtttattgaatccaccctttcaggacacagcctccccttgctcagatacgatagctcctttgaggccatggtcactgcattaggaaaaaggttcccccgcctgcacagcgcggtgatcaggacctttgttctcgtgcagcactacgcggccgccctgatggccgtaagcggcctcccgcagatgaagaactacacgtcggtggagacgctggagatcacgcagaacctcctcaactccccgaagcagtgcccctgcggccacgggctcatggtcctgctgcgggtgccctgttcgcccctggcggtggtggcctatgagcggctggcccacgtgcgggcccggctggcgctggaggagcactttgagatcatcctgggcagtcccagctcaggcgtcaccgtggggaagcacttcgtaaagcagctcaggatgtggcagaaaattgaggatgtggagtggagaccccagacttacttggagctggagggtctgccttgcatcctgatcttcagtgggatggacccgcatggggagtccttgccgaggtctttgaggtactgtgacctgcgattgataaactcctcctgcttggtgagaacagccttggagcaggagctgggcctggctgcctactttgtgagcaacgaggttcccttggagaagggggctaggaacgaggccttggagagtgatgctgagaagctgagcagcacagacaacgaggatgaggagctggggacagaaggctctacctcggagaagagaagccccatgaaaagggagaggtcccgctcccacgactcagcatcctcatccctctcctccaaggcttccggttcagcgctcggtggcgagtcctcggctcagcccacagcactcccccagggagagcatgccaggtcgccccagccccgtggccccgcagaggagggcagagcccctggtgagaaacagaggccccgggcaagtcaggggccaccctcggccatcagcaggcacagtcccgggccgacgccccagcccgactgtagcctcaggaccggccagaggagcgtccaggtgtcggtcacctcgtcgtgctcccagctgtcctcctcctcgggctcatcctcctcatccgtggcgcccgctgccggcacgtgggtcctgcaggcctcccagtgctccttgaccaaggcctgccgccagccacccattgtcttcttgcccaagctcgtgtacgacatggttgtgtccactgacagcagtggcctgcccaaggccgcctccctcctgccctccccctcggtcatgtgggccagctctttccgccccctgctcagcaagaccatgacatccaccgagcagtccctctactaccggcagtggacggtgccccggcccagccacatggactacggcaaccgggccgagggccgcgtggacggcttccacccccgcaggctgctgctcagcggcccccctcagatcgggaagacaggtgcctacctgcagttcctcagtgtcctgtccaggatgcttgttcggctcacagaagtggatgtctatgacgaggaggagatcaatatcaacctcagagaagaatctgactggcattatctccagcttagcgacccctggccagacctggagctgttcaagaagttgccctttgactacatcattcacgacccgaagtatgaagatgccagcctgatttgttcgcactatcagggtataaagagtgaagacagagggatgtcccggaagccggaggacctttatgtgcggcgtcagacggcacggatgagactgtccaagtacgcagcgtacaacacttaccaccactgtgagcagtgccaccagtacatgggcttccacccccgctaccagctgtatgagtccaccctgcacgcctttgccttctcttactccatgctaggagaggagatccagctgcacttcatcatccccaagtccaaggagcaccactttgtcttcagccaacctggaggccagctggagagcatgcgactacccctcgtgacagacaagagccatgaatatataaaaagtccgacattcactccaaccaccggccgtcacgaacatgggctctttaatctgtaccacgcaatggacggtgccagccatttgcacgtgctggttgtcaaggaatacgagatggcaatttataagaaatattggcccaaccacatcatgctggtgctccccagtatcttcaacagtgctggagttggtgctgctcatttcctcatcaaggagctgtcctaccataacctggagctcgagcggaaccggcaggaggagctgggaatcaagccgcaggacatctggcctttcattgtgatctctgatgactcctgcgtgatgtggaacgtggtggatgtcaactctgctggggagagaagcagggagttctcctggtcggaaaggaacgtgtctttgaagcacatcatgcagcacatcgaggcggcccccgacatcatgcactacgccctgctgggcctgcggaagtggtccagcaagacccgggccagcgaggtgcaagagcccttctcccgctgccacgtgcacaacttcatcatcctgaacgtggacctgacccagaacgtgcagtacaaccagaaccggttcctgtgtgacgatgtagacttcaacctgcgggtgcacagcgccggcctcctgctctgccggttcaaccgcttcagcgtgatgaagaagcagatcgtggtgggcggccacaggtccttccacatcacatccaaggtgtctgataactctgccgcggtcgtgccggcccagtacatctgtgccccggacagcaagcacacgttcctcgcagcgcccgcccagctcctgctggagaagttcctgcagcaccacagccacctcttcttcccgctgtccctgaagaaccatgaccacccagtgctgtctgtcgactgttacctgaacctgggatctcagatttctgtttgctatgtgagctccaggccccactctttaaacatcagctgctcggacttgctgttcagtgggctgctgctgtacctctgtgactcttttgtgggagctagctttttgaaaaagtttcattttctgaaaggtgcgacgttgtgtgtcatctgtcaggaccggagctcactgcgccagacggtcgtccgcctggagctcgaggacgagtggcagttccggctgcgcgatgagttccagaccgccaatgccagggaagaccggccgctcttttttctgacgggacgacacatctgaggaagacagcggcgagttttctgaagagatgagtgctcagagccctcatgctgttgaggctaaagggaggcctggaacggtggggcgtttgactggaatggaccccagggactgtccaggtgcagcccctcctagtacacatgggcccccgaggccgtggtcctgggagccaggaagactccgcagtgggtgagaatgaaaacttgagactcccaagttctgggccagcccattgctctgggctgttttaaagcccatttcacgaggaacaaagatttacttcctgtcctgccattcgtgtgcttccatggacaaacctgatttttttctcttagttctaaagaatcttgggttattttgtagcggtgccagtatttcagtagatgggatttcagccaagtaggttcccctgtaacctcctacaaagcaatattccaaaggaacattttaactgtaaaggctggagacaagaaaaaataagtagatcgttttaataacaattatttaattgcctataagtttgctgtttcagaggctagcccaaaggcatcaaatttaataaagttaaacaaattgatttacttcagagcaaatatgatcctattaaaataatatagggtaaataccctacctcttagaaagggcaaaaatgcaaagaagctttctttaaaactaaaagggttttttggggggggagttggcggggaggaaataaggctaacagaggttgacctaaaattagccttacaaaggagaaaggaccacattgcttacttgaaacagacaatgaaaacaaccaaagtgatatataaaatagttgatgagaactagacttatgactgtagtttactagagtttagttttcagttgctgaagtagctcattttctcttactaatgtttggttcctcagggaagaatctcacttgactagagaggaggtgggaacagaagagagaaggaggcagggagatgtatttcttagggctcaccccttcacagactgacagaatggttttgttttgttttgttttgttttgttttgtttttgagatggactctagctctgtcacccaggctggagtgcagtggtgcgatctcggctcactgcaagctccgcctcccgggttctcaccattctcctgcctcagcctcccgagtagctgggactacaggcgcccaccaccacgcccggctaattttttgtattttttagtagagacggggtttcaccatgttagccaggatggtctcgatctcctgacctcgtgatccgcccgcctcggcctcccaaagtgctgggattacaggcgtgagccaccgtgcctgccccagaatggtttttaaagccacagttgagaggccacccattgcccggcgcctggacagtgatcatcttgttcatcttgttcagtcctttcttgtgtgattggaattattcatcccctttgaaagatgagaaggttgagatgcaaagagtctacctttccaagttctcactgctggaaagagctagaagcacagttcaaagttctggcttctggactctgcagtccaggtctcccttctcccacttgcctaccctcaatgccacactgtttttgaagtggcccataacttgaaggaaaagtttaaagacagttcaatttaatcatcagaatgcattcttttttttttcggagacggagtttcactcttgctgcccaggctggagtgcaatggtgcaatgacctcggctcactgcaacctctgcctcctgggttcaagtgattctccagcctcagcctcccgagtagctgggattatgggcgcccaccaccatgcccagctaatttttgtattttttttttttagtagagatggggtttcgccaggttggccaggctggtcttgtgaactcctggcctcaggtgatctgcccacctcatcctccaaaagtgctgggattacaggcatgagccactgcgcctggcctcagaatgcattcttacacatctatcctagacatttataagcactctaatggataacaatccaagaataaatgattgtaaaagatgatgccgaagagttgatgtcaatctttttttcctaagaaaaaaagtccgcgagtattaaatatttagatcaatgtttataaaatgattactttgtatatctcattattcctattttggaataaaaactgaccttctttaatcatatacttgtcttttgtaaatagcagcttttgtgtcattctccccactttattagttaatttaaattggaaaaaaccctcaaactaatattcttgtctgttccagtcttataaataaaacttataatgcatg

SEQ ID NO: 735 - DNA, 9165 bp, Homo sapiens
gagcgggtagcgcgcgcgagggcgttgggcgccgccgcgaggcggggaagcgcggggccgcggcggtgcgggttctagggcggcggccgtcgccgtcgcagcagcgccccgagcggggagggccgaggaggcccgacgagctggggatggagagtaccgggcccctcactgcctcagagcgcgtgtgcggctctgggcgcgcacagtgacggtgacggcacccctggcccggcagcgccgaggccgcttcgccagacagccagcggccggcggcaggccgggccatgagcggcaggggccgggccgggcctcgctgaccctggctccgcgcggcagcttccccagtttccgctccggtctctcggcatgagagtccgcccgggcccggggctgcggctgccccagacccgccgcacgctggcgcgctccgggcccgcggagccgcggtgctgatacctgcgccgcactgcgccgcccgcccgtccgctgtgtgccccgggggcgcggccatggaggtggtgggtgacttcgagtacagcaagagggatctcgtgggacacggggccttcgccgtggtcttccgggggcggcaccgccagaaaactgattgggaggtagctattaaaagtattaataaaaagaacttgtcaaaatcacaaatactgcttggaaaggaaattaaaatcttaaaggaacttcagcatgaaaatattgtagcactctatgatgttcaggaattacccaactctgtctttttggtgatggagtattgcaatggtggagacctcgcagattatttgcaagcgaaagggactctcagtgaagacacgatcagagtgtttctgcatcagattgctgctgccatgcgaatcctgcacagcaaaggaatcatccacagagatctcaaaccacagaacatcttgctgtcctatgccaatcgcagaaaatcaagtgtcagtggtattcgcatcaaaatagcggattttggttttgctcgttacctacatagtaacatgatggctgcaacactgtgtggatccccgatgtacatggctcctgaggttattatgtctcaacattatgatgctaaggctgacttgtggagcataggaacagtgatataccaatgcctagttggaaaaccaccttttcaggccaatagtcctcaagacttaaggatgttttatgaaaaaaacaggagcttaatgcctagtattcccagagaaacatcaccttatttggctaatctccttttgggtttgcttcagagaaaccaaaaagatagaatggactttgaagcattttttagccatccttttcttgagcaaggtccagtaaaaaaatcttgcccagttccagtgcccatgtattctggttctgtctctggaagctcctgtggcagctctccatcttgtcgttttgcttctccaccatcccttccagatatgcagcatattcaggaagaaaacttatcttccccaccattgggtcctcccaactatctacaagtttccaaagattctgccagtactagtagcaagaactcttcttgtgacacggatgactttgttttggtgccacacaacatctcgtcagaccactcatgtgatatgccagtggggactgctggcagacgtgcttcaaatgaattcttggtgtgtggagggcagtgtcagcctactgtgtcacctcacagcgaaacagcaccaattccagttcctactcaaataaggaattatcagcgcatagagcagaatcttacatctactgccagctcaggcacaaatgtacatggttctccaagatctgcagtggtacgaaggtccaacaccagccccatgggcttcctccggccgggatcatgctccccagtaccagcagacacagcacagacagttggacgaaggctctccactgggtcttctaggccttactcaccttcccctttggttggtaccattcctgagcaattcagtcagtgctgctgtgggcatcctcagggccatgactccaggagtagaaactcctcaggttctccagtgccacaagctcagtccccacagtctctcttatcgggtgctagactgcagagcgcccccaccctcactgacatctatcagaacaagcagaagctcagaaaacagcactctgaccccgtgtgcccatcccatactggggctgggtacagctactcgcctcagcccagtcggcctggcagccttggaacttctcccaccaagcacttggggtcctctccacggagttctgactggttctttaaaactcctttgccaacaatcattggctctcctactaagaccacagctcctttcaaaatccctaaaactcaagcatcttccaacctgttagccttggttactcgtcatgggcctgctgaagaacagtcgaaagatgggaatgagccacgggaatgtgcccattgcctcttagtgcaaggaagtgagaggcagcgggccgagcagcagagcaaggcagtgtttggcagatctgtcagtaccgggaagttatcagatcaacaaggaaagactcctatatgtcgacatcagggcagcacagacagtttaaatacagaacgaccaatggatatagctccggcaggagcctgtggtggtgttctggcacctcctgcaggtacagcagcaagttccaaggctgtcctcttcactgtagggtctcctccacacagtgcggcagcccccacttgtacccacatgttccttcgaacaagaacaacctcagtggggcccagcaactccgggggctctctttgtgccatgagtggccgcgtgtgcgtggggtccccgcctggcccaggcttcggctcttcccctccaggagcagaggcagctcccagcctgagatacgtgccttacggtgcttcaccccccagcctagaggggctcatcacctttgaagcccctgaactgccggaggagacgctgatggagcgggaacacacagacaccttacgccatctgaatgtgatgctgatgttcactgagtgtgtgctggacctgacagccatgaggggaggaaaccctgagctgtgcacatctgctgtgtccttgtaccagatccaggagagtgtggtggtggaccagatcagtcagctgagcaaagactgggggcgggtggagcagctggtgttgtacatgaaagcagcacagctgcttgcggcttctctgcatcttgccaaagcccagatcaagtccgggaaactgagcccatccacagctgtgaaacaagttgtcaagaatctgaacgaacgatataaattctgcatcaccatgtgcaagaaacttacagaaaagctgaatcgattcttctctgacaaacagaggtttattgatgaaatcaacagtgtgactgcagagaaactcatctataattgtgctgtagaaatggttcagtctgcagccctggatgagatgtttcagcagaccgaagatattgtttatcgctatcataaggcagcccttcttttggaaggcctaagtaggattctacaggaccctgcagatattgaaaatgtgcataaatataaatgtagtattgagagaagactgtcggcgctctgccatagcaccgcaaccgtgtgagcagcaggctcatcccgtggaccggtggtgggaacgtgaggtgatgcctttgggattacagcttgagttctgtcaccccatccccaggaaactgtagcttcttaactggtgactaccaaagaacaagcagtgatttgaaaaaggaaaaacaatccaaaaactacatatttgtaggaaatctgccttattggagaaaatcaccctttccctttttctttgtagaagcaggagcaagagtgtttggctcccagtttggacttggtgaataaatgtaccttagaactaggataatcggtacagttattcttaaagataattaaaaatgaaacaaagtgagtgctcgtcactgggttcatcagagcagtgtgtgaaattccatgtgtttgctgaggtgtaaaggtaaatgtattcacccctcatccaggcagtttgatatttggagtaagtttgtttaaatctgagcatgcatctttaaacagctcaggaagaaatagcttaagaagaagtgaaacatggatcttggaagaaattttgaaatcttcaatttgatcctaatatggatacatgttaatcttccaaaatctttcatattgcactaatttattaaaacaactgtgtattggattttgtaatttaactaaggcacaatggacttgtttaaaatattttacttgattgtatacatagaccctttccagaattcacatgtaatctccagtgaacttttaagtggttaaaacttgtattcatgtgaacctttgcacattttttttttttacttctttatctacacctacagattttctcagtaatgtttttgttagcttttggttccattttttattgtgcatgcagaatgtacattgatgcctgtgaccttaggtttattaaaggctaggtttatttgggcagtattagaaacaaaatcatggatcaagagatactcttgataatttgaatagggccaaaacaaagttggtgacctaaaggcttgttagtgatgtggagttcctacatgcagtgagtggaaaatgaagttcgttttctcttaggaaaatgggcagctgtcttctgcctaatgtgtatttttcatgttaattctgacagttcaccaaatagctagtcatggagaatgcaggcagttaacttaatatccctccaggaatggttcctacgttgtgtattacttggtttcttttacttacctgcttgaatacttgaataaaccattcaccaattttaatccttttattttaatccttttacataaaataatctgaactctttgacaaattgcacagagctctttggcattaatctaattttaatgtactgataaaaacaaacatggttttcctttactttgacaaagtaatgtaatttttaccttatttatctgtatgaaattccagtagttaatttgaacatttatttatatgacgtttgtatttttaggtctttaatacagtgtttctacctctcatttgtaactgcatgcattattcttgaaactaggtaaaactcactgaattgttgtgtaatagcctttttattattgcctgtacaaatgtatattaaggtaaaataaaactgacaaagtgtttctagggtgtagctgggtacatattaagtggcttgttgagccaggtacttccttagtgagtttagagacttggccatgaatatcctttgtcctgccccaggatttagatcttggctactgtcatgcaggcttccaggaacatagactgttttacctccacaaccctatttgttattagtgatactttattttatataatattttttattcacagtgaaatttcattcatgttctttcagttatcacctgtgttatctcagttgtaggtttattctatcctctcctcttcctctcccatttcttttttaagacaggatgaaacaggttcagagaggggaagtgattggcctaaagtcaggaactaggcaagtggtcaagccatgctttgtgactttcaagttaattcttcttgttcttgtatattaaaggtcttggggtagatggtgtgtgtgaaacagtgaagtctcaacagcagaaaagaacaaaatgtaaattcatgaataatggttctggttatacttccattatcaaggctaattaagagattttgccttgagtatagcaataataaacaaatgctttatgtttccctgagtatttttaaatttcatatcgtgtttcatagagtggaaatgtaccagttcatacattcatgggttgacacctgtattcaagccataacctggaaaattgctgaccagctattcctgctctaagggtttgctttaactataccctccactggactatatatagagagagagcctatgctgtatatagttggtttcccacagtccctgtcccctccttccattgagagaagtaactagagcaacagttgttctccctcgctggagtggtgaataggagccgggaggaggggactgttagggtcgggctgcctcagtctccacagtaattaagaggaaattgagttggatacagcggacatgaggcctggaatgggtaccccaaacccatgcatcttaagtgtctgggtccccacgcccccttctgcctgccaggagtactctgtgcagccatcctgtaactgcttcagtccagagaaggatagcatccatccctccctccagctcgcctctctgctgaggctttctcctctccactcagcatttgcaacagcttctctcctggcacttgtctgggaatatcaagttaaaaattacaacacccaattttgataactttagttgagagaaacaacctctagtgaagactgataagtaacttattgcccgtagtcccatgttcctttgtctccaccaagaggaattaccagcccagcagttctgccctcactagagtcccgtccaggagcttgagaggagaggatttttagggctggattgcctcagtctgcacagtaataagttgagttagacacagtggacatgaggacctggactcagatatctgaagaatccttattatttttttgttggcttgttttgagacagagtcaccctgttgcccaggctggagtgcattggcgcaatcttggctcactgcaacctctgcctcccaggttcaagtgattcttcttcctcagcctcccaggtagctaggattacagacatgcgccaccacgctcagctatttttcgtatttttagtggagatggggtttcaccatgttggtcaggctggtcttgaacaccagcctcagcctccccaagtgctgggattacaggcatgagccaccgtgcccggccaaaatccttaatgtttttgttttttggtttttttttttgagacagtcttgctctgtcacccaggctggagtgcagtggcacaatcttggctcactgcaagctccgcctccggggttcatgccattctcccgcctcagcctcccgagtagctgggactacaggcgcctgccaccacgcccggctgattttttgtattttttagtagaggcagggtttcaccgtgttaggatggtctcgatctcctgacctcgtgatccgcccgcctcggcctcccaaagtgctgggattacaggcgtgagccaccgcgcccgggctatccttaatgttgatattagtggttagcacatgttttggaggaggacttcacactttttaaactatgctccctcgtattttctataagcagtcttaaattctttctggaataaagcaagattgatcagtatttctcaaggaggattatttggcaggcagtagctactgctcagagaacttggtattgttacatgcatcctggaagtatctgtgcctatttctagacggcctcagaccacttttttctgagtcctggacccttgaatctgcagccaagcaagctcttgggtccctcccaagtctcatgtttagtaaagccctgtgagaataattttattggtggaggagtcaagatgatacttccctcacctgcatcagaggaaaccacatcagaaacaatccacctagaaaaacactgcatacgggaaagctgacaacttgccctgagaaatcacagctttggtgcaagaggtgaagccgaactggtaaaagatcaaagtgaattcagagatcaaactgtactagggaaaggagcagaggctgagatcttgctgccagcgtgacctctcacagagtggcccagcagaggctgtgcagagatggccagagccaggacccagccctgtggagcccctgggcacatgtggtcccgagtgaagccgtgcctgttgctctgaacaggtgggatcaatctgtaggtttttccacttttcacagagtgtggctctctttaggtctgcactccctctctgcgcagggcggacctccctgggctctgcagcatgatctcctgtcccaagacagtcgtgctcttggacagttagcttctgtcattaggaagtgcccacatgagctcttgtttattggaaaccgtgttctatgcctcctttggggtttctgcaactcaatttggcaggtagcttagtggtccacttggtctcaaattccagctccaccatgtgcagttgtgtgttctttggcaagttcctcccctcctccgaatctgtcagtgggggaagagtgcatgtctcacagagttgaggtgagaaataagttaatgaatatgaaattctttgcccagcccctggcacgtggaagggctcagcaatcctgtatccgttgtagtggtcatcactctgtggctcttcactgcttttgttttgttttgggagggggtggagaacaatttgttctgtgtttgtgtggggcaaggcctgtcttcagggctctctccaaccacgtacgctctggctggagcttctgaaaggacacagttcttgcatagaagttgctttctccagcttgcccaccaggcagtctggcttcagacatctatgttgcccttttaagtcaatttggctgtttaagtggaatgtttgtgtcagtctgataattgttaattcatttgatcctcataccaacccttacttgcctccttttacagatggaaaaatcaaacttggacagtaatttccacaaggaaaagccccacagctggaaagcggtgggagcaggaggccacactgggtacaggagtacccatctccccacaggagccccacactgtctcacccttaggaagcccaaatgctcactccttgagtttctaatgcattctttctgatgtacaggaagaggggaaggaaggaagagcttttccatttggtgctccaatgtctcctgctggacccatctgcctagtggaaggcagcaaaatttcaagaaacaggtgaggttgagcagcttggtgcaaccccatggggcctggagttggagctcaacagcaatggatttcagagaccaccctgaaactcccagtaaaaaagacttgggagacatgttaataaactcaagcatttgatcgacccaaaaaaaaaaaaaaaaaaaaaaaaaaa

SEQ ID NO: 736 - DNA, 6456 bp, Homo sapiens
gggtcctggagctctctcggcccggcaggtttcgctcccgcccctccggccttccacagctgtcctggccgcagggtgttcaaggcgggacacaccaggctagagatccgcgatcgggccccgcctcaggctctgtgcacacccctgcctggtgacctccattggtgctccagcgtgaacatggtgcaaagataccagtctcctgtccgagtctacaagtacccgtttgagctggtcatggcggcctacgagaagcgtttccccacgtgcccacagatcccagtcttcctgggcagcgaggtcttgcgcgagtcccgcagcccggacggggctgtgcacgtggtggagcggagctgccggctgcgcgtggacgccccgcggctgctgcggaagatcgcaggtgttgagcacgtggtcttcgtgcagacaaacatcttgaactggaaggagaggacgctcctcatcgaagcgcacaatgagaccttcgccaaccgcgtggtggtgaacgagcactgcagctacacggtccaccctgagaatgaagactggacttgcttcgagcagtctgcctcactggacattcggtctttctttggctttgaaaatgccttggagaagatcgccatgaagcagtacaccgccaacgtcaagagggggaaggaggtgattgagcattacctgaatgagctcatctcccagggtacctcgcacattccgcgctggacgcctgccccagtccgtgaggaggatgcccgcaaccaggctggaccgagggaccccagctccctggaggcccacgggccccgtagcaccctggggcccgctctggaggcggtcagtatggacggggacaagctggatgcggactacattgagaggtgcctgggccacctcacgcccatgcaggagagctgcctgatccagcttcggcactggttacaggagacccacaaaggcaagattcccaaagatgagcacatccttcggttcctgcgggctcatgacttccacctggacaaggcccgggaaatgctgcgccagtccttgagctggcgcaagcagcaccaggtggatctcctccttcagacctggcaaccccctgccctgctggaggagttctatgcagggggctggcattaccaggacatagatggccgccccctctacatcctccgcctgggccagatggacaccaaaggcttgatgaaggccgtgggggaggaggcgctgctgcggcatgttctctccgtcaacgaggaaggacagaagcggtgtgaggggagcacaaggcagctgggccgtcccatcagctcctggacctgcctgctagacctggagggactcaacatgcggcacctgtggcggccgggggtgaaggccctgctgcggatgattgaggtggttgaggacaattacccagagaccctgggtcggctgctcatcgtgcgagccccccgagtcttccccgtgctctggacactgatcagccccttcatcaatgagaacaccaggcggaagttcctcatctacagtggcagcaactaccagggacccggaggccttgtggactatctggatagagaagtgatccctgacttccttgggggagagagtgtgtgtaatgtccccgaaggagggctggtccccaagtccctctacatgacagaagaggagcaggagcacacggaccagctgtggcagtggagtgagacctaccattcagccagcgtgctccgcggagccccccacgaggtggccgtggagatcctggaaggagagtcggtcatcacctgggactttgacatcctgcgaggggacgtggtgttcagcctgtaccacaccaagcaggcgcccaggctgggcgcccgggaaccggggaccagggccagcgggcagctgatcgacaaaggctgggtcctgggcagggattacagccgtgtggaggctccccttgtctgccgggagggggagagcatccagggctcccatgtgacccggtggcccggcgtctacctgctccagtggcaaatgcacagcccccccagcagcgtggcctgcagcctcccgggtgtggacgatgtcctgacggctctgcacagccccgggcccaagtgcaaacttctctactactgtgaggtgctcgcctctgaggacttcaggggctccatgtccagcctggaatcctgcaccagcggcttctcccagctcagcgccgccacctcgtcctcctcctccggccagtctcatagcagctccctggtctccagatagccgggcccagtgtttcagggccgcccgctcgcctccagtgtccagaaatgtccagaatgagaagccagctaactgcagggcctgggaccatgtgggctggagccccaggcctagatgctgcccaagttggggtgtctggagcggatggcaaggatccagaactggcctgtgggtggtgtcagggctcttgaaattgcaaggacagaaccatctccttccggcttcgtgtaaggaagaccaagccaaggccaaggtgtctaccataccacacctttgggacatccgggcttagcgacgtcagccaggcccatctcctctctgtccacctcttgctctgctttcgccatgcaggggaccatcactatcaggtgcccttctcctccctgcagcttgcctgcataagagagcctcttcctcccaaaggctccagcccacttcccagagctgagtcttagcctggaagggggagcgattgccaggtcaattcctgaaccaatcacagttgccaggcacactggagaatgctgattggccagcagggtcatgcccaatctggaccaatcaccgtgatccagggttgcagtgaggtgcagtgattggccagcctggatcacatgcacatctctggaaccaaccacctgctctcaaaagcactagtgggtgcctcgaggagtactggggtcccccctaagaagaaggaggaaggatgctggggaggcagaaatgaagggtgtttaccttggcatctgattgcataacgttctgttatgcagtatcaagatgtgcttggtgagcagttaagtgagttacaggcgctgctctttgtggggaacagcacatcctgaagtgaaaatccatgttccctgcacttggccagcatggcctaagcctgaccatccctgattggagagggtgggagagccctgggtttctgctaagttccaggcagtgatggggtgactgaggctgtctgtataccccactggagatgcctttctctcctagggaactgtttaattatgactgtttttggttgtaagccacagagacccatgcccaggtgcttcaacacaaaagcatgatcattcatgggtgcatagaactggccagtccaggagggcttgcttcaggtaaggctagatccagggtctcaacatggagtctcgattccccccgcgagtggaggctgctgtgtttgccctggggcagatatgactctggaactaggttcaatattgacatgagttcccctagttactacacaggagcgtcttgggtctccttggggcctgaggacatttctcctttcctttcctggactccccaaaaggcagccagtcaggggtcaccaacttgaagcctgatctggcctgcttttagtgttgcttttttgcctttagaatggtttaaaaattgaggcatttcgcatcgaaatcaggatttctggcttcccttaggcatttgggagcaccagcagaatggggtcactattgttgcatgaagacaacacctctgcacccctggatgtggccacgccagtccctaccccattgacttgcgcccagcccacattacacatcctcatgacctgcgtggcaggagtctcactgacatggctctgtcagcagtggctggtacccttgtctcctggccttgcttagagttggggctcatctctgctgcagtaactgagccaaggggtggttttgtggccacaagaatcatctttatgcaggctcagcaatgcagggccaggaaacttatatctacgccagcctcaaccccaaacccaaggaagagagaaagtgtcatcttttcagatacatccttcttcctgctgggagagagccttgcccaccttcctgttggctctctgtccgcttctcaggtatctgaacaaaatagattgctttgcactctgcgtcaaggtgtgtgtgcacatgtgtgcataagagaccgactgattggaaggagacgttctcaaaactaattgctcccatatcaccaggcatttattgctgagagcaacttgcaatattttcaactatctttaagtgaatttctagcttttctcttaaaaactaggtgttatcctacaagtatgctgggataagctgccctggcagtctttatacatttattgtctagccccagagaaggacacagaagccttttacggaaggaagctggaactgcctgttccagaggcgggtggggggaggggagtctgctatcagctgtccacccttaacagtgggggtgaggaacctcaggccctttcagttctgctcttgagagtgctctctccctagggaaaaccagcccaaactggcttaagcaacaaagcaaattccctgggtcctgtactagggatggctgaaggtgggtgctgcttcagatatggctggatccaggagcttaatgtcctcaggcctctcaactgcacccaggcctcttgactctgcatctctttgcatgctgacctcattctttcttccacctggcgggaaagatggctgccagcagccccaagcctataatttcaggattcacactctaagagatgcttttccatctcaaatctcatggaaggctctgattggcccagctcgagtcacatgcttattcctgtgggccacactggcaaggaactagggtcccgtgattgacattccctgcagaagccgcagcaggattggggagggccattcccccaatggacaagagaagctggaccacagaaccagcaggtatccatggtggcatctgctacggccggctctcctcccatgtggaggtctcggggacccacgtggaagcattatcaaggtcattcttcttgccttcgggaggactggaattaaaaataatccaaggaagggattgccaagcttttggcttttgaatttcccctgagccacaaaggctggaagtgccttggcttgggcttcttgcatcattagttcattaatccattgtgaccaggacagaagcaacccacaagcagcattactgttggtgtttgggcacctgggccttgaatttaggccaggactcaaaccccagccttcctttcactagctgtgtaaccttgaccaggtgacttaacctctctgtgcctcagtttcctcatctgtaaagtgaggatagcagtgcctacctcaataggttgtagtgggacgaaatgagggagtagctgtaaagctttcagcacagctcccagaacacagaaagcgctccattaatgtcagtggtcattctgattacttaatgcttcgcatccaaagactcgttttcttcctgaggtcgcctatccctgtttttcgttattgcacccagagaaaagtaggtgtcaagaattattgccctctgagttgggtgtgcagtctttctcttttagaaactgcttgtgtgggcggggcgtggtggctcatgcctataatcccaacactttgggaggctgaggccggctgatcgcttgagtgcaggagttcaagaccagcctgggcaacatagtgagaccctgtctctacaaaaaattaaaaaatgagccaggcgtggtggtgcgtgcctatagtctcagctgctcgggaggctgaggcagaaggattgcttggaggtcaaggctggagtgagccatgatctcacccctgtacttcatcctgggtgacaaagcaagaccctgtctcaaaaaaagaagaaagaagctgcttgtgttttctgggtaagtccacccatctgagggagtgtattctgagtggtatttcccttggcagttagaaaatgttttttcccagaggttgaagtatggagagtttgagactctttttttctaccctgcactctctggaattccccctccctgctgtaaaatttattgtccaatgagaatagtataattgttttcaacaaagtctctttgagccagtgaaacacgatgggtttttttgtttgcctgatcacttgctccaaccagcagcattaaatgttttccatttggataaacttgcatcgtcagcttcctaaaaccctggaggtttcccgtgggctcgttcaagaactttccagctgttgtttaaaagactttagagctagcttgttcagcctgtggcctgcaggctgcacgcggccccggactgctttgaatgtgctccaacacgagttcgtaaactttcttaaaatact

SEQ ID NO: 737 - DNA, 4150 bp, Homo sapiens
gagagaagtacacacgcaccccctcactgcctactcctgctttcgggagcctgagtcattcctgccccctcgtagggttccccatttcccggtgcgcgggcaccctgagacagccttgggaattcgttcgcgtccccttccacctgggtccccttccccagtttgcgccccgtaacactcagccaaggacttcctgtgggtcccaggtcaggggccaaggggtcctggaccgctgccacagccccggtgcgcccgggggaggcgcttccttttcctgaactctgggatcctgcgggaggaagtggggaagttgggcgggggtgcagccgagggcgtgccgactgtggaggggccgaccctcgcgcagctctgggccttccttggggaggagctggggtgccagaggcccaggctgaggagcttggcggcgaggtatttggggaagtaaggcctggggtggagaagcgcggaggaatgggccgggcccggctgggaaggcagccctctcccatccacaggtctccctgggttctggcaggagcctgcccctgctgccggcctggcttacttgtccctacttgtcaacaccctggcagcggggtcttcacctggttccagccccttttccccaaggcggcagagaggatggggctgaggagtctgggaaggggccatgggagtccctgctgagctcggggcaggaagtttctgggttgcatcttagccggccccagggagtgcagagccagggagaggggtaccagggacaaaccctagacagacggccctgtccacggttgctcctgctctcctaggaggccccgtgtgggccgcggcccggccctcaccatggagtccatgttcgaggacgacatcagcatcctgacgcaggaggccctggggcctagtgaggtgtggctggacagtcccggagacccctcgcttgggggcgacatgtgctccgcctcccactttgccctcatcactgcttacggagacatcaaggaacggctggggggcctggagagggagaacgccaccctccgacgccgcctcaaagtctacgagatcaagtacccactgatcagtgactttggagaggagcatggcttttctctgtatgaaatcaaggatggctccctgctggaggtggagaaggtcagcctgcagcaacggctcaaccagttccagcatgagttacagaagaacaaggagcaggaagaacagcttggagagatgatccaggcctacgagaaactctgcgtggagaagagtgacttggagacagagctgagggagatgagggccctggtggagacgcacctgcgtcagatctgtggtttggagcagcagctgcggcaacagcaaggcctccaggatgcagccttctccaacctgagcccaccgccagcccccgcccctccctgcactgatttagacctgcactacctggcactgagagggggatctggcttgagtcatgcaggctggccgggctccacacccagtgtgagtgacctggagcggcggcggctagaagaggctttggaggccgcgcagggagaggcccggggggctcagctccgggaggagcagctccaggccgagtgcgagcggctgcagggggagctgaagcagctgcaggagacccgggcccaggatctggcctccaaccagtcggagcgagacatggcgtgggtgaaaagagttggggatgatcaggtgaatttggcgctggcctacaccgagctgacggaggagctgggccggcttcgggagttgagttccctacaggggagaatcttgaggactctgttgcaggaacaggcccggagtggcggccagaggcactcgccgctgtcacaacgccactccccggccccccagtgcccctccccctccccgcctgcccgagcggctcccccgtgccccccgtgccagtcccccgtcccccagcgccgctctcccgtgcccccgtgcccctcgccgcagcagcgccgctctccggcctcaccctcctgcccgtcgcccgtcccgcagcgccgctcgccggtgccgccgtcgtgccagtcccccagcccgcagcgccgttccccggtgccccccagctgcccggccccgcagccccggccaccgccgccgcccccgccgggcgagaggacgctggccgagcgcgcctacgccaagccgcccagccaccacgtgaaggccggcttccagggccgccgcagctactctgagctggcggagggcgcggcctacgcgggcgcctccccgccctggctgcaggccgaagcggccactctccccaagccccgggcctacggcagcgagctctacggccctggcaggcccctcagcccgcggcgcgccttcgagggcatccggctgcgcttcgagaagcagccgtcggaggaggacgagtgggctgtgcccaccagcccgcccagcccggaggtgggcaccatccgctgcgcctccttctgcgcgggcttccccatccccgagtcgcccgccgccaccgcctacgcccacgccgagcacgcgcagtcctggccgtccatcaacttgctgatggagacggtgggctccgacatccgcagctgccccctctgccagctgggtttccctgtcgggtacccggatgatgccctcatcaaacacattgactcccacctggagaacagcaagatctagggcaccagccccacccactggctgtttctccgtcctctcctatcacccccaaacactcactttgaatgctgcatgaatctcgtggggggtccctgcccttgcgacccccagatacctccacttgctaccgagtcaacgtgtgtgccatcttccctggtccaggcaccactcagctctggctcttcctgggaggtcagccgaggctccccccatgctcctggtttctgcttaggaggtggggacttgggctgggatggggacggcatacccctcccaggcctctccctctgcctttctgttcttaatcagggttggatccaagaaggtgtccagtgcttgggcctggggtggggggaaggtgttagaggactccaggagctcctgcacccctccccaaatgtccatctttctcagacggggctctgtctggggagcacccacaggctgcctttggggtcccagagcctgctctgtgcactgaccccagttcctccatcctgtggccagcctagggctcatggcatgggcccccactgggggagggaggcatcttgtttcttgtggttccctgcaggccagtcctgtcctcctttccctgttctgcccactctggggaatagggaggggaggagaggagaggagagggaggatcctggaggactgggaagatctagcctaaagaggcttctctgagggccagggccctacagcatgcccctacggccaggggactgtctgccagcctcccaggcccatgccctcctggtgcccctggcactgaggcacagatcgtcaaggcaggtaccccctcaacccttcttccactggagcccctgacaccacaggtgccctggagcccttgtgtgactcagcctctgttagctgggtgggtgtcatcagcccctgcctcccaggccagaacctgagaacgggcccagggtgctgtggagatcaacttcaaaagagctaaccccttcccacactccacccacccacctacatttcctctgtgaaatctacctcagagttgtaccctcagaaggacgggtaagcaggaggccagggggtccccagggctgaggtggggagccttctacggcgaaagcctgccaccccacaatgaatccaccctgctccactgcgcgcctctcccaggtctcagctctgggtggggagcagtggccgctaccgacagcgcatgtcccgctcttatccaactcttccaggccccacctccctgcacccctcccctctatagagcaggggagtgaaggggtatgtcaggcggggaaggggccaaggacacgtcattgtaccctgagcgtccccagggagtggaaatggggaagggggcctggagaggggaggcaggggcccctgtgctctctgaacaagttgaaagtccaaataaaacttacctgttccatctgtgctcaaaaaaaaaaaaaaaaaa

SEQ ID NO: 738 - DNA, 7233 bp, Homo sapiens
cgtgggctgctgcggagccggcagcgcaggcgggcggagcggagctgcccccgtggtggcgggcgatgcccccgtgagcctccctcgccgcccctccccgccccgcgtgcctatccactcggagtccgcgccagcctggggccgggccgcgcctactgccgggttcgcggggcggggtcccggggcagcacctgccccgccttgcggagccgcctcggcctgtggaggccccctccctgtctggaccccggccccacctccggacccttttatcacatcgcctcctctgggagcctgccctgattgccttcacctcatttcttgaaaattggtgttttggcagaagtcaattgaagccttgtgcaaatgccctaggggtgtgctgttgggaggcagccccctgtgatgcggaacaccaggctcagattcatcagttcgagctgcctgaggccctgccaccccggggaccatgtttaacggggagccaggtcctgcctcatctggggcctccaggaatgtggtgcggagctccagcattagcggtgaaatctgcggatcccagcaagccgggggcggggctgggaccaccaccgccaagaagcggcggagcagcctgggtgccaagatggtggccatcgtgggcctgactcagtggagcaagagcacactccagcttccgcagcctgaaggggccaccaagaagctgcgcagcaacatccgccggagcacggagacaggcatcgcggtggagatgcggagccgggtcacacgccagggcagccgggagtccaccgatgggagcaccaacagcaacagctccgacggcacgttcatcttccccactacccggctaggggctgaaagccagttcagcgatttcctggatgggctgggaccagctcagattgtggggcgacagacactggcaacaccacccatgggagatgtgcacattgccatcatggaccggagtggccagctggaggtggaagtgattgaagctcggggcctgacccccaaaccaggctccaaatccctcccagccacctatatcaaggtttacctgctggagaatggggcctgcttggccaagaagaagacaaagatgaccaagaagacctgtgatcccctgtaccagcaggctctgctctttgacgagggaccccagggcaaggtgctgcaggtgatcgtctggggagactatggccgcatggaccacaagtgcttcatgggcatggcccagatcatgctggacgagctggacctcagcgccgcggtcaccggctggtacaaactcttccccacctcctcagtggcagactccacactcggatccctcaccaggcgcctgtcccagtcttccctggagagtgccaccagcccctcatgctcttaaggatgtcaggaagaggccaggatggtggtgtggggaggggtgcctgctggccccatgtcctcccctgtacatagtcttcgtgtctttctggaccccttgtcctgctgcatgcctgttggctactgggctcatcccagctggcagtggagactgtagtgtgtgcgtgtgtgcgtgcgtgtgtgtgtgtgtgtacgtgaccacgttctatctgttcatttgtctgggtatagtcactcctggtgatgatatgggctgaaatgtctccacgtctctttgtgtcttgttgaaaagaaacccaaaggagtgttgtgtggacatgactcaccctgaggagtctccagggatggaggtggggcatgcggccactggtcggtgctgcctggtcctggcctggggcagagcctgtgtgttcttcacctgtgcctgctcctggtggtctctgctttgttttctgtcttgtcttttgttccactcttgactctcccggctctgccactgttttctgagaaatgtagcatccgctgcagctggccacactgagggccctctgggaaccccaccccactggagccgctccggcagctcttcctgccactgaatgcgttctgcagcatgtagcatgcccacctagctccctggccagggccctggggaggcagagggtacccaggggactgagggcttagaaatgactttctctatgaggctggaacctcctccttcttccagtgaagcacgaggtcttggttccagggttcctggccaggtgcccccttagcatttgttcttcatctcctgtctcttcaagcctccccactccaccgtgccgaaggagctctgccagtgggcctgggcaggcagccacagagggcatgttatctgctaaagcaaacagtcctcctgaggccctgagggtggccctgaccccctcagggctcattcctggtgggcatgactcggtaaggaggttctgtgggtagggctgtttgctggaataaggagggctgaggctgagttgttccccgccactgttgaggatcccatctgacatttggggattcactgcatgaagttgttcatttggggctccagtttttgtgcatttccagaccagggtccctgtctgggagctcagacttagctgggctccagcagcctggctccggactctcgtctgccaccatcaccagctctgtctaagcaatacttacccctccgggcttccctgctttcctgtgccccactgctgccctctgcagagccatctgctccaggcacccacctgcctctgcttgctttctcacccatgtctggttggagcttctcacagccactcaaaccctgacttgatttgacaactgggccctgttggtggagaccagtgcctgaactggaccctgtgaaatctgtcccgtgggaatcctgaagtctgactcaggaatgcccagacctgtccctgtccctcctcagctctagggtgaaaggcgagaggttgcacaggacatggacagagcagcccttgggtttgtatctggtaggggagaaagcagcaggacagtggaggtgtgtggaaggcactctttccacctctctccaggcattatccccaggtgctgaaatggctgtggccccagcacctgaggcaggggtacgctacctggggtagcagtagaaaggtcttggggtctgaatgacttggggcctccattcataaccaaagttgtaggggcatggaggcagtggcgccttatggataggtcatctcagcccaaagggcctccttggctggcatggttctgtgttacgttgaagccagagtcttataacacctcccaagaaagataggggaagaagccagaaccccacctggcctgcccacaggacaagaagtgggtaagggcaggaaggaaatgaacggagttagctcccaggctcctatctctgcctgagcctctattcttatattatcagagaaagggaccattgggtgcatagagatggggaggaggccactgggctgaattttctctttaggcggaaatgctctccccaggcccattgcgttcgtcaagttcttggaaatggacaaagggctctgtcctcctcgaccctagtgggggatcaagaaggaaactccgttgcaaaagggtattttaatctcctgtttatgatatattcacctctagagcagtcactgtcagggtgttgcgaaaatactctacacctttgggatgatagggttgttagtgacccacaggacagtatagatgtttgtggatgtagcactgagtggtgatacccagaccagcagtcaccccaggaagtgggggctacccataccctcattcctctggtggggagctgcctgcagagaggcctgccactgggggttccaggccgtggtgacccttgcctctggggaagggttagcacaggggaggttctagctggaggaggggtctgatgtgctggtaacttgggctgacctacctacagtccctggctgccaaaactgctcagcagttgggccactccactattccacctctctaaaagaaggtaatttcctccccaaattgaccttggggaattattcttttaaccctttgcaccaaataagttactcatccccacctggattttaccccatgagggtaaagttgtgtgaggctgacacgtctgtgtgatgcagtgtggctgcacttaagggtctgtttctcagcatcatggatgcaggggcttgtctgaaaagccactctggacctagcctgtcccagaagaggagaatgcacaagtgtaactcctggttgtttgctggggtgggggagcatctgctgtttgaggacggggggtggggaaggaaggaacatgatccctccagaagtctcccaccctggggccaactcactgccatgttcagtgtcccggctccaaatgcccccttgcccagatgaaaccctgcagtggttacaggaatggagctctttgtcattccacctcctctggtcaggcgaggttcactgtgcatatggcagagacaggagtggccctgcagtgatgttgggttgtgggcagggacagtgatggatgactcagagcgtctgtctttgtatttctgctctgttcattctgtcccactttcttcatagactccttttccctgcaatgggtttttggtatgaaaaaggctccagtaaatggagccaagtcttggtttgacaaggggaacttgatccttcagggaagaatcatctccaaaatgactccccatctggtttcttctaccacccaattctactaggaaaggagcacttaggaggctcttgggatgcagcaagtcccaggcaatgccagcatttcatgggggctgaggcagaacccaggagctccaagaaaggccacccatagagctcatcctctgtggaatcactgccggttagaacactgaggtcaagccagtcctcccatggtcatgccacccaccagggaagcatgcctgatctcttctttactgccagccttgaggagagcagaagcctccatttttaaagacaataaagacctccaagggtacttctttggaaatgaaatgtagcacaatcttagcctacgttaccaggagccctgacatgcaaccagggtccctcttccatgccctgctgcccaggagttgctgagctcctcttcccctggggttccagccctcctaatacctcatattccccatcttcctcagcccagaaagcaatggggctttagtgatgctcctcttttgtgtctctctggttgcctctagcactgtgcaaactctgcaagaaattgctgcctttgcttgatgttgtagatgagttgccctccacctggctggagagatggcacatcattcagggccagaaggttgtccagcagtgtttctgcagtggctgcagggagatggaaaagaagagccctgcttccctgcctcctcctacctttctcttccactcctcagagttttcttctccagtatcctgacatgtaaagagattctttaaaatgctgcttcttctactggactgtctttcactgagtagtcagggaggagatgaaaatgtggacacatccccccgccttctccctcaaccttttcactcacgtcagaagaggttggggcaaaacaaaacaagcatgattgaagagcaggggaagcccacacaatcaggtgagccctgatgggggctggactggcctggtctggctgggaaaggattcttttaaaagcgtgcctgagcatctcagagcaatgtcagtgatgccaaagagagcaacttggcctccttgggcaccaactctgatggctgagttgcacaaacgtggctcagatgttggcatgcccgatggtgggaccttgttctctgataaagggcttaatctttccatgtagcaaagcaactttccctccctcccctccccccgaaccctgagcttgggcttgtgtgggcccagcatggctgtgcctgtgagggaagccacatcagtgagagaaagttgcattctctcaggggcctagattggcttggggcaggtgcttgttgaaaagcatgagtgtttctgctttgggaaacccttccagggctctggttggaaacttggccagtaaggacagggccttgggcctcccaaggagttcacaatgatgccaggaagggtccctgagcctgggttccagtcagcttggctaacagaatggggcttgggaattccaggggcaactgagcatccaccccattagccagtgatctggacagggacagctggctacagggaatcaaaggctgttctgtacagttttaccagaaactgtgaccttgggtaaggctcctcacttttctgggcctcaacttcctcatctgcaaaatcagagcattagctgctctccccatgattccctcccagttttaattaaaagtctctgatctggagcacatgagggttgcgagcctggtgcacctggttcctgtctccgtgggctggtttccttcagcccctgatgcccaggctgggtgcaggctctcatctggtccatgcccagatgctgcctcagacaagaactctgggaatcctaacagactctgctttcctctcttcgtggtttgtcctccctcttttattcttgtgtaatgatgagacataattaagggtcatctacaatggacaattttcaaggtgctgatgtgatgtcacaacctccgctacatcctgagtaagtcagtgtccccaacagcagatgaggctgggtctttcctcatttctgcttctgggatgacatcagtgggagagttgaagatctgagaattctaaaggaaatgttctctgatgggaggagagagggaacttatttcccttcaaagtagtttgcttcttaagaccactcctccctccagaatgtctttaaccagacatcatttcagaaggtggggcagctgcttccttaggaagagtgggcctgatagctcaaccaactcctttagcatgtaaactcacagaaggcaagaacccctttttttagactttccaaatgcatcctgcaaagagagagatagctgatagggactgacaagcacactgtttagataagaagcaattagccttttatatctgtgctctatacattttctatgtgcagcatctttcctaacttgttgtggttcccgggtggcaggtgcacagctgggagggactgccggctgtttcgtacaacattcttgccaattcccttgaggagaaaattcttcacatggcttctgcatgtacagtatttgggcagcaaaacatgattaaagtcagtttgaaaatgg

SEQ ID NO: 739 - DNA, 3901 bp, Homo sapiens
cggagacgagagaggaagcagccggcccgcccctgggttcgcgctctcgccgcctctgagggaattgaattgaggcgccgcggctgcgagagctaaaaaggaaggaggagccgccgcgggactgagacgggggcagagccgaagagaccgacacagagaaggaaacgaggaggaggatgtctcaccgggcggccagcgcctggatcagcccgtgactcttaacagcggcgggcctcagaccccagcgcagactcggactttgtctttgggggcccgtgctctgccctccccggtttccgacaggacccagaggagccggcgtgcctctctgccctccagccttcttcaccatgtccaagatgccggccaagaagaagagctgcttccagatcaccagtgtcaccacggcccaggtggccactagcatcaccgaggacaccgagagcttggacgacccggacgagtcacgcacagaggacgtctcttccgagattttcgacgtctctcgggccacggattatggccctgaggaggtctgcgagcgcagctcttccgaagagacgcttaacaatgttggggatgcggagactcccgggaccgtctccccaaacctcctcctagatgggcagctggcagcggcggctgctgctcccgccaacggaggaggagtcgtttcggcccggagcgtgtctggggcgctcgccagtaccctggcggcggctgccacttcggcccccgcccccggagcacccggcggcccccagctcgcgggctcatccgccgggccagtgactgcagccccatctcagcctcccaccacatgtagttcccgttttcgcgtgatcaagctggaccacgggagcggagagccctatagacgcggccgatggacgtgtatggaatactatgagagggattcagacagcagcgtcctgactagatccggggattgcattagacacagcagtacttttgaccagactgcggagcgggacagcggcctgggcgccaccggagggtcggtggtggtagtagtggcctccatgcagggggcgcacgggcccgagtcgggaactgacagctccttgactgctgtgtcacagctacccccgtcggagaaaatgagccagcccactccggcccagccgcagagttttagcgttgggcagccacagccgccgccgccacccgtaggtggggctgtggctcaaagctcggctccgctgccgccgttcccgggagccgcgaccgggccgcagccaatgatggcagccgcgcagcccagccagccccagggagcggggcccgggggacagactctgccgccgacgaatgtaaccctggcgcagccggctatgtccctgcctccgcagccgggccctgcagtgggcgcccccgcggcgcagcagccccagcagttcgcgtatcctcagcctcagataccgcccggacatttgctgcccgtccagccctccggccagagtgagtacctgcagcagcacgtggccggcctgcagccgccaagccccgcgcagccctcgtccaccggcgccgcagcgagccccgccacggcggccacccttcccgtgggcaccggccagaatgcttcctcggtgggcgcgcagctcatgggcgcgtcttcccagcccagcgaagccatggccccccggacgggaccagcgcaaggcgggcaggtcgcgccttgtcagccgactggagtgcccccggctactgtgggaggcgtggtgcagccgtgcctcggtcctgccggggctgggcagccccagtccgtgcctccgccgcagatgggtggcagtggtccgctgtcagccgtacctggtggccctcacgccgtggtgcccggagttccaaacgtgcctgcagccgtgcccgctccaagcgtgcctagtgtgtctaccacttctgttactatgccaaatgtacccgcgcctctggcccagtcgcaacagctgagcagccatacgccagtcagcaggagcagcagcataatccagcatgttgggctgcccttagcgccaggcacacacagcgcaccaacaagtctaccacagtctgacctaagccagtttcaaactcagacccagcctttagtcgggcaagtcgacgatactagaagaaaatcagaacccctacctcaaccaccactttctctcattgctgaaaataagcctgttgtgaagccgcctgttgcagattccctggcaaacccccttcagttaacacctatgaacagtctggccacctctgtattcagcatagctattcctgttgatggtgatgaagacaggaatccttcaactgctttctaccaagcgttccatttgaacacgttaaaggaatcaaagagcctctgggatagtgcatctgggggaggtgttgtagccattgacaacaaaatagaacaagcaatggatctggtgaaaagccatttgatgtatgcagtaagagaagaagtggaagttttaaaggaacaaataaaagaattagttgaaagaaactctttacttgaacgagaaaatgcactgttaaaatctctttcaagcaatgatcaattatcccaactcccaacccaacaggccaatcctggtagcacttctcaacagcaagcagtgatagcacagcctccgcagccaacgcaacctccacagcagccgaatgtctcctcagcataaagctttcttaagcctcattaagaaaaaaactgaaagcaatctatccttgtgtgccactggtgttctttccactttatacgaaagcaagtagccatgctttggttgtgtgtttggccttttcagtattagacaatcattctacaagagcttttcctctctctgagatgtcatgcagcgctgttgatgtccagttctatgtcatcagtacacaaggagaataatagatggggtttattaaagcgagcaaagtctgcattttacctggtgcgcatgagtggggtctttaagagttttggtggctctcccatgtttcctattacccatggatttaccctgagccttcctatcacattataaataacagttcatctaaagagccacttttctttctgattcagtaacatttgcctacataagttttcatttatttgtgttttatttattacagggctgctattttcataatgtacatgaacaatgtcacagaacttttttaatttttttgaataattataagtatcagtaaaggaagtgaaagacaggattgcatttaatagataaaacgtttaggcaataattgaacaaaagaatcctggcatatttctaacactaatggcaatttacttatggtatttattttcagtagtaaagacccagcttgaatgtaaattttgtatagtgtaagtatgaagaacatagtgcaactgtacaggtagtcaccagttattgtgatatgataaataattgggctattttgatgaagaaaactttgttcatttgtttctactttctaagagaaattgccacgattcctctgcttttcaacatttcgtatgacttttttttcgggtgggaataaaaagctgtgaaattgttcaacctactttgtaaccaaagaagcaaagctgtgtaatggagtttggtttttttttgttgtttttttttttttgtctttttttttttttataatgcacattctttatgtatttttatttagtgttttctcagtcacaattttctttactgtctagcatgatctgcatgacctataatctttgaaccactttcgtacctcatgtttttatccagcactcttattgtaatatgtactagtctgtgaacaatgtcaaataaaagagaacgaacaggtagtttggtggagctgagctagtgtacaatacactagttgtaaaaaaaaaaaaaaaaaa

SEQ ID NO: 740 - DNA, 4015 bp, Homo sapiens
gtccgtcaggccgtgtgtcccaggccgtcgaccccgctgtcgcgctgcgtctgctccttgcatgcctttagatggtacagccttcagccggggcttcgggagacagtgcagccaccgagcatctctgctgagcttctccgccgatcctccttttctagcaggcagctcttctaggccacgtccaggtcgagggggaaaatggcgccggcgcccctaggcgtcccggaggagcagttgctggggtgtcgatctagagtgctttctcggttactcttcattgcccagaccgctctcctcctgttgcccgccgccggagcaggtctctgccccgcgccctgctcctgccgcattcctctcctggactgcagtcgcaggaaattgcccgcaccgagctggagggcgctgtcgggcttgctgccccccgacaccgctatcctggatttcagtcataatcggttgtctaactggaacatcagcttggaatcacaaacattacaggaagtgaaaatgaattacaatgaactaacagaaatcccgtattttggagaacctacatctaatattactctactttcattagtccataatataatcccagaaataaatgcacaggcactccagttttaccctgctctggagagtttagacctcagctcaaatataatatcagaaatcaagacatcttcatttcctcgcatgcagcttaaatacctgaatttaagtaataacagaataaccaccttggaggctggttgcttcgataatttatcaagttccttattagtggtaaagttaaaccgtaaccgaatgagcatgattccacctaagatcttcaagctgcctcacctccaattcttggaacttaaaagaaacagaattaaaattgtggaaggtcttacattccaagggcttgactccttaagatctttgaaaatgcagcggaatggaattagcaaacttaaggatggagcattttttggcttgaataacatggaagaactagaactggaacacaacaaccttacacgagtaaacaaggggtggttgtatggcttgcgaatgttacagcagctctatgtgagccagaatgctattgaaagaatcagccctgatgcatgggagttctgccaaagactatccgaacttgatttgtcctataaccagctgacccgcctggatgaatctgcctttgtgggtctgagcttattggagagattgaatttaggagacaacagagtcactcatattgctgatggtgtatttagatttctttccaatcttcagacattagacttaagaaacaatgaaatttcatgggccatagaagatgctagtgaagcctttgctggactcacaagtctcactaaactaatcttacaaggaaaccagattaagtcaattacaaagaaagcattcattggtcttgaatcccttgagcatctagatttgaacaataatgctataatgtctatccaagaaaatgctttttctcagactcatttaaaagaactgattctgaacacaagcagtttgctctgtgactgccatttgaagtggctacttcaatggttggttgataataactttcaacattctgtgaatgtaagctgtgcacaccctgaatggctagcagggcaaagcatcctgaatgtggatctgaaagattttgtctgtgatgattttctcaagccacagataaggacacatcctgaaaccataattgctctaagaggcatgaatgtgactctgacgtgcactgcagtgagcagcagtgattcacccatgtccactgtgtggcgcaaagacagtgaaatcctgtatgacgtggatactgagaattttgttcgttattggcagcaagctggagaagctctggaatatactagtatcttacatcttttcaatgtgaatttcacagatgaaggaaaatatcagtgtattgttactaatcactttggttctaattattctcagaaagccaaactgactgtaaatgagatgccatcttttctgaaaacgccaatggatctgactattcgcactggtgccatggccagattagaatgtgctgcagagggacaccctgcacctcagatttcctggcagaaagatggtggtactgactttcctgcggctcgagaaagacgcatgcacgtcatgcccgaggatgacgtcttctttattgccaatgtgaaaatagaagatatgggaatctatagctgcatggcacaaaatacagcaggaggtctctcagcaaatgcttccctaacagtgttagagacaccctcatttattagacccctggaggataagacagtaacccgaggtgaaactgcggtgttacagtgcatagctggagggagtcctgcccctcgtctcaactggactaaagatgatgggcctttgctggtgacagaacgacatttctttgctgcagccaatcagcttctcatcattgtagatgccgggctagaagatgctgggaaatatacctgcattatgtctaacacccttgggacagaacgtggccacatttacctaaatgtcatttcatcccccaattgtgactcttcccagagtagcattgggcatgaagatgatggctggaccacagttggcattgtcatcattgttgtggtctgctgtgttgttggcacttctttgatctgggtcattgttatttaccacatgagaaggaaaaatgaagactatagtatcacaaacacagaggagctcaatctgcctgcagacattcccagctacttgtcttcccaaggaacgctgtctgagccacaggaaggctacagcaactctgaggcaggcagtcatcagcaacttatgcctcctgccaatggatatatacacaaaggcactgacggtggcactggtacccgggtgatttgctcagattgttatgacaatgccaacatctactccaggacccgagaatactgtccatacacctatattgctgaggaggacgttcttgatcagacactgtccagcctcatggtccaaatgcctaaagagacatatttagtacatcctccccaggatactactgccctagagagcctgataccgtcagccaacagagagccatctgcctttcccaccaaccatgagaggataagtgagaagaaacttccctccacacagatgagcggtgaaacattgcagcggcccgtgtggaacataaacagagaactaggcctgcctcatcctcctttttcccagcagccagtccatgagtcaccacaacttcatcaaaatgagggcctggcagggagagagccagactgttctgcttcttccatgtcctgccacaggttacaggatcatgcttttgattttagtaggactcggaacattcaagatggtagtgagggcacatgaaactcacttcaggatgaaatctgggcagagacttattaattaattttgcatttactacctcagagctcagaagaaactccgaagtcagcatttgctttactctttctttatgattgcatctgaccgcaccaaggtgggccatgcgttgtttggtcttatacctgatgaagaaatggcaacagctgacagaaatgggtacagctcatcaaaaatgtgcagcaccggcagagggaagatacggggcaaatgtgcttcctgatgcttccatggggatgtgctctggtgtgcatctgcttgtcaggaagagtcacattgctgcttaacatgctggattgccctagtcttcagaatggtcctgagaaaacatcactacttcgatgttctactttgctttccaaggagcaaaaataactttggagccttctgggaagtgtgcctgggattcttcagtggtttcaggcagatagttgagactggggctttgatattcaaggtctttggcaagaatcccaggcttgaccaactggtaccaggtcaaagatttttgtattcttgtgaatttttttttttgtccctattgcccagggatgtcattgtaaatatatgtgcatttataaat

SEQ ID NO: 741 - DNA, 6256 bp, Homo sapiens
agtctggccgcggccggcggcgccgcctcctcgtcgggccgggcacggcgggccggggcctttgtgtgaagcggcggcggcgatggtgctcggggcgccgcagagccggattaactgtgctgataaggaggtaatttcataggagctgctaagatgggcatgaggatcaaactgcaaagcaccaaccaccccaacaacctgctgaaggaactcaacaagtgccggctctcagagaccatgtgcgacgtcaccattgtggtggggagccgctccttcccggcccacaaggctgtgctggcctgtgcagctggctacttccagaacctcttcctgaatactgggcttgatgctgccaggacctatgtggtggacttcatcacccctgccaactttgagaaggttctgagctttgtctacacttcagaactcttcacagacctgatcaatgttggggtcatctacgaggtagctgagcgtctgggtatggaggacctcctccaggcctgtcactctacctttcctgatctggagagcactgccagggccaagcccctgaccagcaccagtgagagccactctggtaccctgagttgtccttcggcagaacctgcccatccccttggagaactccgaggtggtggggactaccttggtgctgatagaaactatgtgttgcccagtgatgctggagggagctataaagaggaagagaagaatgttgccagtgacgctaaccatagcctgcatctgccgcaaccgcccccaccaccgccaaagacagaagaccatgacacccctgctcccttcacgtccattcctagcatgatgacccagccactcctaggcactgtcagcacgggcatccagaccagcacgagctcctgccagccatacaaagttcaaagcaatggagacttcagtaaaaacagcttcctcacccctgacaatgcagtagacattaccactgggaccaactcctgtctgagcaatagtgagcactccaaagatcctggctttgggcagatggatgagctccagctcgaggacctgggggatgatgacttgcagtttgaagaccctgctgaggatataggcacaactgaggaggtgattgagctgagtgatgacagtgaggatgagttggcttttggagagaatgacaatcgggagaataaggccatgccctgccaggtgtgcaagaaagttctagagcccaacattcaactgatccggcagcatgctcgggaccatgtggacctgctgacgggcaactgcaaggtctgcgagacccacttccaggaccgaaactcccgggtaactcatgtcctgtcccacattggtattttccttttctcctgcgacatgtgtgaaactaagttctttacccagtggcagctgacccttcaccgacgggatggaatatttgagaacaacatcattgtccaccccaacgatcccctgccagggaagctgggtctcttttcaggggcagcctccccagagctgaaatgcgctgcctgtgggaaagtattggccaaagatttccatgtggtccggggccacatccttgaccatctaaacttgaagggccaggcctgcagtgtctgcgaccagcgtcaccttaacctctgcagcctcatgtggcacacgctgtcccatctcggcatctcagtcttctcctgttctgtctgtgcgaacagctttgtggactggcatcttctagagaagcacatggctgtgcaccaaagtctggaagacgccctcttccactgccgcttgtgcagccagagcttcaagtcagaggctgcctatcgctaccacgtcagccagcacaaatgcaacagtggccttgatgcacggcctggttttgggctgcagcacccagctctccagaagcggaagctgccagcagaggagtttctgggtgaagagctggcgctgcagggccaacctgggaacagcaagtatagctgcaaggtctgtggcaaaagatttgcccacacaagcgaattcaactaccaccggcggatccacacgggggagaagccataccaatgtaaggtgtgccacaagttctttcgaggccgctcgaccatcaagtgccacctaaagacacactcgggggccctcatgtaccgctgcacagtctgtgggcactacagttccacccttaacctcatgagcaaacatgttggtgtgcacaaaggcagcctcccccctgacttcaccatcgagcagaccttcatgtacatcatccattccaaagaggcggataagaacccggacagttgactgggtcccggcagagccacggggagctcccaagcagcagccaggatgctgatatctaagaggtgttggtccctccccagctgaagttataattttgccttggtaggaattctgttctgtgttgtgtttaaagaagaaaagaagaagaaatagcacataagctgttactgttgttgagaagcaacagccctatcacatttacctccatacctgttcttgcccatgcagggctatgtttttcattcttttgaggctggttttgggatctagtcaagcagttggtgtccactagacccccttccccagcctctctagttttagtttactgataggttttatgctgctaagaatccaaccaacagcctcacttaacagaggaggtaaagggaggttttcactgtgggtgttactgcaggcctccaactgggatgaccagcaatgagaaagattttgggaatgtgatcattcagaaaagacaggtcagcagggcagtcccctcaggttccagccctcagcagggacaagacatcagggatgttggtgtctgcttatctacagccctaatctgctgattgaacagtgaaaatcttttggcagctagatccatactaggcacagagctttctatttaggtcagaaagctttgggatgaacccctgccagccagaaggggtgtcctgcagtgccaccagaagtggcagcctggatggacaggagaggtttctcttttctcctcatttccaaagaaacaggattttatggagtgatggcccgggacgtccggccttctgtggggcagagaggatagggaaccactttgatatagtcatctgttttggccacttctgttggccatgagtgtcttggtggagaggtggggatgtatctgacagcagcagccttgccttaatttatatctggtctcccgtccagaagtgtttggcccgtggtgtagatgagctgactccatgaagtggtggagtggcagaccgcgagcccttcaggattaaagggacctgagtaactggtggtgtgtagcagggtgtgcgttctgactgtctgtcctagtcgggtaacctgtttactttgtgctaacagtgccggagctttgtcagctcacctttgacctgctggaatttatcctgatctgtcgttgccatcacctccagggggcgctattggatggcagctggttcaggccctccgtgggtggctgcagagtgtgccggcacagcccacgcagctggttagctccactcttacttggttttctaaggggctttgcccaaagaagtcttgagggatagggccctcgatcttgcatacttgtgaggtgccacctcagtagctcatactacctcaccctgctcaggtgagctctgggagtccctggcctcagccctggcactgcccctggtgggattcagcaacaccccgggctgtttcacaagcaagtggttttcattaactcacaaagcctttttggacattaatatttatttatttttgtttttgtatacacattacccagcatctcttttgtataagagactttaggaaaatgagtttctccccagcaagtagccatattccagagaacagccttgaccagagatgtggagaaccaggggtataactaagggaagacatgtcaagcccttaagcaaattcttcttctccagattgtctctagcataataaacccagggaacactttaggccatgggtgtatgttctataaagttcgggacagttaaattccaggcctttcatcccccttccttcctgtgatggagtagattggggacagggttgaggggaacaagtgacatgaatgacctatttgcacagtttggaagcctcctgtctttatttatattgagatgtcagacaaaccaaagctccatccttgttggacctgctgcttctccccagccctgaactgataaagcctcagagttggagtgcctggctctctggtggggtgaccattagatgaagggacttgtacagtggccagtttaaaggtccacctttgaccatctaaacccaccttgttcagtgtcctctgaggacatcctcatcaggaaagcagtgttgagactcttcattgctgactggcttctccctttcttactcacactgaccattagaatttaagaaggaaatgtgtaacagactacagtcaagtgtctgctacattttcaagcatgagcaatccctcccagactgttggtgaggactgatttttgaaatgctggtgtgagagaggtggtaattacaggaaccagccgagtggctgagagcagataaatgtgctggagaaacctttttccttaacagagggcatcatggatgctgggtggtctgtgtacttaacctgaaactgtgaagttttccctttttgccagtaaaccaaaaagcagatccttgaaacttggcccttgaaacacgaaacagaaaactgcatcccctgatcccccgggggctgatcagattgatcagggtggctcagttggtcccagtcagatacgtcataggatcagtagctcatgagatttgttgaccaaaccctctccctgttggtgacccctgtattcacacctgaacttcccgtttccccccaccccaccaaagtcatgtctgcttcctctgcctccagctcaccctcttctgaatggttttgcttgaaacactatattgtggcagagggcaccctgggatacctggtagaaggtattcattttattttgcatttttaattgttttgactttctgttcatttgattttgttgctccctctctcctggaacctagtttactactctcttctgtgttactctgaagttctgtttaagccttgaacatcctcttctcccattttcttggtatgtactcaggaccagctacatcatttgtggagccctcttattcataaattattaaaaatttcaaggtggtggtcatagagcattaaaccaaatatgaggccattcccaacttgttttccgaggggaaaatggtaatacttgtgtggcacccggggttaaacagcagaggctccatgtggccagaggcagagattagtatcctggcactccagtgacccactgggtgactcactgatgccacagcacccgctaggaagctctgctgaaccttagtatttggtcctaaattttatgactccatggagttcccgtagtccatggctagttaggaagaaaggaggtgggataagggtcaggcccaggtgacccctaagaaccaggagatgggtaaaagtttttttttatattctgcttttctgatctgtgagtacctgtttgtctccaggccaaacctttgggcttaaatatctttttcctagacaggtttttgctagtgttgaattttcttcttcctctggcctccttctgtgcccctttccccaagcccaagactgcttaacttccaaagcaaattctagatagacactgtatttattggtatgggagtgggctctatggggtggtctgcacccatctgggactcttttccctaaatcctgcaccaaatgagtcaggaggcagggtgcacagcattagtttcaatgtggttatgcatcataagcttaacatcagaatgaaaatgaaactcgattttgatgtttctttaaaacccttcccctgtccaatccactcgccgcccccaccttgaatagctaaagtctcttatgaaacagagaagagttgttgacgtctaactccttccattaaattaataagtactgacctcctaatatttaagtgtttactatctattgctgtaaagttttgtatattttgtaaacttttttccccaaatagtagatgtctaaaatcattgtacatctgattcttttatattccattgttcagcacaaagtgtggtttttatttagaataaaaaaagaaatttgaaatgaaaaaaaaaaaaaaaaaaa

SEQ ID NO: 742 - DNA, 10499 bp, Homo sapiens
cttggaataggtctgcggctgcacaccgcccggacgccggggttcctgcgtcccccgccccctctgatcgcggctgggtagccgagccgcaggcagctgggggcccccgaacgccgcctctgcatcgcgccgcccctgccccgggctccggtagctttcgggcttccgcactgcccgccgcgccctgcccacagggaagcgcttccccaggcggcggcggtcctggtgcggaccctccggccgcagccatgtgggacccgcgggcagctagggttcccccgagggacttggctgtgctgctgtgcaacaaatcaaatgcatttttcagccttgggaagtggaatgaggcatttgttgctgccaaggaatgtctccaatgggatccaacctacgtgaagggatactaccgagctggttattccttgctgaggttgcaccagccttacgaagccgctcgcatgttttttgagggtctgcgacttgtgcagagaagccaagaccaggcaccggttgctgatttccttgttggagtcttcaccactatgagcagtgactccattgttttgcaaagtttcttgccttgctttgatcatattttcacaactggattcccaacagaagtgtggcaatctgtaatagaaaagttggcaaagaaaggattatggcattcatttctgcttctgtcagcaaaaaaagaccgattaccaagaaatattcatgtcccagagttatcactgaaaagtctctttgagaaatacgttttcattggactttatgagaagatggaacaagtgcccaagttagtccagtggctcatctccattggtgcaagtgttgagactataggaccgtatccccttcatgccctcatgcgactctgtatccaagccagagaaaaccatcttttccggtggttaatggatcacaagcccgagtggaaaggccgcattaaccagaaggatggggatggctgcactgtcctgcacgtcgtcgctgcccactccccaggatacctcgttaagcgacaaacagaggatgtgcagatgctcctgcgctttggggcagatcccactttgctggatcgacagtctcggtctgttgtggatgtcctgaagaggaataagaacttcaaagccatcgagaaaatcaacagtcacttagaaaagctagctacgtgttctaaggacctatcaggattcagcaatggtgatggacccactagtgaaaacgacattttcaggaaggtcttggagcagctggtgaagtatatgaactcaggaaaccggttattgcataaaaactttctgaagcaggaagtagttcagaggttcttgcgtctcctttctactctgcaagaaattcctcctgacctggtctgtgatattaatcaagactgtgccaccaccgtcttcaaattcttattggaaaaacagagatggcctgaggtgcttctgctgctgacccgcaaagtaagtggagaaccaccgcttggggattgcctcatcaaagactgcaacttctcagacctcgacatctgtaccatcatcccccatctcagcacctgggaccagcggaagaaacagcttctgggctgcctgatagacagtggagccttgcctgatggtcttcaggagagccaggagaggccagttgtcacgtgcctgaaacatgaggacttcgagttggctttccttctcttgaccaagggcgcagacccccgtgctatttctctcacggaaggtgatactcctttgcatgcagcactccacatctttctagagattaaagctgacattggttttagcttcctcagccatctgttggatctgttttggtccaaccccactgaattcgactacctcaaccccaatgtccaggacagcaatgggaacacgctgatgcacatcctcttccagaagggcatgctaaagcgcgtgaagaagctgttagacctgctggtgaagtttgacatcaacttcaatctgaagaacaaagagggcaaagatgcacggcaccggattaagaagaacgactctctgctcttggcctggaacaaagctctgatggagaacaggaggaggagccggcaggactctgctgcccacctggggaagctctcaaagtccactgcccctggtcacacatctcagctcaagtcccagggttcattcaagtcagtgccatgtggtgccactgccagaacactgcctgaaggaagtgcagtccctgacagctgggagactctcccaggtacccaggtgaccaggaaggagcctggagctctcaggccctgctcgctgagagactgccttatgcaggacatcacagttttgattcagcaggttgaagtggatccgtctttcccagaggactgtcttcagagctctgagcctctggaggcaggagctggcaaagaaggaaagaaagatgacaagccgactctgggtgcaggggcccctgactgtagtgaggtgggggaaggacatgctcaggtgggccttggggccttgcagcttgtgcctgatgataacagggggaaggagggcaatgatgatcaggatgactggagcacgcaggagattgaggcctgcctccaggacttcgataacatgacctgggagatcgagtgcacttcagaaatgctgaagaagctgtctagtaaggtaatgaccaaggtcatcaagaagaaaatcatccttgccattcagcagctgggaaatggcgagtggacccagggcctgcagaagcgactgaagcacctgaaaggaagcatccagctcttcgaagctaagctggacaaaggagcccggatgctctgggagctcgccattgacttctcccctcgatgcagtgagaaccctgagaagatcattgccacggagcagaacacgtgtgcaatggagaaatcagggcggatctacacggaaatcatccggatttgggacatcgtcttagatcactgcaaactggctgattccatcaaggccatctgcaatgcctacaaccggggcttgtcctgtgtcctgcggaagaagctgaaaggtatcaataaaggccaagtgtcagctaacatgaaaattcaaaagcgtatacctcgctgctatgtggaggacacagaggccgagaagggcagggagcatgtcaatcctgagtactttcccccagccagtgcagtggagacagaatataacatcatgaagttccacagcttcagcaccaacatggcctttaacatcctcaatgacacgacagccacagtggagtaccccttccgggtgggtgagcttgagtacgcggtgatcgacctcaatcccaggccactggagcccatcatccttattgggcgaagtggcactgggaagacaacctgctgcttgtacagattgtggaagaaattccacgtttactgggaaaaagctgagcaggcaggaagcccattgctggccaaacaggtctggctgaagagaaggttggaagtggaacccggaaaagagagtccaggtggggaggaagaggaggaggaagaggacgaggaagaggaagattctattgaagtggaaacagtagaaagcatagatgagcaggagtatgaagcctgcgcaggaggagccggtgtggagccagcaggggacggccaagctgcagaagtatgtgcaccagaacatccccaccagctggagcatttacatcagatctttgtgaccaagaaccatgtgctgtgccaggaggtacaaaggaatttcattgagctttccaagtccaccaaggccactagtcattacaaaccactggaccccaacattcacaaactccaggacctgagggacgagaactttcctctgtttgtcacttccaagcagctgcttcttctgcttgatgcttctctgcccaaaccattttttctgagaaacgaagatggaagcttgaaaagaaccatcataggatggtctgcacaggaagagtcaaccattcctagttggcaagaggatgaagaggaggctgaggtggatggggactacagtgaggaggataaagctgtagaaatgcgtacgggtgacagtgacccccgggtgtacgtgacgtttgaggtgttcaaaaatgaaatatggcccaaaatgaccaaagggaggactgcctacaaccctgcactgatttggaaagaaataaaatcttttctaaagggttcttttgaggccctcagctgtccccatgggagactcactgaagaagtatataagaaattagggaggaaacggtgccccaatttcaaggaagaccggagtgagatctacagcctcttcagtctgtatcagcaaatcaggtcccagaaaggttattttgatgaagaggatgttctgtacaacatatcccggaggctgtcgaagctcagggtgctcccatggtccatccacgagctctatggtgatgagattcaagactttacccaggccgagctggcgctgctgatgaaatgcatcaatgaccccaactctatgttcctcacgggggacacggcccagagcatcatgaagggcgtggccttccgcttcagcgatctgcgctctctgttccattatgccagcagaaacaccatagacaagcagtgtgctgtccggaagcccaagaagatccaccagctgtaccagaattacaggtcccactcaggaatcctcaatctggcatctggagtggtggatttacttcagttctatttcccagaatcttttgatcgccttccaagggattctggcctctttgatggtcctaagccaactgttctggagtcttgtagtgtaagcgacttggcaattttgctacgagggaataaaaggaaaactcagcccattgaatttggagcccaccaggtaatccttgtggccaatgaaacggcaaaggagaaaattccagaagagctggggttagcacttgtgctaacaatttatgaagcaaaaggcttagaatttgatgatgtcctcctttacaacttttttactgattctgaggcttataaggaatggaagatcatttcctcattcacacctacctcaactgactccagagaggaaaaccggccattggttgaagtacccctggacaaaccaggctcttctcagggtcgatctctcatggtgaatccagaaatgtacaagctcctcaacggagagctgaagcagctgtacaccgccatcacacgggctcgggtcaacctctggatctttgatgaaaaccgagagaaacgggctcccgcattcaaatatttcattagaagagattttgtccaagttgtaaagacagatgaaaataaagactttgatgatagcatgttcgttaagacctcaactcctgcggagtggattgcacagggagattactacgccaagcaccagtgctggaaggttgcagccaagtgttaccagaaaggaggtgcatttgagaaggagaagttggccctggcccatgacactgccctgagcatgaaatccaagaaagtcagccccaaggaaaagcagttggaatatttggaattggctaagacctatttggagtgcaaagagccaacactgtcccttaagtgtctgagctatgccaaggagttccagctctctgcccagctgtgcgagaggctgggaaagataagagatgctgcctatttctataagcgaagccagtgctacaaagacgctttcagatgctttgagcagattcaggaatttgatctagcactcaaaatgtactgccaagaggagctttttgaagaagctgctattgcagtggaaaagtatgaagaaatgctaaagactaagacccttcccatttccaagctctcctattctgccagtcagttttacttggaagctgcagcaaagtatctgagtgcaaataagatgaaggaaatgatggctgtcctctcaaagctagacatagaagaccagctggtgttcttgaagtctcggaaacgcttagcagaagctgcagacctgctgaacagggaaggtaggagagaagaggctgccctgctgatgaagcaacatggctgcctcctggaggctgccaggctcactgccgacaaggacttccaggcctcatgtctgctgggggccgcccgcctcaatgtggccagggattccgacatagaacacaccaaggacattctgagagaagcacttgatatctgctatcaaactggccagttgtctggcattgcggaggcccacttcctgcaaggggtaatcctgagagactttcagaagctcagggatgccttcttcaagtttgacacgctcaaccactcagctggagtggtggaagcactctacgaagcagccagccagtgtgaggccgagcctgagaagattctgggcctggctccagggggcttggaaatcctcctcagtctggtcagggctctcaaaagagtgaccaacaatgctgagaaggaaatggtcaaatcttgctttgagttttttgggatttcccaggtggatgccaagtattgccagatagctcagaatgaccctgggcccatattaagaataatttttgacctggatttgaacttgagagagaaaaaaacaaaagatcattttttgataatgactgaccaagtgaaattagccctaaacaaacaccttttgggcaggctgtgtcagatcacacggagcctgcttgggaagacctaccgaggagtctgcatgaggtttattgtaggcttaaaatgtgaggatgaaaactgtgaacattttcacaggcctctgcggcgttgtgaagccaagtgtttagttcagtcgaaaatgaacttggtggcaatcaacgggttgcttttggaagccaaaaaagtattccctaaaatcttagcagaagaacttaaagaaattgattatattttgtctacagatatgtatggcctttgcaagtccattctggatgtccttttccctaagcatttccatcagagagtgttgtcagaaaaccccatggcatgcaaagaaatcctcaaaccaaattacaaatccttccggttctacagatttgctttgaaggagtacatccactttctgtttgaaaatgaaagcgcacgcaaccgccgggaatccacagacctgtggctgagtgccatgcaagctttccttctctcttccaactacccggaggagtttgaaaagctgctccaccaggaggaggacaactacaacagggaactcaaagctctagagtctgaaaaggatgaaaggggcagggggagaggcagcaggataaaaggaatagaagggaaatttggcatgctggcacccaacagggatgatgaaaatatggacaagacccacctgtgcttcatccggcttctggagaattgcattgatcaattctacgtgtacaggaacccagaagactacaagaggctctttttccgtttcatgaatgtcctcatcaagaggtgcaaagaaccactcatccccagcattggaaacacagtagccctcctggagttccagttcatccactgtggggtggtgctggcccgcctctggaagaatgtcattctatgcctccccaagagctacattgcactcttgcactactgggagttcctgtttagcaagaaggacaaggagcttggggatgtgttctccatcattcaggaatacaaacccaaggacgtgacaagagccattcaggatttccggttccatctctcctacctcgccaaggtgctatgtggctatgagaatgtgaacttcaacgtcctgcttgatgccttcagtgaaatagactatgtggtctcgggtgaggctgagcggacactggtgctgtgcttggtgatgctagtgaatgctgaggagatcctgcagccatactgcaagcctctcctgtatcgccacttccgggagattgagtcaaggctgcagctcatgagcatggactgccctggccaggttcccgagaggctcctgaaggtggtgaagcgggtcttggtggcagtcaatgtgaagtctgtggctgaggcactgcaggacctgctctttgagcgggatgaagagtacctaatggactgtgactggcggtgggaccctgtgcacaccaaagggtccatagtccgtggcctctattatgaggaggtcagactaaaccgcctgctctgtttggaccctgtggactactttgctgaacctgagtgtgagtttggccaggatgagatggatgaactggcattagaagaccgagaccacgtcctggccaccattctttcccaaaagcaacggaaggcctccatacagcggaagttgaggagggcatgcctggtggtgtctctgtgcatcagttggaggagaagagtgggcacccagatggagcgtgtcagggaggaggccagggagcccagggctgggaacttcaaaaaggcagacgtggacaggacccagtgtgacctatgtggagtgaagtttacccgtggcccagagaactatttcagccccagcaaagcgtttgagggggcagcttccgaggtggcagtcctttccagggctgagctggaaagggaggagtgtcaggagaggaacagcgagtcttacgagcagcatatccatctagaacaccaccagaggcagcaagtggcctaccagaaatactcagaatttttccacgagaaggtggacccggccattgatgaaggcaagctggtggtgcaggacatcgagcaaagtgtatggatccacagtcacgtgggctccaaggagcacagccacatgctgcagaaggtccaggagcacatcaagagggtttcggatatggtggaggacctctacaggcggaaggcctgggctggcgcggaggaggcgatgactcggctggtcaacattctgatcctgtcagtcagggatgcacgagactggttgatgaaaacagagacccgcttaaagaaggaaggtattgttcaggaagatgattatgaaaatgaagttgaagactttggtgagcttcggcctagaaggcgttctcggaaatgtggaaagcagagaaaatactaatgtccacacagctgcagcctcctcatccttcggaacattccattctgacttagaattctgagcgctggggcagaagacaaaaagaatgtgaattagcattttaaaaataggggagtctaacaacaccattgctttttattctcattacttctctttcagtggcttaggatctgattgctccctcacctctaaagtgtttccaagtagagtctggcagtattagtttcccccacaaacaaattcaggtagagaagttgtagtcgaagggaatgttgggactcctcactgcatggtccctggggtgtctggctcatccccatcatgacatgagttggtagcagaggactaggtgttaggacagactctcctcacctcagttgctgctgctctgggccaggaaatctctctatggattccctcatctcctgccacactgctgcagcatcaagtgtgctatgagagctgtatgtgcccaggggtgggccctgccactggccaccccgagcccaggacgcattctggtcatctctgagcccacttgtagtgtagcttcttctgttagagatgttagccttttctctctgtggcgacttttctgccttcccttcttctgttttttgtgatcattcttagctacctgtgccaagtcacagttagactacctcagaatgtagtcaagaattcacccagtgttctttggatgtcccttccctagggggaaaggctggggaatgttgctgggagcattcccagctgcctctccaaagtggtcctaactctgccttggctatggtgcagacattccaaaaagtgttttgtatacagccctgtacatctagttttcttggttctccctggcaagttcgctaccctagcttaggctgacgttctgatgagtctctgcttgctgagctcatcactgtgggatggtgacctgcagagctgcagattggagcaagtggacagaggagggagccagctaagccaaatccgtcactgccacttggctggcaggccttataagagggcggatctgggcccgtttgcaggaggccattgcctaccctctccccacagtgagccagcagccatcagctgatcccacctgggaaaccttcatgcctctctgatggttactgcccacccttaccccacccctcagctcagcctggtatggaaagcaaggtgcacgttggtctttgattgttctgtcctcacagcagagccagctttccccccatgttgctgctgcttttgctgctcatgctgcttgttgttttctcttccttatctttccaaattgtttccttgaaatgcttgtttccaatttttcttagattatgtttctaatttttattccaggtgtttttttttcttacttgacagaaaaaaagaaaaccccaacaatatcttgctgtattatcacattttttataaagttaaagcatttctcttacaaaaaaaaaaaaaaaa

SEQ ID NO: 743 - DNA, 8703 bp, Homo sapiens
cccccggcggagccagctgctgctcttcggtgctggccccggtgccggccccgttgcccagggaacaggctcccggcagcccccgcggcccggagtccatcccgcctcctccggcccggcggggccgacgagtccggaggggctgccgcgggagcccccaggtttccctagatgacaaataaacattccttttcctgcgtgaagatagtctgtggaaaccttggccatggcatcgatatcagagcctgttacattcagagagttctgcccgttgtactatctcctcaatgccattccgacaaagatccagaagggtttccgctctatcgtggtctatctcacggccctcgacaccaacggggactacatcgcggtgggcagcagcatcggcatgctctatctgtactgccggcacctcaaccagatgaggaagtacaactttgaggggaagacggaatctatcactgtggtgaagctgctgagctgctttgatgacctggtggcagcaggcacagcctctggcagggttgcagtttttcaacttgtatcttcattgccagggagaaataaacagcttcggagatttgatgtcactggtattcacaaaaatagcattacagctctggcttggagccccaatggaatgaaattgttctctggagatgacaaaggcaaaattgtttattcttctctggatctagaccaggggctctgtaactcccagctggtgttggaggagccatcttccattgtgcagctggattatagccagaaagtgctgctggtctctactctgcaaagaagtctgctcttttacactgaagaaaagtctgtaaggcaaattggaacacaaccaaggaaaagtactgggaaatttggtgcttgttttataccaggactctgtaagcaaagtgatctaaccttgtatgcgtcacggcccgggctccggctatggaaggctgatgtccacgggactgttcaagccacgtttatcttaaaagatgcttttgccgggggagtcaagccttttgaactgcacccgcgtctggaatcccccaacagtggaagttgcagcttacctgagaggcacctggggcttgtttcatgtttctttcaagaaggctgggtgctgagttggaatgaatatagtatctatctcctagacacagtcaaccaggccacagttgctggtttggaaggatccggtgatattgtgtctgtttcgtgcacagaaaatgaaatatttttcttgaaaggagataggaacattataagaatttcaagcaggcctgaaggattaacatcaacagtgagagatggtctggagatgtctggatgctcagagcgtgtccacgtgcagcaagcggagaagctgccaggggccacagtttctgagacgaggctcagaggctcttccatggccagctccgtggccagcgagccaaggagcaggagcagctcgctcaactccaccgacagcggctccgggctcctgccccctgggctccaggccacccctgagctgggcaagggcagccagcccctgtcacagagattcaacgccatcagctcagaggactttgaccaggagcttgtcgtgaagcctatcaaagtgaaaaggaagaagaagaagaagaagacagaaggtggaagcaggagcacctgtcacagctccctggaatcgacaccctgctccgaatttcctggggacagtccccagtccttgaacacagacttgctgtcgatgacctcaagtgtcctgggcagtagcgtggatcagttaagtgcagagtctccagaccaggaaagcagcttcaatggtgaagtgaacggtgtcccacaggaaaatactgaccccgaaacgtttaatgtcctggaggtgtcaggatcaatgcctgattctctggctgaggaagatgacattagaactgaaatgccacactgtcaccatgcacatgggcgggagctgctcaatggagcgagggaagatgtgggaggcagtgatgtcacgggactcggagatgagccgtgtcctgcagatgatggaccaaatagcacacagttacccttccaagaacaggacagctctcctggggcgcatgatggggaagacatccaacccattggcccccaaagcactttttgtgaagtccccctcctgaactcactcactgtgccttccagcctcagctgggccccaagtgctgaacagtggctgcctgggaccagagctgatgaaggcagccccgtggagcccagccaagagcaggacatcctaaccagcatggaggcctctggccacctcagcacaaatctctggcatgctgtcactgatgatgacacaggtcagaaagaaatacccatttctgaacgtgtcttggggagtgtgggaggacagctgactccggtctctgccttggcagccagcactcacaagccctggcttgagcagcctccacgggatcagacattgacgtccagcgatgaggaggacatctatgcccacgggcttccttcttcatcctcagagacgagtgtgacagagctcggacctagttgctcccagcaggacctgagccggctgggtgcagaggacgccgggctgctcaagccagatcagtttgcagaaagctggatgggctactcgggtcccggctatggcatcctcagcttggtggtctccgagaagtatatctggtgcctggactacaaaggcggcctgttctgcagcgcgttgccgggcgccgggctgcgctggcagaagtttgaagatgctgtccagcaggtggcagtctcgccctcaggagcccttctctggaagattgaacagaaatctaaccgggcttttgcttgtgggaaagtcaccatcaaggggaagcggcactggtacgaagccctgccccaggcagtgtttgtggccctgagcgatgacacggcctggatcatcaggaccagtggggacctatacttgcagacaggtctgagcgtggatcgcccttgtgccagagccgtaaaggtggactgtccctacccgctgtcccagatcacagcccggaacaatgtggtgtgggcgctgacagagcagagggccctcctgtaccgggagggcgtgagcagcttctgtccggaaggcgagcagtggaagtgtgacattgtcagcgaaaggcaagctttagaacccgtctgcataacgctcggggatcagcagactctctgggccctggacatccatgggaacctgtggttcagaactggcattatttccaagaagccccaaggagatgacgaccattggtggcaagtgagcatcacggactatgtggtgtttgaccagtgcagcttatttcagacgataatccatgccactcactcggtggccacagcagcccaagcccccgtagaaaaggtggcagataagctgcgcatggcgttttggtcccagcagcttcagtgccagccaagccttctcggggtcaataacagcggtgtctggatctcctcgggcaagaatgaattccacgtcgctaagggaagtctcataggcacctactggaatcatgtggttccccgtgggacagcttctgctacaaaatgggcctttgtgttggcttctgcagctcccacgaaggaaggaagcttcctgtggctgtgccagagcagcaaggacctgtgcagcgtcagcgcccagagcgcacagtcgcggccctccacggtgcagctgcctcccgaagccgagatgcgcgcctatgccgcctgccaggatgcgctgtgggcgctggacagcctcggccaggtgttcatcaggacgctctccaagagctgccccacgggcatgcactggaccaggctggacctctcccagctaggagctgtaaaattgacaagcttggcatgtggaaatcagcacatctgggcctgtgattccaggggtggagtttacttccgtgtagggactcagcctctcaatcccagtctcatgcttccagcctggataatgattgagccacctgtccagcccgccggggtcagcttggtcagcgtccattccagccccaacgaccagatgctgtgggtgcttgacagcaggtggaacgtgcacgtgcggaccgggatcaccgaggagatgcctgtggggaccgcctgggagcatgtgccagggttgcaggcctgccagctggcgctgagcaccaggaccgtgtgggcccgctgtccaaacggagacctcgcccggcggtacggcgtcacagacaagaaccccgccggggactactggaagaaaattcccggcagcgtgtcgtgtttcacagtgactgcgtcagatgagctgtgggctgtgggcccgcccggctacctcctccaacggctgacaaagacgttcagccactcgcacggcacccagaagagcagccaggccgccatgccccaccctgaggacctggaggacgagtgggaggtcatctgaaggagccctggccgagtcacgcggaggggcccggcgtctgtggcgggcacaggggcttcagagtgactccctggtggacgcgctgcctcaacacttgtccagacacctctggccaggttggacccgcacacttactttcatctatgttggtttctgtctcgttccagaacccacagcctccacccgtggctggcgtgattgctgcagcagtggcgcctcctagctcaggacagtggcgactgcccggctgcatgcactccgattacccacgtgctgccgtcctggtctcatccacagatagctccagcttttgttggtgggagtggtctccggaggcctcccagaaccaagggtagccgggcagctggtttggcccagggcctccttccacattagtagccccagggccagatggagccaaaggtcagctctctgcagcgcgggatgtgctcggtgatggctttgtcccatcataggggggtgtccccccagagacaaagctgcagagcacattccatgccagacgctctggccaggaagctgaggccgggcttgagaggagagcgctggccatgccaggagagaacccacgcacatgcacaccacaacacacaacacacctcacctcacaccacagcacacctcaccacaccacaccgcactgcaccatacctcaccacatctcaccacaccacagcacacctcaccacacaacacaccacaccccacaccgcactgcaccgcaccgcaccgcaccgtacctcgccacatctcaccacaccacaccacaccacacctcactgcccacacacggcgcaggctgcccgcctcctggagagcacacttcagctgaaacagtaaagcctgatgggtgcaaatggaacctggatgtgtgcacgtgtgtcccaggtagggacggcacaggagggtgcatggggcgtgggggagctgagcaagggtcgctcacttagaaatgtctttggaatggtgtttaactaatgctgctggcggacatcctaaaaccagatgcatcctcagaggacgagtctactaattattgcctttgttgttgtattacaaatctgcataaaatacctcatttcaaatcaaatcttacaaatttagaagagagatatgttttccgaaaacagtggaagccctttgttccttcccgggtttgtcctgagcctgcactgtcctcgcctgcagcctcagaggggcaggcatccccgcacagacttgactggcagggcggtcacgggacctgcgggctggctccgagtggcagcccatgccttctgcggggtatgggttgacacttgacaggttgaaaccagtgcctctatggacggctgctgtggccccttcagacaatgggcagtgcccaccccgcccactggcatctgcgtgtgagggctaggccgccctgccacacatcccgccccctcccggaggcagcttcaggacaggacaccaggctggctgctttttttagcctgcccctggcccaggcccagtccttggtgtcagggagcccccaggccgcaggtggagggtgataaaatatgttctctgacaggacccagccagccacataggtggaggttttccatgtccaaatgaggtcaagatgccgaaatcccagatctgacttcacacttcccttttctagaaccttttgtaaaagttggtggcagcagaggcagccccaggccgggctgcatctctctgtgtctgttgtgccttgcccggcgcctcacggatggcaaagctctcctcacccatgggactgtagtgcaattaaacccgcgtctaggtgatgcttttaaagttgtagcttcgtgctttgtacagttttctttctggttttaatttttagttgtgctttgagtcagtgcaataaactagactttttccaaacctggccgagtgtggtgcctgagctgtgagaagtgtcctcagccgacactcacgagggcagtgcaagggagaacctgccagcccagccccaccacagggagagtgcgtcagcagacctgtcctggcctggctggtgttgaaatacacaccggtttgcccaagtggctgttatgggggaatggccgctccagagctggctgtaccccatggtagcctctgaggaggacgctgtggggtgaggtccagggctgcctcctcatggagctgtgtgtgagcaggcgttggaggggttcgagcccctggttctgtatcttcagccagcaaacgaaaccatatcgcaaaccagagctgctggaaaccagcacacgcaaaagatgacgcccagcacagcagcaggacacaccatgtgccaggaaatgacctcagcaagaaacctcaggccgtgtgaagagcagcaaagctttccagaaggcataaaaggaaacttgaataaaggaagatatgttccacattcctggatggaggactacacacattatggaaagacctcattctttccaaaggaatttataggtgtagcttgatttcagttcaaatccccactgggattgttttgttggggcaggcagggaggaataatgttagtacccacaaatgcccatgactgtgcccaatgtgcttctcaccagagccctgcaaggggaagtctcattagccccttgagactcagagaggttaggtaacttgctcaaggtcacacagcactgggactggaagccagctctgtagaactgcagacctgtgctgtttgatgcctcctcactgtcccgtcactcctgggaagaagaaacgggtgagaactgctaagtgatgacaggtggagccccagcaggggccactctattgaatggcatggcccagaccctcggagggccaggcaacaggctagcaaggcccacagggagggagcagaatggagagggcatctcagatgcgcttaaggagcggcgggggcggggcatggggggtgtcacaactaatgtggccactgcttcattctctgggcaaaataatattaaatggattaaagaatctaaaaccagtgggaaaactgtctgatttctggatggcaaaggctttctaaactcaaaagtgataggacaagctacagaggaaaataagtacatagatttgatttctccaaaatacagaaatgctgctgggcacagtgatgtgcagttatagtcccagctacttgggaggccaaggcaggaggattacttgagcccaggagtttgaggctgcaatgaactatgatcacaccactgcactccagcctcggcgacagagcaagaccttgtttctcaaaaataaataaatagaaggaaataaatgtaaaaatgctgcaaattaaaaacctcaaagaagggaaataattgcaacaaatgggaattgatgttgaatatttaccttaaaaacctatacaacaataagaggagtgcgcccttcagcagcatgtatacaaaaattgcaacgatacagagattagcatggcccctgcacaaggatgactcgcaaattcataaagctttccataaatatatttattaaaaaccaataggaggagcacttcgagtcgagtgtaagggcccttcacaaaagcagaaggaacactggcccaaacccccagcaccccggaagcagaggtgagatgggagcagcttgggagccccccattggcgccgccctactggggaagccggtccgtacgtaggccttgcatctcgccacctccacttctgtcctcaagaacaagtcctaggtcaagggaaacagcacagcctgtttataattaggaaacacttaaaacagcctggcatttgggaacagccatgttaacgtgagcaaattcctctcatgaaatagcctgcagctattaagaagcacgtgtgtgcaggaagcggaggcgcaggacctcaccgcgccagcgtgaagttcccgggcatggtcatgaaagcgtggttctgtaagaaatcagagggagaaagggagagaagggggagggagacaacccaaacgttggagggtatttgttgtaaacttcaaacttttggcaggtttgaaatttttcataactccggggaggagcaagaggggtgaaaagaaacaagttctctacttgtgatcagcagctggtcatagtggttgcctggagtatatgcctttttgtatcctttgaatttccagccatgtaaatgtattatttattccaaaaataaagcagatttacattttaaaaattcaaaaaaaaaaaaaaaaaa

SEQ ID NO: 744 - DNA, 4654 bp, Homo sapiens
agagtgctgcggcgaactggctggaggagctaggggactagaggcggggtgggaggggggcgggtggaagggggaggaagtcccgtaacggagacgctggtcaggacgttcccacctcctctgacactgccgagtccgatcggagaggggtcaccgcctccttcagcgaggaggaggggggcggagcccgactcaggatcatggattttcctggtcactttgaacaaatcttccagcagctgaactaccagagacttcatggccagctctgtgattgtgtcattgtagtggggaatagacactttaaagcccaccgctccgtgctggcagcatgcagcacgcatttccgagccctgttctcagtggcagaaggagatcagaccatgaacatgatccagctggatagcgaggtggtgacagcagaggcctttgctgcactgattgacatgatgtatacctccaccctcatgctgggggagagcaatgtaatggatgtcttattggcagcctctcacctgcatttgaactctgttgttaaggcatgtaaacattacttaacgacaaggacgctgcccatgtctccccccagtgagcgcgttcaggagcagagcgcccgcatgcagcgctcctttatgctacagcagctgggactaagcatcgtgagctcagccctcaattccagccagaatggcgaggagcagccagcccccatgagctcttccatgcgcagtaacctggatcagcgcacgcccttccccatgagacgccttcataagcgcaagcagtctgcagaggagcgggccaggcagcgcctccgaccctccatagatgagtctgccatttcagatgttacaccggagaatgggccttcaggggttcattctcgggaggagttcttttcaccagattctctgaaaattgtggataatcctaaagctgatggaatgactgataaccaggaagatagtgcgatcatgtttgatcagtcttttggcactcaagaagatgcccaggtgcccagccagtctgataacagtgctggcaacatggcacagttgtccatggcctctcgtgcaactcaggttgagactagttttgatcaggaagctgcacctgagaaaagtagttttcagtgtgaaaaccctgaggttggccttggtgagaaggagcacatgagagtggtggttaaatctgagcccctgagctcacctgagcctcaggatgaagtgagcgatgtgacctcacaagcagaaggcagcgagtctgtggaagtggaaggagttgtggtcagtgccgagaagatagacctcagccctgaaagcagtgatcggagtttttcagatccccagtctagcacagacagggtaggtgatatccatattttggaagtcacaaataacctagagcataagtccacttttagtatttcgaattttcttaacaagagcagaggaaataactttactgcaaatcagaacaatgatgataatattccaaacaccactagtgactgcaggctggagagtgaggccccctatttgttgagtccagaggctgggcctgcaggtgggccctcctctgcccctggctcccatgtagagaacccatttagtgaacctgcagactcccacttcgtcaggcctatgcaggaggtgatgggcctgccgtgtgtgcagacttcaggctaccaaggaggagaacagtttgggatggacttttccaggtctggtttgggcctccactcctccttctccagggtaatgataggttccccaaggggaggagccagtaactttccttactaccgccgcatagctcccaaaatgccagttgtaacttccgtcaggagctcacagatcccagaaaactctaccagttctcagctaatgatgaatggagctacgtcctcatttgaaaatggccatccttcccagcctggccctccacagttgaccagggcatctgcagatgttctgtcaaagtgcaagaaggccttatcagagcacaatgttttggttgtagagggagctcgcaagtatgcctgcaaaatctgctgcaaaacttttctgactttgacagattgcaagaagcacatccgtgttcacacaggtgaaaagccttacgcctgcctgaagtgtggcaagaggtttagtcagtccagccacctgtataagcactcaaagactacctgcctgcgctggcagagcagcaatcttcccagcactttgctctagctgtttgtccttacaagacaacgctgaggccagttgtcagactgaatttcttttggtaagcagttaatgcctttgggttcgaggcttccagctgcccagtggctcttaaacagtttagcaactaataaccggagaactaacatgtagtatttgtgctgctgcatttctgagtgaagtgcacgtcttgggaaagggatgcaatccctgaaaccaggtgcttccttggggttgagtaatgcagtcagaaagtagtttgtaattgatattaaaagtggcacatttaaaaatttaaaaattgaagtgcaaaaaaaattttttagcaatttttgtaaaactgtgtagcatttaaatttcctataccttctgatgggagtattatatccctgtatagtgatgcaaaatgcacttatgtgtaaccagtggtgatttggtgcctgtcttaaaggaaggcctttgaggacacacctgtctgccacaaatgctttaaagtgtatcatgagctagtcctaggcctcaaagtactgtattttttatttttacctgatttgcagtcataaacactgcactttggtgctgacactgggtccagagtgagcattctcttggactattagatgtatatacttttgaatacatcactgttggatagatgttttaacagttttttctggtttaaaaaccaaattgtaaatggagtgtgtacttgtagagagtgacaaggtattgtttccctatgtgctgtttgagcagtattttaaccaacttgtattacagatgttacagttccatgttaggaagtcagaaaagacttgtgtttgtctttgttctgctgatgtggagtcatgttttgtggggtcttccatggcacatttacctgttgctccgtccagatgttgagggccagtctaggctgacacatcctacccgaggacaagcctgttctccatttcttcactctcccctccccatatagcaactctcccaggtttagattaccgttttcgacgacagattaaccaaaaatgccccacacaggttttattactgttatatactatacttttaacagtacagaccctaaattttattatttgttgctcccccaatctgataccaaatgtttaaagttgtttgaaatccaaacatggtagtgttcatgggtaaatattttctaggctatgtaagagttagcagcccatagcatagaagtaatcaagtagcatctgagactgttggaggcactagggcctctctgggccctacagcctcacttccccagcctcaccttgctgtcctctgacactgccatcagggctgttagtggcacctgtatgaggccaagtgtgcgtccaggggaacagcacaggttaatgcgtctccctagaactcatgaagtcagtttaattcatgcatgaacatgagttcattttatgttttatatagctttcttagacataccaaaccatcattcataaatcagataaattattcagtttttgtgtttagaaagctaagtatgtgtagctggaaacaaaaatgagcgtgttttctctcctgttaatctagagtgtgcagttacacatgtgtggataatttcatgttccaggggcgcttggcatctcccatggactgattcccaggaagaaaagcccaaagggaaacccacgattcctttcgagtagatgtgggaaagagcccattggaggatatgaggtcctgtgaaattcagttgtgtgtgtggctccttgttagcagtcatgttgacatggtgttaggaggctccccatccaccctttacatgatgtagggaccagtgtcttgtgagattaaccttgggacacagtgggttagcctggagaaaatgagaggccctgcctggacccagggagaggagccagtgacacaggcagagcggtgcagccctccttcccttccatttggaggaggtggtgccaggagcctgcccgcttacctctgctgaagcataagtggactttgcttttggggcttatctctgatacatgctggagccctgcctctccactgctagatggaacctggaatctctcatctacctcttagtctgtcagtttctacgtgtgagaagcaagcttgtgggccagtgtccttgtacatgctgtagcacttaaaaaataattccagggttccctggaaaaccagtcccagggttcctatgatctgtagtttctacctggattataactggttttgggtacctgaattttgattggttagccttaattatagtctggcgtgatcatgtagaatcttttctggtgaacagatcataaagttctatcaaggagttctatcaaggcatccatgtcagtggtgctatgctggttacaacttgagatttttgaaataaaaaatttgtcatattcatgcctctaaaaaaa

SEQ ID NO: 745 - DNA, 7802 bp, Homo sapiens
ctccccgccagtccgggcgaacgcggccgggcccttggggaccgagtctcggcgccgccggggaacgggcgcgggccgcgccacagccggagcggggcagggccccgccaccgccttcttccgccggccccgccgccggccatgcattcttccggctcctctgactcccaaagccccggctggggcccggccagcccgagaaagacaggacggagtccagtgtgagaatggctataactttggaagaagctccgtggctgggctggctcttggtgaaagcactgatgaggtttgccttcatggtcgtcaacaacctggttgctattccatcctacatctgctatgtaattatacttcagccccttcgagtgctggacagtaagcggttctggtatatcgaaggaatcatgtataaatggcttttaggaatggtagcttcctggggatggtatgctggatatacagtgatggaatggggagaagatattaaagcagtttcaaaagatgaagcagtgatgttggtgaatcatcaggcaacaggagatgtgtgcacactgatgatgtgcctccaggacaaaggactggttgttgctcagatgatgtggttgatggatcatatttttaagtacacaaactttggaattgtttctctagttcatggagacttctttataagacagggaagatcttatcgtgaccaacagctgctgcttctcaagaagcacttagaaaataattacaggagcagagatcgaaaatggattgttttgtttccagaagggggcttcctcaggaagaggcgagaaacaagtcaggcatttgccaagaaaaataacttgccatttcttacaaatgttactctgccaaggtctggggcaacaaaaattattttgaatgcacttgtagcacaacagaaaaatggaagtccagcaggaggagatgctaaagaattagacagcaaatcaaaaggcctccagtggataatagatacaacgatagcttatcccaaagctgaacctatagatattcaaacctggatccttggatacaggaaaccaacagtcacacatgtacattacaggatctttccaattaaagatgtacccctggagactgatgaccttaccacttggctctatcagcggtttgttgaaaaagaagacctcttatcacatttttatgaaacaggagcttttccaccttccaagggccataaggaagctgtttccagggagatgaccctcagcaacttgtggatatttctcatacagtcttttgcatttttgtcaggctatatgtggtacaacatcattcagtatttttaccattgcctgttttaggaattgacgtggacttgtcaaggtcaccgtaggagttcagactttctttcataagtgtgcattattttacatgtgcaaatcagaatatatttaaaaaaaagcaaaagaaattcaatggatggattaatatttatccccctttgggatattttaaaatctactaaaatgaggattagtaatataatgacctgctaatatattttaagaacatgttttaaaaagatacactctatcacatatttaagcaaacatcacatttggagaagaggaaatcataaaatcatcctagaagactatctgagagaaattctgttgccaccagttatacttgacaatttagttgaagctcagaaagttatattcatccctcttagctgtagtctatattagggcagttctctagaacgcccacatttccaccaactcagtaaacttgaggggagctggttggcacctcgtgaagaactctttccctgtcgtttgcagtaacaaactccagtctgttgcagtaacaaactccagtctgttgcagtaacaaactctagaatattgacattctctgtgggggaaaagcagtgtccactggaccccttctggtactggatgtgttctttacaaaggctagctcagtccaacactgtgtttacatacactcgtgcttttccttatctgacttctcattttgtatcagaggcatatcataaattgataattttgcaaaatgcacttttttgagatgcagatatagcaaaggattagtaatatagcctgaaaacaaatgggagcatagcagtgtgtgaggttctcgagaactgtcttgtctctgtgtgtttatttgcctgccagtgctctccagcgccatcctgccctggacaccaccctgacgtgatgcctctattgcagctcagaggctttattttttccattttgacattggcactaaatgcatttggggatggttaaaacaaattactatagaacatttaaatgatcagtttaaggggaaataggctagtttatagaaaaataagagctagtggcttataatggtgacaggttctcatgtggcacccctaggacctgtgcagacagtagtctgttgaatcattacatcaaggagctgcccctgtcagggtgagtgtaattaggaacgataccagcacataaggctccccccaatctcttccagttgctttttcttttttcttttttttttagacaggtcttactctgtcacccaggctgtagtgcagtggcataatctcagctcactgcagtctctgcctcccgggttcgagcgattctcctgcctcagcctcccgagtagctgggactacaggcacccaccatcatgcttggctaatttttgtatttttagtagagatggggtttcaccatgttggccaggctggcctcgaactcctgacctcaggtgatctgcccacctcggcttcctaaagtgctgggattgcaggcgtgagccaccacgcccggcctccagttgcttttgaagagggtaaagtcaagtttctatttctagaaaacattttttagaaatttgttgcgatgtttgtacaatttacctcataagagaaccacacccttctccaaaagtgctggtactgcatcagtgagatgagtagggtttttgtttgggattgtaagactattaagatcctagtaagtcagtggtagtttactgtgatgtgagcattgtagattcccccgttgtcactaatcacacaacaattttgagaagtaggctataaaacaaaaaaaggttgctgttttctatttttaaataaaccaaaaaaaaacagaaaagatgtgaattttccccagttatgtgggaaaggtaaagcaacaccaaataaaagcccacagcagcttcatctttacgataactcagtgcatatgtgaaagagaatgatgcattaactgaaatacctcattgaatattatactactactggtaaaatgcagaagacagtgttaatgtgtttggtttggggactggttgttataaaatgcaatttttttttaaatctaagcatttcattatgtgttctacagtgtcggtgaataaatgaaaccaatctcaatttagaggtatggatgatgacagaaagcccaatagaagcttaatgatgcttctgtttgaggcccagcaagcaccactaaattactggatgaaatgaaattgttcacttgagggattagtcaaccatctgggggagaagttgctcactgtcaaatacagcatgcacggtcctagctgatagaccttttcctcattgctacagcaagccacagggtagagtgaccagttctcctatccaaaaataaatgcgaacatgcatacataaatgtggctgagggccacttttgccatcactgtgctccaaaggaacatgatattgttaaatatactgtacacattaaactattctataagatgctttacttttcaagtacggtgtcattttcacagtctccagggtgacaaatgccaatagatatgtgagttaatttttttaaatatctccgtgagttgtaaatagatgtgtatttgatctgccctatccttctttgattctttaacatgttctctctcttctgtttgcaaaatatgtttgaaagcattggtagtgctttccttatcagtaactggagttctcctgcttgcactagagaaggtaaagagagaatcagtattcttatatggcaatctggggaagcagcaatatgccactgtacaaaactgaagaaaagttcctaatttgtactttgtgaagggagatgaaaggacgtttaaagtatatatattttgtcaagaggaaagaagataaaactatgccagttttatatcaatagcttgtagaagctcagctcttcttggtcttggctagactgcctagattcccacagcagacaaggttgagaatccattgctggaatcttggtattgatgagttacagtgatggaacatgtgcttggccacaggcaggtccagtcactgcaaaagtgaccaagccagcaggtcacccttaacttcagaaacaattattggtggtgaactgtacttaaattgcagagaaacctgtaagtaatggaaggtaaagaaaaattacagaatggaaaataatattttgggcaagcaaacaaattcactgagaattccaaaagtatattaaaaaagaagatagctatgagttcagatctatcttattggtctttaatattacaaccaatccttaactttccactataaaggaaggattactagattgattactttctggatagataatctggtaataaatgataggtaaatcaaaaattacttttatttaggagtttgaattcttactctcatcagacattttttttctagggacgcttactaattaaatgatttaagttgtttcttaggggttttttgcctatatatttatgactgtgttaatgagtagtgaaatgatgcggaaagacagctatcaggaagaggaaatacagaagcctgaataatctatgggttagaaaagcatccctgaataatcaaaaattggcagtattggcattgttctcaagcctttttatgaaaatgaaatctgaaatcaccaaatgtaaacctgggaacattattctagtgttgctgtcttggattcatgttaagaagcgtcttcattctttgctcatgttgcccacttcttgtggatttgtctgagtgttttttgacaatcacttccttaaagactcttctgaactagttggacctggttaatcatagagagtagcctttaatcatggatagtcttcttggattatttttatatttgaaaagaaaatgttttatttgcactactgagtaggaagagttaattgttttctttgttctttttttgaagtcattacacaggacttcactccagagttaccattatgagtgtgttcagctctggtccacagaggatggataaaaatggtttgttatgtttttttgctctgcagtgctatgagccttatatctgttaatatgaaggacaaagtcaaaagcagcagtggatagcaggaagggtagagactaatatgtttgggaccaaaaccatctaagttagagatttccagatcacagaggggctgggcattctctggagcagtcattggttggtgctttattgtaatcattttgcgccaatccccaacaattaggaactggaccctgggaataagctgagggtgctgaactgttggggaagggtgactgtagccacatggaagataaaatatgggtttttctgcaaaatttccatctgagggtttttacatttaatatttttttaagacagtttaaagagcaaacgttttttaagtgtattctagttgcaaagtatgcacacatatcttgaatggctttatttttattgtgtaaaactgttgaacacatgactgtgatgcacaaattctttacgtgtaaggagtctatgcattttacagtaacttattttatgatcgggtgatgagacagttatactttcaactgccattatttttattaagtgctttcattttctttacagttattataaaattgtatttattttatacagatgggttttcattttcctgatgctgtaatgtttacttcagcttgttgacctttctttgtgttatctgcatgttgtaacgtgtgataagaatgaatgtaaaggctgtggcaactgtaattaatttttgtaaagggctggtcacacgtggatctggtttatgaatgcatttgggatgattttggtaaccagatcaccttttcagaaatttagatgtgaacaccaaaagaagcattttctcaacaaaaattaatagctggttctattttttttaaacctagaaaaaataaagttgatttttttcaattaaagtgcttttaattcttagcagtggggatggggcatgtgtgttttaccagagctatttgggcattaatatctgcaggcaagtacttaaagcacactgtggcagttggatgctgaaggcaaactgaaaaaccaaatgaaaaaacatcagacttccttctttggtttaaaaatatttccccctttctccccattctcccaatccagtggtgtgctggtaaatgtttagcagttcactcttctgggagaaaattatgtattcaactatacatgtttgttataaattttgctgatagcaagaacatataacacaattaacaaataataagatacaaatactttattgtaaatcccatatagccagttgattctcacagtatacttagttgctcaggaaagaactaaaatgcttttttaaaaggatacttaattgctttttgctcaactcctacagtcaacctatgattgattgtctttcaactgtgatttgaaaaatggcagactgtccaaatctaactcatttcccaataaatttattatcattcaatctgatacgtgatctactgttaaaactgtttcttaccatggtacatattagactcattaagccgaaaccacttttagctttaacattaattgtaaatttatatgattcaattttcataaccaatgcttaacaactgcaggcaaaattctaaaatgtgaccactgggtcttgggaatcagtaggggctgtatccagcacaccactgccccatcctttttttcttaactattagtgttgaataaacttctcatagttaatctacttgctgaactcaggaaattcctatcactgaccctggccagggctttaaagggtaggaaaagcattaatgtcagtcctacacagcgaacttttgatttagaagaatgtgacagaaagaaaacatttactgaaatacatgggaagcttgcatatttctaaagttgtctttatacttttcatttctcaaagctaagtaaactgtggtataggcatctctaagatgttagcatttaaaacatcaattgttttattgatgtttaaacaattgtttaaatcccactgaaaaatttaaatattaaaatatcttgcacagtctaccaaatgagttaaatcgttacagtcgtgtctacctcttatttttctatctgtatttaggctgctgttttggtgagattctaatttctttttcccctggaactactttctgtggaagacaaggaacagactggggacagaggcctgaaaacaaattggaagcactcagagatctattgctgaccagccctattcctcatgagttggcggggggaaagccattgtttttaatttccacttaatatgaaaatgcttgtttttaaaatgttttttcctgctgaacaaatgtatttttaaaaggaaaaaaattctcttttggctctaagaagtcagctgtatgagcaggcgtgaccatatcataacatgctgatatgatagaaatcaataaatttttacctctcaggaaaaaaaaaaaaaaaaaaaaa

SEQ ID NO: 746 - DNA, 13847 bp, Homo sapiens
atgctttgtggggacgttgacaagtggatccaagatggcgtagaaagtaatgacaggatttggatgaagtaatggatcactaatgaactacagtgctggtgagatgtgtaagaaattataaagagctctgatgggctatttgggtgatacccagtgcagtgaactgcaggatttttgtccctgagtcatggaagacagaagagctgaaaagtcatgtgaacaagcatgtgaatcacttaagaggcaggactatgaaatggccctcaagcactgcacagaggcccttctttctcttggccagtactccatggcagacttcacagggccttgtccattggaaatagaacgcatcaaaatcgagagtcttctctacagaattgcctcatttttgcaactgaaaaattatgtgcaagctgatgaagattgtagacatgtgctgggagaaggactggccaagggagaagatgcctttcgggcagtgctttgctgcatgcagctgaaagggaagctccaacctgtatccaccattcttgccaagtcactcacaggagagtccctgaatgggatggtaacaaaggatttgacaagactaaaaacacttctctcagaaacagagacagcaactagtaacgccctctctggatatcacgtggaagacttagatgaggggtcttgtaatggttggcatttccgcccaccacctaggggaatcacaagcagcgaggaatatactttgtgtaaaagatttttagaacaaggaatctgtaggtatggtgcccagtgtacttcagcacattcccaggaagaactagcagaatggcagaaaagatatgcttcacggctgataaaattgaaacagcaaaatgagaataaacagctctcaggcagttacatggaaaccttgatagaaaagtggatgaattcattgtctcctgagaaagtgcttagtgaatgtatagaaggagtaaaggtagagcacaatcctgacctgtcagttactgtcagcaccaaaaaatcccaccagacatggacctttgctctcacttgtaagcctgcaagaatgctgtatcgtgtagcattgctttatgatgctcatcgtcctcattttagtatcattgcaatatctgccggagatagtactacccaggtatcacaagaagtcccagaaaactgtcaagaatggataggaggaaagatggcccaaaatggattagatcattacgtgtataaagtcgggatagcatttaacacagaaatatttggaacttttcgccaaaccatagttttcgactttggattggaaccagtactcatgcaaagagtaatgattgatgcagcttctacagaagatctcgaatacctgatgcatgcaaaacagcagctagtaaccacagctaaacgttgggattcttcctctaagactattatagattttgaacctaatgaaactactgatttggagaagagccttcttatcagataccaaattcccctctctgctgaccagctatttactcagtccgttttagacaaatcattgaccaagagcaactatcagtcacggttacatgaccttctttatattgaggagatagcccagtataaagaaatcagcaagttcaaccttaaagtgcaattgcagattctggcaagcttcatgctcactggtgtttctggaggtgcaaagtatgctcagaatggacaactttttggtcgctttaagcttactgaaacactttctgaagatactttggctggacgactggtgatgaccaaagtcaatgctgtttatttattaccagtccctaaacagaagttagtacagacccagggaaccaaagagaaggtttatgaagctactattgaagaaaaaacaaaggaatatatatttttaaggctatctagggaatgctgtgaagaacttaatcttcggcctgactgtgacacacaggttgaacttcagtttcaattaaatcgattacccctctgtgaaatgcactatgcactagacaggatcaaggacaatggggttttgtttccagacatcagtatgactcccaccataccatggagtcctaacagacaatgggatgaacagttggatcctcgactaaatgcaaaacagaaagaggctgttctggccattaccactccacttgcaatccagctgccgcctgtgcttatcatcggaccctatgggacaggcaaaacgttcactctagctcaggctgtcaaacatattctgcagcaacaggagactaggattctcatttgcacccattctaatagtgctgctgatctctacataaaggattatttacatccatatgtagaagcaggcaatccccaggcaagacctctcagggtatatttcagaaatcgctgggtaaagactgtccacccagttgtgcatcagtactgtttgatctcaagcgcacattccacctttcagatgccccagaaagaagatattcttaaacatcgagtggtggttgttaccttgaatacttcccagtacctctgtcagttggaccttgaacctgggttttttacacacattctattagatgaagctgcccaggccatggagtgtgaaaccattatgcctctagcattagcaactcaaaacactcggattgtcttggctggtgatcacatgcagctcagtccttttgtttacagcgagtttgccagggagagaaaccttcacgtttcattacttgaccgactctatgagcattaccctgctgagttcccatgtaggattctcctgtgtgagaactaccgctcccatgaagctatcatcaattatacctctgagcttttctatgagggcaaactgatggccagtgggaagcagccagcacacaaagatttctacccactaactttctttacagcacgaggagaagatgtacaagaaaaaaatagcacagctttttataataatgcagaggtgtttgaagtggtggaacgtgtagaagagttaagaaggaagtggccagtagcgtgggggaagttagatgatggcagtattggtgtggtgactccatatgctgatcaagtgtttagaatacgtgctgaacttcgaaaaaagagattatctgatgttaatgtagaaagggtgctaaatgttcaaggaaagcaattcagagttttgtttcttagcacagtacgtacaagacatacttgtaaacataaacagacaccaattaaaaagaaagagcaacttctggaagattccacagaggacttagattatggttttttatctaactacaagcttctcaatactgccatcacaagagcacaatccctggttgctgtggtgggtgatcccattgctctgtgctctattggaagatgcaggaaattttgggaacggtttattgccctgtgtcatgaaaacagtagcctacatggaatcacttttgaacagatcaaagcccagttagaggctttagaactaaagaagacatatgtgttgaatccgctggcacctgaatttatcccccgggctctaagactgcagcattcaggaagtaccaacaaacagcagcaatcaccacccaaggggaaaagtcttcatcatacccagaatgatcacttccagaatgatggaattgttcagcccaatccttctgtacttattggcaatcctattagagcatatactcctccaccccctcttggacctcacccaaatttgggaaaatctccaagccctgttcaaagaatagatcctcacactgggacaagtattctttatgtacctgctgtctatggagggaatgtagttatgtcggtgcctttacctgtaccatggacaggataccagggtaggtttgcagttgatcctcgaattattacacatcaggcagcaatggcctataacatgaacctattacagacacatggacgaggatctcctattccttatggccttggacatcacccacctgtcaccataggccagccacaaaatcagcatcaggagaaggatcaacatgagcaaaatcgaaatggtaaaagtgatacaaataattccggacctgaaattaataagattcgaacaccagagaaaaagccaacagaaccaaaacaggttgatttggaatcaaatccacagaacagaagtcctgaatcacgtcctagtgttgtttatcccagtaccaaatttcctcgcaaagataatctcaacccaagacacataaatcttccccttcctgctccccacgcacagtatgcaatccctaatcgccactttcatccccttccccagctaccaagaccaccctttccaattccacagcagcacaccttgttaaatcagcagcagaataatttgcctgaacaaccaaatcagataccacctcagccaaatcaggtagtccagcagcaaagtcagttgaatcagcagcctcagcagccacctcctcagctttctcctgcatatcaggcgggacccaacaatgctttttttaatagtgcagttgctcatcggccacagtctcctcctgcagaagctgtaattccggagcagcagccccctcccatgctgcaagaaggccacagtcctctgagagccattgcacaacccggccccattcttccttcacatctgaatagcttcattgatgagaacccctcgggattacctataggggaggctttagatcgtatacatgggagtgtcgctctggaaacattaaggcagcagcaggcacggttccagcagtggagcgagcatcatgcctttctcagtcagggcagcgttccatacccacaccatcaccatcctcacctccagcatcttcctcagccgcccctgggattacatcagccgccagtgagggcagactggaagctcaccagcagtgccgaagatgaagtggagaccacatactcaaggtttcaagacttaatcagagaactgtctcatcgtgatcaaagtgaaacacgggaactagctgaaatgccaccacctcaatcaagacttttgcaatatagacaagtacagagtagaagcccaccagcagtcccatctcccccatccagtacagaccacagtagccacttttctaactttaatgataacagcagagacattgaagtagccagcaacccagcatttccacagcgcctcccaccccagatattcaactcacctttctcgttgccatctgaacaccttgcccctcctcccttgaaatacctggcacctgatggagcatggacttttgctaacttgcaacagaatcacctaatggggccaggttttccctatggcctacctccattgcctcacaggccaccgcagaacccttttgtacaaatacagaatcatcaacatgctattggtcaagagccatttcacccattgtcatctcgaacagtatcttcttcttcgctccctagcttagaagagtatgagcccagaggacctggtcggcccttgtaccaaagaagaatctcatctagctcagttcaaccttgttctgaagaagtaagcactcctcaagacagtctggctcagtgtaaagagcttcaggaccacagtaaccaatcttctttcaacttttcatccccggagtcctgggtaaacaccacctcatctactccttatcagaacattccgtgcaatggatccagcaggacagctcagcccagagagttgatagcgccacccaagactgtcaaaccccctgaggatcaactgaagtcggagaacctcgaggtgtccagttccttcaactacagtgtgctgcagcatcttggccagtttccaccccttatgcctaacaagcagatcgcggagtcggccaatagcagtagcccccagagctctgcggggggcaagcccgccatgtcctatgccagcgctctgcgggcccctccaaagcccaggccccctcctgagcaggccaagaagagtagcgaccctctgtctctcttccaggaactgagcctagggagctcatctggcagcaatggcttttactcatattttaaataatcactttttttttccctcaagggagaatgttttaatttctgtttgtatcagtagaattaaggtagttggacttcatctatagatgcacagttccctttgttttaatattaaatatgttctcacttaattgctttgctgctagacttgcaactaatttttttaaagtatattccattattttgcatttttgatgtgtcaaaactttgacagcttttatgtagaataaaaaaatttttaaatttgtgtattgttacatatgtttgcatcaagctagcagccaagaggttaattgtgcaactataaaaaaaaaaaaaaaaagaaaagtttgtctaaaatgtatttaaaaagaaaaaaaaattgtaagtagcatttacatttattcaataatattaccacatgctgggtttctgtaccagaaatggccagttgatgtacaaatgtatgttatttttgcttaaattcatttaaattttttttaaaataaaggggcagcatcttctaaataagttttatcagctttttttttttttttggtgacacgatgctgcattctaaaacttttatagttttagactatgtatgatgtgttgttgtaatctccatccaccataggatagagttaaaggcattctttgcaggcatattttgtatgccactgttttttgaaatgtgaaaaaaacgttggcatacttagttattttttggacaagctacacttcaagcttgtttttaatgttaatttgatagtgtgtgtttttttttttaaacaaatcaagaagctgaaaaatttttaggattgttggtgcttagtagacttgataactattttaaaaatgcgtgaatttagtaaaattctttttttctcactatgcatgtgtaaatgtttgtaacctggcttccctcttctccagtggtataaagaattgtgccgctttaaggtttgggtttttttctctccagtaaaaattttggtaccttatttgatgtttacattaaaatgtgacattatacgtggcaattcaaatattttgctagctgtcttgtttgaggaacaccattaaagaagaaatataatgtttgtcaaaaatgtatcaaaattcatcagaatctggggcagaaaactacccttgtttttcatgtctttcaattcttctaaaataccccttattgaacttgtacacaatataaaatttaaatagccatcttaaatattctaccatctaaaaattgctttgaatgaattttggtaaaatccaaaggaagatgtttaccctcttgaaacttatggtcttgtcacacatttaaagcaatatatgtccttattttcctgaccttgtaatactacttttatatttcagaggtatctcgaaactacaatataaacttttaaaaaaaaataagatgaggctggggaacctttcgaatgaacccaatcttcctgatgatccattcaaaaacaggtttttggaagaccactttcgataggcaatcctataatcaaagtacatttttaaaatcaggttgtaaaatggcaaaggtaaagaaaaattactgacatttcttctatgattggagtttagtttatgttggccagctacaaccccttttaatcctcagacagtttgggataaaagagtgcctttggttaatggttagcaagctccaggataagcgctgcgtgcctcttgtattcagctctacctttctgctaagagtgcggttcatttgtgtgtggctttgcgttccaggctgtgggtctctgtgtaaggtggcagacatagacttgtaaactgcagacgtgttaatggttagcataaatcacagctggaaaactgagccggcaagttacagcaccactctttctctgtatgatgtcagatcaccacatttagcaatgtcaaattttactcaacattctttagtaggaagaaaagaagaaaaagttttgccacgtagctatgtgcttttaagtctgtgacaaaactcaagacatatccgaatgaaaattagatctctctgatgtgaggatgttatggaaaataattttcccatcagtgattatccaccccccagcccccatatacaggactacaacgcaagctagataaatgttcaaaagcaatctgataatatgaagacagaattgtcaagtcagggctttcagttgaccccttgtcatgaggttattgcctaattttctgttttctatacttgaatctttaaaaaatatcagtttttaaattatttatatttatatttagttaagggtcatggggtcgtgtatgcaccccatcaccttatataaatatgttgatgatggaagctttggataaggaagctattaagttgtcatgacatccttgttctaagcagttatttctaaaaactaaaaataatagctacttattggcccaccgctctgctgtgagtatatgagtacttctcattccttatttccatagccagtcaaggattctaacgctgcttccatctgatactcttcttagattctgcatcaaatgcttattttgacttacaacaagcttactcttcctcagcattacataatgccatctttccaaccatgctttaaagaacctgctctttacgcatagtatcttataacattttgaacacgtcttgtgtaagaatcattgcaagtttccatcaaaatgaggcgtgtcttctgagtacagctgatgttctttgggtattacttgagtagtagtagcaagtacccataaatcagatttatgaaacataacttatatgctaggttcaacccttatatatgcatatatatgtatagtatatgtatataaaatttttttccagaaaacttgatgatagctctcagataataccaagtattaccagcttccatttcttcagagcagatttttttctaagtgaggttaattgttcacataatgtctttttacatctttgtcctttgtatcactctgaagttttctttttcttgccagaatatttgtttcactttttaatttcagtgctacttgagattttctttttttttaacctgaaagacgatattttggatgatagagtttgtaaagtgagccttcatgctgaaaaaattcttttcatgatctaaaaatggtcttttgttacgatttgaagaacctcattccgtgtaacatggatattttcttgtgtgtctttaaagggggttttggttgtcatttgggcatatgctttgccaaattgttatagcagaactttgtttttgattaatcagtagttaattattgaccatttaaactaacatgaccttaattttcctttcctcacacagatgtgctttctatccaggtcattttttacacgtgaaataacaaactgctttgtgtagattttttttttttttaaatcatcagattttagaataagtttaggtttaatgtaaacatcaactggtcttttcagttcagagaactgcagaataagtaaaataagcagaattcccactgaataagcattacctaattaaacatagcaacatctaagaccaatttatgaaaatactctccttttttatggaggcattggagctgctgagaaagctaatgaatttcccaactttgggataattaatatatagtattgtgttgctctagtgtagttgattttatgtgtttaatatttttcatgtcaagagcaaagctgcagacgtaaaagatgtttctctagcccccttagctagagcgagccacctttgttaagagtcagggtgtgaagaacaatttcaagataaattttagtatttcaaccattgttattaagaaaattagacttactgaaatactcatttaaaaacagacaccttctatagcattgttttatagtggagttatttttaaaaagggaatcccagaaagaatctataaaaatacaaggttaaaactttaaatgtattgaaagatacaaattggtgctttcaaatgtcatgtaagctagccattgtgtttttttttttccctccagctcctcaatggtagtaatttgtcttttatgatttaccgtacattatttcttgctcaccatccccttaacatatgaaaatccttaatttctactgccgcgctatatgtcttcctgaatctcaaggtataaatgtcttaatggatctgatttgtctccactctttgccatctgatccacattcaaaccgcctagaaattagaaagaataggtaatgttctatctacgatttcttgttcaaaatatcacgtagtggtgccaatcacttacaaagacaccatctccatcttgaaagagtaactggcatgttagtcttgaaaatgctcattatgatatgctcctcacatttcccatctgcttgaggatggacatttattagctgagactttaaagctgctaaattcacactttctactttcatacctttttaatcagtaatgtcaagaccattgttgcaaggagtgaatcttactaaacacatcctgttattactttaaactagaatatgagattcaagagatttaaaaacaattttaatgtaacgtttaaaatttttgaaccaattgagaatgtctactttggagtgaagtttaaggaaacagtcaccagagtttctaaaaattttttggagggaggtacctaatagaagaatctagacttagaaatgtgaactgtggttaaataccaaacccagttccgcagtggtcgtctaaagcgtctaaaactggagtgttaagaaaacccagagacattcatatagtttcagttatcagagtattagaccagactttatttgcaatttgttcaacagagagattttattttgatacagatattaagcataaagcatagtaagttttatataattctatgagttcattaaacaatattatgaaattttcattatgttcgtggggagtctttttaactgtttctacctcatatatgaggtctcttctgtattttactttgcatactagcatgtgattgcctgccttagaactatgtagaggaggggaaatcgatattaccttttaagaaatttttgattttatgaagtgttttcattaatacttttttaatgtttgagaagtaaaggggaaagggtggcaaattacataggttgcaacacagagtagaagtcacatagtactatttacagatctgtcctgttttaagatttgagaattgtgaacaggatggagcaatggttctcaaacttcagccagtatcagaattgcctcgaggtcttgttaaaattcagatagctggacccacccccagcatttctgattttggtctggagcctgatgatttgcatttccaacaagtttccaggcgatgctgatgctgccagtccaggaaccacactttgaaaatcactgggtctgattctcgcagtttgaaagtctcagagaccttcagagtctgaacgtcttttcaaccatgtatttatttactcagtgtaaaaaactgatctctggagacatttttataaatctggtgccatgactggaacatttgtggagaaaggtctccatggagcgacaggccctttggattggccaccacccctcctcactctcacccctgctggggtctgcactgctcttccgcagtagggtgaaggagctctttggttttagggtgagtttgcttttgtgtacgctgctgcctggacatcagtctggaagctgtgcatttgtttggtgtgcttagggtcaatcttgatccacatgcatggaagtgagaatcctggaaagaagccatcagaatgccatgagagtgcacctagcatgtatcgaggcactaagtgcaggagtccctgtcctaagatggcagtgacatggagcatcgaaaaccacagataatccttaaataataaaataatagttttgtttttttttcttcggggcagagtctcgctctgttgccctggctggagtacagtggcatgatctcggctcactgcaacctccgcctcccggcttcaagtgattctcctgcctcagcctcccaagtagttgggactacaggcatgcgccaccacgcccagctaatttttgtattttttagtagagacggggtttcaccgtgttggccaggatggtctccatctcttgacctcatgatctgcccgcctcgggctcccaaagtgttgggattacaggcatgagccactgcgcctggcaaatgttttagtttttatggttattattattttttttttttgtgggggagggtggtgagggcaaaggatttgtttttcaaattatgtgtttctcaggttaacaaagttattttagattctctgccatgccagcaggtgttagagagagcctgaagtgttacatatggcagaaaataaatgtctctgattactttgctacctttaaaaaaatctatatgtgtttgcaaaacagcctagggggatctaccacctacacagcatgaattattcataagtcataggtgcacatgtatgagcaagttatttttgagaaagaaactgcctataatataataaacctgtcaggtctttgggtattgtttaatttgtgtgttgttgctgttttatctggactgcatcttggggggtactgggctctgcttctggtttttagtttgcctttgaatttactgagctactagaaagacaaaaaaaagctatttttatggtaatagaatacagaatgacttaggtgtaaaagtacacgtgaagaccatcgtagaatatacagctttggagttttcttaagacacagtccttcctactgaaaaggcttgctcacctttggagaggattgtttatattttcagcctgggttcctttatgcagtcccaacttagaggggagcttcggtttatttacactttgctttgcacgataacttgtatgcgaagacctctttatatctttcagtaggtcagagggctctttgtcctggttgaagtcccaaagtgtcagtgcagctgagaatgtttctcagcctccccctttacagaggaagggtcctggattttcataaatccagaccatgcctgcttcctataaatccatgtatatgacattgtactgtatctgatttctgtgccagtcatctgacctgattctttaaaccccataaaggtactggctatatgtagtagttgtatcctaggtaaatatggtgattaaaatacttctcttctaaattataaagataatgagttttgcattttattaaagggtcctgttattagtgacacaggatttttttttaatgcttcatacatatagttcttatctaaacttgttcagctaacttcatagatcagttacttagcaaattcatactgagtcttattttgggaagtcttcctgagggaagctgtacaaaactgaggtggtcaggttcatctcttcaaagtaccagttatacagccatctaaataggcataacttatggcaaaattataacaattttttttctttgcagtaaatgatacctcatctaagaggctctaatacctaaagagtttatccttaaaagtaaaagtgactttgtaccataaaataaccccaaagccactctctagggtttttattttcttctttctttgtctttatcttttctaacttagttttggaattacgttagctactttggttccatagaacaagttttcaacttggggtctacagttcctacagtgtgctcattgtctcagtgaagttcttttgttttcaaagattcatggtaacaaaatgtattttactgctacaactaaaatgtatttataataaaatgcctttttaataatttggaaaaaaaaaaaaaaaaaa

SEQ ID NO: 747 - DNA, 4153 bp, Homo sapiens
gcggggcggggcccctgcgggcttgcagcgggctactgtttgccggagcctcccggcgcgcccccgcgagccccctcccgtctggcgcgcgaccccgccgcttcgaatgttgtgaatcaaatgtggggtttgttacattccgctgccgccgcggacagttcttaaagggccagccgccggctgccgcgcagacccagctgcgtcctgcgccgcctcccgctccctgagggcctgggccgagagagactgatcgcgcgtgggcctcgcgaggcagacgccgtcgggcggacaacaaagagagaggccccggaaggagccgggctgcccccggacccgggggtggggaggggagcacattgttccgcagggcgggagctcttaaaggatccagacaggcaccccccccctcccccgccccctgcccagtttggccgtcctagatcgggaacaaaggagtcaacgtgtggccgggcggccaaagggttgtgagtcccggcccagcccctccacccccctgcccccccgatgcgaccatgggctctggcagtgactaggtggccaccctccgcccccgtgggccagcggcgattctctgcgggacctggcagcaccccgggccagctctggggaagccctggcctcgagggccccctggccagcccgcctgcccgggatgagcgcttaccctcccagcagccgccgtcccgacctccacacctccccgtagaggagcgccgagcctcggctcctgccggcgggagcccccgaatgctgcacccagccacccagcagagcccgttcatggttgatctccacgagcaggtgcaccagggacctgtccctctgtcctacacggtcaccacagtgacgacccaaggcttccccttgcctacaggccagcacatccctggctgcagtgcccagcagctcccagcatgctccgtgatgttcagtgggcagcattaccccctctgctgcctcccgcccccgcttatccaggcgtgcaccatgcagcagctgcctgtgccctatcaggcctacccccacctcatctccagtgaccactacatcctgcaccccccaccaccggccccacccccccagcccacccacatggcgcccctggggcagtttgtgtctctgcagacccagcaccctcggatgcccctccagcggctcgacaacgacgtggacctgcgtggggaccagccctccctgggcagcttcacctactccacctctgcgcctggcccagccctttccccgtcggtgcccctgcactacctgccccacgatccgctgcaccaggagctgtcctttggtgtgccatattctcacatgatgccacggagactgagcacccagagataccgcctgcagcagccactgcccccgccgcccccacccccacccccaccaccctactaccccagcttcctgccctacttcctctcgatgctgccaatgtcaccaacagcaatggggcccaccatcagcctggacctggacgtggatgatgtggagatggagaactatgaggccctcctgaacctggccgagcggctgggagatgccaagccccggggtctcaccaaagcagacatagagcagctcccgtcgtaccgctttaacccggacagccatcagtcggagcagacgctgtgtgtggtctgcttcagtgacttcgaggcgcggcagctgctccgagtcctcccctgcaaccatgagttccacaccaagtgtgttgacaagtggttgaaggccaaccggacgtgtcccatctgccgggccgacgcctccgaggtgcccagggaggctgagtgaggccacgcagccgcctgcccgggagaaccctgcctgaagctctggaaacttgtgggtggggcccagggaggatggggagggagtggcccaggcctgccccttcgctcctgcctgcatttccagagctggtgccagggtcagcccagcgaggagtccctgcaataagcccctgcatttgccaagctccaaagactccctccctagtctgcctgcctgcccgcccgccacggagctgcctgagtgtccctgatcgggtctccctcctgtgcaccctcaggtccctccttttcctgctggcactgagtgccaggggtccgctccctcagtggggccggtggagatccttggccccaggatgggcagacagagcaccatcctgggtcagaaggtctcatgctctgaaatggcgtgccctctgcccaggtggcactgccaggtgcgtagacagacggtgtcacgagccatttcctgagccccagggctgaatcccccctccttgaccccgaacagtgaactcaggcagctggctctgtgttggctgctgtgagggctgagtctggttccctaggggaccctcatcccaggaacaacattccagccccaccctcaggctggagggcgtcccagcctaatcccgagctggggcacacgtatcctgaggggcttgggccatacggggagagggagccctgtgttcccggtggttgtccctcccagggatgcagccagacccgtgcccaatctcctctccctctgttgttttgcatgaacgtgaggagcagcagtttttgttcattcatttggcccaaaatcacgtgtaggatttggggatgtggatatttaagacaatttcttttttcttttggtttaataggggcgggtatagggaccaactgggaccgagtgcccagggggccgagcacggtcatgctggccggcctgcatgcatgcgtgtgccgggctgggctgggcggccggcggtcgtggggcagggttgggggtctgtgctcagctgataactgccatgcactgtactgcacacgtccctagagcctaccgggacccgacgcttttcagggcatttctccctccagccagggcccaactcccacctgcctgggcgaatctcctccaaggaagtcccaggaggatggggaccaggaaggctgtggacccccatctccagggggccttcccagcctgatccctgtcctccaagttctggaggaggccgctgtagggtctggctgagcttcccacccactttccctggtcccaatcctttcttgtcctatacccagctggggttgctgccctgaacgaactgcgtgtggggccggcacatcctagcaggcagcccctggcgcctgctgcctcagggatgctccaaccaccctcgttctcctcgcagtggccctggctcccacctcccgccccagcctgccgtggggcccgtcagcctggtcccacccccatggagaacccaaagtcttactgtatataactccaggtgacgtttctatatttatagcagtgttgaaaacccacgtgttttacacagaaccaccctctccaacccctcccttcccgaccccaacaaaacgttttcaaaccccttacagttcctggggcaggcggaaacaggctcacagattgtgtgtcggctgcagcagtgattccaacaagcagctattgggggggaaacacagcatttaaaaagatcatcattaaaaaacaagatttatacaacaattacttaggatgtttgtgatctgccgaccttgctatagatgccatgttaccaatgatttcctgtggtgggggcttgccattgtttactctcttatttaccaacttctggcctaggcatgacagtgggcaccttcccccagccctggctgggcccagcgcctgtgttctgtgttagaaaggttttatatatatataaaattacatatatatgtagaaatatatgtaattttgggggccctgttccttgcacattttacagttacctcatttttcccatgtatgtatttgagaaaatgctaatatatagagaaaaaaatggttcttaaagcttaaatgtgtggttttttccattccatgggattcacattggtttgtagcatttaacataactagtatgttgtattatatatatgtgtatactgattgaaatttttaacagatttgtactttttttaaaatgaaagttgctagttctgcttgaccaagtagtgcaatcattattttttttaatattgttgctgatttcagagggatattcactaataaatgtatgatgtataccaacgaccgcccacgc

SEQ ID NO: 748 - DNA, 21283 bp, Homo sapiens
cggtccctcgccgcgccgccccgaggggcacttccggcggcggttcacttcctggttgggtggatggagccgggcgggagcgcgcgcgggggaggggcggcgggtcagtctccgcccggcgctcccgggatcagctggcgggcgggcgggagccgagcgcggccccggctctcgctgcagcgccgcctcttctctgcgtcgcaggccggcccggcggccgtgacaatgtcgcggggctggtagcagggcgccggccgccgagccgtctcaagtttaaacttacacgaatcgctttctggaggaggaggggacccgctgcgcgattgacacgcatattcctataggcatcctccctcagcccccacccccacggccggattcgggtggctcctctccgaggtgaaatctgagaagaaatccttggatctcttttcttaaaaaaaaaaaaaaaaaaaaaaaatctagaaaccatcggtattttgctttgctgctccctattcgcaagatgaagaagtttttcgactcccggcgagagcagggcggctctggcctgggctccggctccagcggaggagggggcagcacctcgggcctgggcagtggctacatcggaagagtcttcggcatcgggcgacagcaggtcacagtggacgaggtgttggcggaaggtggatttgctattgtatttctggtgaggacaagcaatgggatgaaatgtgccttgaaacgcatgtttgtcaacaatgagcatgatctccaggtgtgcaagagagaaatccagataatgagggatctttcagggcacaagaatattgtgggttacattgattctagtatcaacaacgtgagtagcggtgatgtatgggaagtgctcattctgatggacttttgtagaggtggccaggtggtaaacctgatgaaccagcgcctgcaaacaggctttacagagaatgaagtgctccagatattttgtgatacctgtgaagctgttgcccgcctgcatcagtgcaaaactcctattatccaccgggacctgaaggttgaaaacatcctcttgcatgaccgaggccactatgtcctgtgtgactttggaagcgccaccaacaaattccagaatccacaaactgagggagtcaatgcagtagaagatgagattaagaaatacacaacgctgtcctatcgagcaccagaaatggtcaacctgtacagtggcaaaatcatcactacgaaggcagacatttgggctcttggatgtttgttgtataaattatgctacttcactttgccatttggggaaagtcaggtggcaatttgtgatggaaacttcacaattcctgataattctcgatattctcaagacatgcactgcctaattaggtatatgttggaaccagaccctgacaaaaggccggatatttaccaggtgtcctacttctcatttaagctactcaagaaagagtgcccaattccaaatgtacagaactctcccattcctgcaaagcttcctgaaccagtgaaagccagtgaggcagctgcaaaaaagacccagccaaaggccagactgacagatcccattcccaccacagagacttcaattgcaccccgccagaggcctaaagctgggcagactcagccgaacccaggaatccttcccatccagccagcgctgacaccccggaagagggccactgttcagcccccacctcaggctgcaggatccagcaatcagcctggccttttagccagtgttccccaaccaaaaccccaagccccacccagccagcctctgccgcaaactcaggccaagcagccacaggctcctcccactccacagcagacgccttctactcaggcccagggtctgcccgctcaggcccaggccacaccccagcaccagcagcaactcttcctcaagcagcaacagcagcagcaacagccaccgccagcacagcagcagccggcaggcacgttttaccagcagcagcaggcccagactcagcagtttcaggcagtacatccagcaacccagcaaccagcaattgctcagttccctgtggtgtcccaaggaggctctcaacagcagctaatgcagaatttctaccagcagcagcagcagcagcaacaacaacagcaacagcaacagctggccacagccctgcatcaacaacagctgatgactcagcaggctgccttgcagcaaaagcccactatggcagcaggacagcagccccagccacagccagctgcagccccacagccagcccctgcccaggagccagcgattcaagccccagtaagacaacagccaaaggttcagacaaccccacctcctgccgtccaggggcagaaagttggatctctcactccaccctcatcccccaaaacccaacgtgctgggcacaggcgtattctcagtgacgtaacccacagtgcagtctttggggtccctgccagcaaatcaacccagctgctccaggcagctgcagctgaggccagtctcaataagtccaagtctgcaaccaccactccatcaggctctcctcggacctctcaacaaaacgtttataatccttcagaagggtctacgtggaatccctttgatgacgataatttctccaaactcacagctgaagaactgctaaacaaggactttgccaagcttggggaaggcaaacatcccgagaagcttggaggctcagctgagagtttgatcccaggctttcaatcaacccaaggtgatgcttttgctacgacctcattttctgctggaactgctgaaaaaaggaagggtgggcagactgtggactctggcctcccgcttctaagcgtgtctgatcctttcattcctcttcaagtacctgatgcaccagaaaaactaattgagggactcaaatctcctgacacttctcttctgctccctgacctcttgcctatgacagatccttttggtagcacttctgatgctgtaattgaaaaagctgatgttgctgttgagagtctcataccaggactggagcccccagttccccagcgcctcccatctcagacggaatctgtgacctcgaatcgcacagattctctcaccggggaagattccctgcttgattgctctctgctctctaaccctactactgaccttctggaagagtttgcccccacagcaatctctgctccagtccataaagctgcagaagatagtaatctcatctcaggttttgatgtccctgagggctcggacaaggtggctgaagatgagtttgaccctattcctgtattgataaccaaaaacccacaaggtgggcactctagaaacagcagtgggagctctgagtccagtcttcccaacctagccaggtctttactgctggtggatcagctcatagacctgtagccgtgacccagtagcagatgcagttctgtaaccttcataccgtaaaatacattttcattacggagttatgaaaaaaatgatttttttaaaaaaatctgcaaataaggggccctccagcccttttctcctaccccttgccttctcctgtagaaatgataaggaaagaaaatcactttggccctccagatattccttggccagttcctccttgttagtttgctgtgttttctcattacccttcttcaatagcattatcttaaatcaagcactagatgccatgagcttcacctctgctggaatcaactccaccaaaagcttaactgtaactgaaactagtgaattgacacttttgtctcgttcttgctaggaatggcctcccagatcaattctcccaacccccgtctcctttggccagatgctgatgaatgtatttccctgtttttgctttttatcctgatgcattatcatgaggacatggctacttcagttggtcttaactctaggcagtagcctggagatgggtgtgtggtttaagaaagggtaaaacttactgactggtagtatatatttgagaagagaaattgagcccagctctagccaaccaactttgaccttgtttgatcatagacttagccaagggattttacaccccatgcaacctgcccagcattcgtccagctttctggcttccattgaaccgtgatttctcagatctggagacgtgactgcaagtatttgagatccttggatacaatgtgtacgttatataaatcccaagtattgccattccttttcatgttaactgttccaagtgggatctcagaattagaccaaaacaagacggtggtaatatgataccttttattagaagacttttcactggggcgggggtggggggaggatggggaggggaaggaattgtagcagaaacagatgtatttttcttgtgatttttattttgaatcaaatattgtaaattgtgtataaatgaagatgctgaatagttctgtttccacttggcatttcaagtctgatatcaggtgtctgtacagggttttgatttctttcccttgtataactacacaacaatcctacagtgtaacatatggaatcattttgaatagacttgtgtgctataagctttcagcaggtcctctgtctctagaataagcatgttgtttattttcagataatcagaaataagtgtgctgacaagctggacacaatctgggtgtgcccagcttacctttctttctgatgtttaaattgaaggctgcagccaatggaatatgttcagctggttttccttggcttcctagattaaaaaaaaataataaagcatagttctttattaactttaggatattgttcataaaataaataaaggcccctgcactaacatgacaacatgcctcatggtcaccctctctatatgtacttactcattaaagtgtattttatttccttatgtggaaagcacttttataaaatcacccttttgaaaagaagtgggcacagagaaccccactcctgttcttttcctctagtgccattgtccatcatcaaaagggaaactcttagttaatcagatctgtacaaataaaattccaagtccatttgcttgttttgctatctagtacttttgtttcttcttcctcacatttgcactttatgggggaaaaaagtttaacagcaacaacagcctataaaacactgcattctggagggcaaggtttgaccctaggaatgtgcgagtagcctttgaaaggcattggaggaaaagtctgaatcttccagccttccttctgtctttaaatacttcccgtgctggctgaaacaagatgagctaggtaaaggcctctagttgaataacagaccatttccaaaactgagagaggcacaagcttcctgccgaggattaaaaagcaaaagatatccacgaagggctctctgtggttggatagcagtgaaaataggacttggtttacccctttatggacaggaaaattgctgcaggtcagaattgtattctctttcctggacatagaaagaatgtataaattaatgaaggaaatgtttatttttaaataagaataatgtttgagttctatgttttcatatttgatttttttcgtatatacatgttagaaatataatgaaatatctagtttctcaatttaattgaaactatgaagagtacagtttagaaattaggtatctctaaattgttcttttcatatattacccataattacattgaaatatattatctagtcatttggctcagtaaagcttaatggaggcagttaatgaaaatgagcagactagaagccagagacggcagtagaagcctaagggagataatgacaagaaattgtcttgggcttatttagagtaaggcctcctcaaaggggagaactatttttctgttaaggaacacatatgagtgctttggtaaacggagccttccttggtttagagcatcatccctgagctgaaagagtttatttgagttgagcatagtgtcctggtacctgtggaatcatagcctgagctacaaagggacctttgagaccatcctctagtccaccatcctcttcattttacaggtgtgggacctgagctggattgaacagggtcgggggagaagaggcctgggcaggacaggccacctgggatctcatcctggcccttgccagccactggctgagtgaccttcagcaggcacttcacctctcagagttgctgttccttagagttatacgatgggtttggactagatggtctttaagattatagaagtatagggtcctaagtatatattattatattgagaagggctatgaaggatttatataatcctgatgttcttcagttatcttctgtagttcctgctattacggtagcagtgtttacattttaaagaattataatgggcttttactaacttgctctttcttgattatctgaatagaagcctaaatcataatcttagagattttcctttttaagtattacagaaacacatgcgtggacacacacctacctattctaataaaatggtatcagaagatttctttttaaatgtataatcaggcatctaccagtttaaaacgggcaaatactataagcatatgtttctgatttgcttttattccagctatgtaagaggagtaactatagcagaaaacatgacaaattgatttttccctttacaacattcaaatgagtcccaatgttttcaaaaatacatacctcagaggagataaggcttaagtggacacttctaagtatgattataattattataattaatgatttctttagcagacatatcagaattttgacatctaattaagtgttgttcccctcaatgtcatctagttttacttaagaagttaatacttattctaatgatgctgccatccttaaagttatttttgaaactcctctccttagaaataatatcaaggaaggtaataaggtataagaaaatcagctatattatttaattagtatcactttgagaaagcacctggaagtatattctttctttgtctactttttctactactcttggttctgagtaacatttagccatttccagaaagcaaattcaaccctgtaagatgaagagtggttactgttgaagacagtaaaaaggataatccacaaaaaattctcagagaggaccttataatagaaagtgaacatgattaagacttaatttctgtaattttctgaataaggaaacttctgtgattccttagtctttagaatggtttaaaacattgaaagatatgggtattaaaacacctctgaaagaagttgtcactttgttcagtgttatttgatattggacttcgctcttcctgaattagaattacacaacttggattgctaatacttgtggaaaaacaaacccaagaaacgaactactttctcaagatgtaatatttgttttattattaatacttttggttgttttgattacttatttcctactctcctgacagataattgatcaaccaatataaccttccccaggttaggaacagttctgccttcagcagtgctgtgggaatgaagggatctttggggctgacagcctatgatgtggagggatctgcactcagctaaataaatacatgctatagataccttgggccaaaataaagtctctcttgataaggtttttctgtgatttcccagagtccttaaccttctctgtctgcaagattatcaggctcccatagccactaactttgagctttgggatgaaaatgacaggattgcccagtgtgccgggttaagcaaattagaggctgcctggcagaacagaaaaactatcacatgaatatttagaatggaagctttcctgaaacactccagatactgcaaagctatctttattcctctctaaaggctataattttatcaacacaaagtcagccttttctttttccacattagtaatgtttctgaagttggatgtgcttagatttcttaaatcagaatgagtgctaggaaatctataacaagaaacctcttttgcttctcccagatttcctttcactaatacgggatagggaggctccttgggtaatgctaacctatgcaaagaagttaccaaatggtggtagttgctagaattaaagacacgttcttggttcacactttgatgtagtgacctgaatttactcttttcctgtgagtattctactctgccctattgcactctcctttgtcatgtggatgtgtgtttatcataggtctttaacgcgtccttcccaagaagacaaagcatacagttgtacatgaagatatcttatgcagtaaaaacgtgaaatttgaacattgctgcacaagtattgtataaaaaaaagtctgtaaagaactttcttatgtaaacatacaggggaataaagacttttatctgttcaaatgggagcatgatgtttagagatgtaaataacttaaaataagttgctcttttcctgagctgaaaacccacttttttgcagaaaggatttaatcacagtattgagtgacaataagtacctgggcacaagaaaagtatagctacacactgaggacatattaatgaatcatggctacctgagagagtaaaacccctgttttagtctcaaggagaataagacgcctgccagcctacactggatatgaccagactcagggttgtaaaatggagcgcaggtttgcagcttccctcctctaacttaatccctaatatacccaggccaacttaattaaacattttgtgttggcaagaataattttatccccagtgagaaaactcactcatttaattgcctcattggcctgagaggcacagctggccatttttggcttccatgaggtccctcatttcccagtcgtgggttttaatgcagctacctaatatatggtggaaccaaatgcttaattttgttatgtgagctagaaggtcatggtaattattagtttgatgtacgtctcttgatttccccagtttggttctaaaattttacgtttcaattgctgctgcatttccaagttcttgtgaagggatattttgctttctgtttactaactatatgtgagaaggcttcttctcaatgctccaagtcttcgttttctgtttttggcaagaatcatatctttgatactccctgtaaccgttctttcagtttttggtatgaggaaaagtaaacttctggtgttgtgtgatgtatttcattaaggaatatccagcctgacatttaagtcttcagattttaattctgtagggagcattctgatggccctcactatgtcaatcagatggagtttccaggggaaacccatcctaaatgattcagcactttgggttgctttggaagtgaatagggagctggtgaggatagttgccaagttgtcaggtattttaggaactccttctcttccctgaagcatgtgagttcttgctgaaatctacataatttggagcctcaaaatagactaatatggagttacccatattgaaagtgtcaacgtgcctaacctggcacacagtcctacatcagagcaagaaaaagaagtatgttttgacttcttgcttaattttatgtgtgaaaccaaaataaaaagaggcatgatccagtttgagggaattataacaaaaccctacgttaggctctatgataagtaagaccctgtgcagactatgaagccaggccctgggctttagcccctgaggtacaacaggcagtgtttactgagctctatggccacagggtatctgctatgacgtgccattggttaccaaaggaactgggtcaaggcatgtggttaggttagtataaatccttcaatgctagtaaagagactgcttcaaacacgttttcttgttgacacaatgctaccttcatataaaggaactgttcaccctgaaaacacattttccctgtaagaacacattcacatactcaaaaaaagacttttatctgccaacaagatttaatggttaccttctgtttctagtatatttggaatttatccttctctcgactaccttgtttctggtgctgccaccaccagaattccttaagggaatgtggaggtctgggcttcccccatattctctggcatttctttgcccttcagagtgccaggcctggagagttgcaaagtgtggttgctctccgcctcagccacactgtacctcctctaacaagaatagaaaggttaagggacttggccttctcaggacaaccctttaaatgtacttttccattcctacaaagcctgttgatgctgaaagaaagataggaaatagctcttgtccttgttttgaaggacaggagactaattttcccttcaaacttgatattctggtgtttttgtgactgtttttgtaaattattcaaagttgttggaattttaagtctgattttcccagtactcatcatgaaggtcatagaatatgctctgagttggaaggttttccaaatgggttctcgaccaaaaacccactttttaacaaataattttgatgggttagacatgttcttccatcctctccaaccctgaatatgggcacatacacacaccccttggtacttcctagttctcaaaatgtaatctagcacttcaggcatccaaagtgcccctggttcaatagatagctgcttttttgccagtctctgtgcacaaattgttttaactgaattcagtttaaatttccaaaaaacactgactctgttcaaactagtgttcattggattattgacctgtatgatgccagagttggtcactggcttgactaagttttccattttttttccctaagagatattttgctctcctgcagaacaagcttaataacatcaactttcaaggtagttttggaagatgagaaattgtgcttttgttttggcaactgaaaactttgtccaactgatactatgtgaggaaggtggttcaaggagttttagggccctcttgtccttctttaaggctctgcaaaccttattttggaaaacttatttttctcccttttatttgaatttcctcccagaaattatcatcttggtatcactgagacaaatctaatatcaatttacttgcctgagaaattaggattatgtctgtccacataaatcgcaaggaagaaggtattctgtttatttcctgtccactgactgatgctttcgtatcaccatgtagctgcacatactaaaattataatacaaggaaaaatttattcttttcaaaatcttattcttcaaatactattctgaaagccatttggcaccagtacagaatttaacttaacgccccaatctggaattcactgaacgcattcaaactgttagaaaggaaaataaaaatggaggacaaacacatttttgttctgtttctgaaaacaatatttaaggtcagaactgtttaaaaagaagcactgctaaaaagttataggattcagagaaacatagtatttttgtacagtatcttataaaatgttcagacctctctctacattctctttacaatgtaatgtctctaagtgactggtttcccaataaactgattttaatgcctcttctgctgtggtctgtgtgcttaattcatgcagaaactttagcaggggataatttttggcagaaatttctgctagctaatggtttgcataggaggggagagggtcagtatgggaaggggatcattgagttccatctctacagaggttctgggtcatctatggctccaaatcattgtatctaatattcttatcctggtgggttgggaaactccagtagtatctctttactgagcccatgatgaaatgatacctttacccccaaccaccctttctctggattcttcttgcttagttacatatgcctttttcctgccctcttgctaacatgtgcccaatgacatacttctaacctgctaatatttcttggaaggtaagctctcttgcattctgataattgtctatttgattttaaaagccagagcaccctgaggcacctctacctagatagaaatagactagtatattggagtttgctaatgcttctgtaatggcccatgcattttactccttctgcttaaagaactttatggcagattcatttaagcagaggagatctttatgaacttagaagactgaaaacaaaattctggggcaactccagctgaaggtgatttatttggtctgattttgatgctgtatgctcccctcagaaggtaccttcagtatttatattttgggcactcgtatgctctttgagtagtgcttgtgatgtaagtcatcaagtaaacttgcatttatcaagcagccacattctgcttcttttcagagagtttgtccctctgcatgtggcgcggatgaccacatgccagattctgaattgagtcatccccagacagtgtttctacataatccaaaactgtcatggtatatgtggagatgaatgactgggtttgttttcattccataatgagccagtgccaggtagagcaggtgtccgtgcctggccctgtgtgtaggagcattgcatagttacgctgaatgtctgtgtgcctaacatcttcatctcctttcctgtacgtcgtgcctatcatgttccaaaacgtgagacagtggttgattgtgttccagtttgtgtgcagtttccttgcctgacttttatttttatgtttttcctgttgcattttcaacatctattatttggtcccacaatgtttttgccgcgggttgaccattaaatgttccaaatagagttgaattgacctacacattaattctgcattttatgcttttctagatctccagagggagtccaatccctgtcctgtaataactgtagagcactttaaagaatcactgggtgttaaaggccttccgctgtatccagacccctccagagtacctggcacaaagactcagaacaacttagaatctgactacttggccagagatggcccttcaagcaacagctcattccacagcagcgaagaggaagggactgaccttgaaggagacatgctggactgcagtgggtctcggcctctccttatggagtctgaagaagaagatgagagctgcagaccccccccggggaagctgggaggagccgttccattcgctccaccagaagtctctcctgagcaagcaaagacagtgcaaggtggaagaaagaaccagtttcaagccttcacacagccagccactgatgggctcagtgagccagatgtttttgccatagctcccttcaggagctcaagggttccaaatgatgacatggacattttctccaaagccccatttgtctccaagagcagtatggctccttcccagccagaggagtcagacgtgtttttgagagctcctttcactaagaagaaaagcatggaggagttaacagttatccaatgcacctcccaggagctgcctgcacagaccggtctcctcagtcagacaggtgatgtccccctgcccgcgggccgtgagagagctgtgtacacctctgtccaagctcagtattccacagctggttttgtgcaacagtctaacctcctgtcccattctgtacaagcagcagaccatctggacagcatctctcccaggggatcctgcctggaatctgggggtcattctaatgacagaaacaaaggacctcagctccagaaagaagctgtctcaggccccatggctggcaaaccattccgcccccagtccttatccaagtattcccgtcactatagcccagaagacgagccaagtccagaagcccagcccattgctgcctacaaaattgtttcacaaaccaacaagcagtcgatagctgggtctgtttctatcacatccctttcctccaggactacggagctgccagctgctgatccatttgctctagcacccttcccttcaaaatcaggcaagaaaccctaggagcaaaacctgagcctcaagcctcttgtctctatcccaccctcaatacccgccatggcactcccagcttagccttctgaagaagaaatattatcagttcttatatttcaattccctgcgtcagagcagaatttcttgagtcaacaaactcagttgcagtgatatttagttgaagcccctttaagttatgttcatttttgtttgtttgtttgtttgtttatattgatttctggacttggaggcattttcatctccttcacagaggtcatccacttccaccaagaactctgctttccccccgccccacccacagaaactgtttaaatcctgaaatacttcttcaccccaatcccaaaggggccctattgttgctagttttaattcctgtagctcctgttctaagtcatgcccatcgaagaatcaagattagtccctccactaaatcaagatttagtactcttgaaaaggggagatgtctggaaagaagagcaagataaaaaccctgcacatcaacaggaagtataatcctgcagttactaataattcctgtagaagcagcagctctaggagtctccagatctgattctcagtctgtgtgcaagccaggctggctctcgtgcatgactgtctatgggtgtggaatgtacgtcagagcctgtgtagagatacaggcagatgggctaactcctcatgtctagtcatgctggcagggctttccccacatccatgcttttgaaattagtgtgagtgtacaggtttgtgtgtgcatgtatacgtgtgtgtgcacaggaagcatttccacttgagggaaatcctgccccatcatgcctacctccacaatgaaatcactcgttttttggtgtttgctcgcctaactgacttgaaccccattttatttatttagtttttttctcatggcaaagtagaatacgttggaaggtgtagggaaatcctgctggaactggtgtttcagagtaaatcttttttctctccggaatttcttgttttgctattaacaaattatatttacctgattatgaaaaattaattttccttatacattttccccttacaacactagaaaagagcaccttgttacagttccggcctctcagtatgtgggctaaatgccagcattagggaattcattaatcatgagactaggctacaaactaggcttgcttgttttggggtggttttgttgttgttgttgttgttgttgttgttgtttccaaatctctactgccttttgaggaaatgtaaatctgagacatggaaataagtgtttgggagaatggaaaagagctgaatcaggtaggcatgaaaacttttacattctctatcctctttagatgttgaaataggccagacaggttaactgatgttttttaaaattgtcttttatttctggaaagatctgacttattcctagcttttttcataccctttattattagtgccttaaaataaagctggccaggtgcagtgccacacacctgtaataccagcattttggaaggctgaggcaggaggatcagttgagcccaggaagttcaagaccaactctggcaacacagcgagaccctgtcccttcaaaaaataaataaaaaaataggctgggcatggtggctcacacctgtaatcccagcactttgggaggccaaggtgggcagatcacaaggtcaggagtttgagaccagcctggccaacatggtgaaaccccatctctactaaaaatacaaaaaattagctggacgtggtggtgcacacctgtagtcccagctactcaggaggctgaggcaggagaatcgcttgaacccgggaggcagaggttgcagtgagcagagattgcgccactgcactctggcctgggcgacagagcgagtctaaaaaataaaattaaataaaataatgaaaaaaattagctgggtatggtgacatatgcctgtagctactcaggaggctgagctggaaggatcacttgagcccaggagtttgaggctgcagtgagttgtgagtccagcctgggtgacagagtgagacactgtctccaaaaatataataataaaaataaagcctgtatctcaatgggaagatttctgctaaggcagttcaactcactggaaagaactgctgcattaggtttcaactttaatgctttctgttacttctagtaaaggttaagtgatttttccattagctgtagaagtttggagagctatttaccaagccagatcaatgatttaaaaattattggaaattcatctaagaatcaagtctgaatgcccaattctattgcggttgattaggtgtgatattctttaaagttcaggaatattggcagtaaaaaatgagcagctacttttcaatactttgtccttttttggtggtctctgcctatttcaaatgtcctgatcaaaagataaataattggcactgtgccaaggtttggttttccaactaaggtttcaactgtgccagaaacctatgtccttcactttggtggatgctaaatgttattctaagaatatgctttttcccaattctcctttctgatttttatgtattagtggatgcaaaattgtctttctagttgaatgaataatttcggctaatgcacgtggaactttgcaccccagattcttcccatggtcattatcaagtgaagccctcaaaaacatgagcgaagagcctagaaatactcagggagatttctcaccccaactcagaaattttttttttttttttcaagacggcgtcttgctctgtcgctcaggcgggagtgcagtggtgtgatctcggctcactgcaacctccattttccgagttcaagcgattctgcctcagcctcccgagtagctgggattataggcacacaccaccgcgcctggctaatttttgtattcttagtagagatggggtttcaccatgttggccaggttggtcttgaactcttgaccttgtgatccacccaccttggcttcccaaagtgctaggattacaggcgtgagccaccgcacctggcccagaaattctttttttttttttaaattattattatactttaagttttagggtacatgtgcacaatgtgcaggttagttacatatgtatacatgtgccatgctcgtgtgctgcacccactaactcgtcatttagcattaggtatatctcctaatgctatcccgcccccctccccccaccccacaacagtccccagagtgtgatgttccccttactgtgtccatgtgttctctttgttcaattcccacctatgagtgagaacatgcggtgtttggttcagaaattcttaaagtaagagatcattctaattcccctttccaaatattcaggattatctctgtaacagcccagcaaaatgtttttcctttggttatttgataattcccttctaatcaagtgactattttaattctcaaggtgcaaatcaggataaaatcatggtgattttactacatagttgaatacttcgtcaagtatgagcttgtatcctttttaaatttttcactggaggccaggcgcggtggctcacgcttgtaatcccagcactttgggaggccgaggtgggtggatcacttgagggtaggagtttgagaccagcctggccaacatggtgaaaccctgtctctaccaaaaatacaaaaagtagctgggcgtgatggcacgcacctgtagtcccagttactagggaggctgaggcagaattgcttgacccagggaggcagactttgcagtgagccaagattgtgtcattgcactccagcctgggcgagaagagcaaaactccgcctcaaaaaaaaaaaaaaaattgtcactggagacatgatgggtggagactctacataccttctttgaatacagaaacggatgcaaacacatgcaaattacttttttttttttttttggtgatgcatgaaaaaactttgacttgtggattacattaattattagtaacagttagattctgccgacttgtattacagtagggtcttatttccttaaagagaaaaaaaaatacagtcatgccccacttaatgatgagggagacattcagagaaatgcatccttaggtgattttgtcattgtgtgaacatcacagagtgtacttaacacaaacctagatggcacggcctactacctacctaggctatatggtccagcctgttgctcctgggctacaaacctgtacagcatgttactgtactgaatactgtaggcagttgtaacacaatggtaagtatttctgtatccaaacattttagacatagaaaaggtacagtaaaaatatggtataatcttatgggaccatcatggtatatgtggtccatcattgatggaatcgtttttatgcagcacatgactgtatataatcaacaaacaactctactttcttgttttcgtttgttgtgtttttgctttacacatttgatagggaacatagaagttgtgacctttcatttcagtggaaagcattgagccagaatatatttattcctaaaccatcgagccacacatgcattgatgaaccctgaaagaatccacagtaattgactaacaggcagtactgaatgaaagatgtcatatgtggtgaaaaatatttaatatatcagtttcttgggctcacatacagccctttagttccaagtgcttggttagattagaaaatgggatgaacacaatttgatgctgaagcagctgctgagcagcacccagggagtctaggtcatacgccctatattgttttcggcccacttattgttgagttgaaaagtctcatatttgtagactagagtgtatgtgtttagaggctcatgttgtatctgagttttctctggcaactaagatctctttctaaacgttctagaaagatactggtatcttactggcccattatttagtaagttttagaatacatgtacatcagtgttttcaactgcttggtggacatttcactgatgcataatcaaagtagcagattataatcatcagagtgatctgacaaggaaattctgtatttgcttccataaagaaaaataatcaaaacatatatcagatataatatatatgcagtatatcacataggaaattttattgtaggaaattagagaaggatgctactcaattcattctctagcaggaagaatacagcttaaaaatcacttgggtccctttaataaagaaaagtgtgattctgtgttgtgtgtttggaactgaaattggagaacacgtgccagtcgactgtgaaatggttgctggataaaaccacagatgtggttttatccgagaaatgtgggactgaaattattttgatgagaggtacataagagagctgcagaaaagactgtagcttctgaggaggcaggagtaccttgttaatatccaaaccacccctgagttctaatgttccaactccacctaaacgaggaattggaaactttaaatggaattatctaatttaaattcttagttttttctttgtctttctcagctgatacttgtagttttgttttgttttttaaccaccaagaacacttgcaagtttgttactgaaaacatcactaaaggaaaagaagagtttcaaaatgcttgaaaagtagtatgtggttgggaattgtttttgttcaagtccctggaagtcctcttggcttagctcccttgttcctgttcccacttcatttccttacttaacattcccctattttgagcatgtcaataagtgcatgatgaatggcacagttgaatgatcatgttaactttaattgcttcctttgttgctgtaaacagtttcttgttaagtttcagccaagtctgtgacaatctcaccaaataagaatgaaatgggcggggtgtggtggctcacacttggaatcccagcactctgggaggctgtgttgggccgatcgcttgagctcatgagttcaagaccaacctgggcaacatggcaaaaccttgtctctacaaaaaatacaaaaattagccaggcatggtggtgcacacctgtagtcccagctacttgggaggcttaggtgggaggatggcttgagcacgggaggcagaggttgcactaagccaagatcgtgtcactgcactccagcccaggcaatagagccagaccctgtctcaaaaaaacaaaacaaacaaaacatgaatgaatgaaatggctcaccttccctattatgaactagaagaaaggatgaaggaaggttggcaggaccccagccttactctgtagtgacaacccagaggtacttttcccggaatgcagggtcaagtttatgtgtgaagggactctagaatagctggtaaaaatggctacatggtaaccattcttgacttagtccagtattcccataatttgtaattccataaatttattctcagctgtcccccagccatttctaatagaaggatgtgtaccccagttttgacaatgttcttgaaatcaagttagtgttacctgcattgcattataatggaactatatgtacatgttaaagggatccgtttgattcctttcggcaaggaattgcaaaaatagtttttaccaataccagttaaaataggataggttagactttgggggcagggtgagacagtgcagccttttcactctgaaatggcaaatcagctgtactctttgagtctaccagagattcctatttgagtgtgaatggggtgtgtgtgtgtgtgtgtgtgctcattcatcttcatgctttcttccatggtgttaattcaagctctcctaataaaggtatccaaagagtactgagaagtgaccataggtatttggcatgagtaaatgtagttccttttgccaaaaaaactctcaaaagttacaactggagttcttcgcgataaaaggttggggaaatcagccatggctttagccttgttcccaagtacacatcttcttatccacaaggatgaaactctgtagggctcaccctgagggctcatgtgtggcattgagagggtagcagtgaccagaacaccacaaggcccacaagatgttttgaatgagggaacatttaatgtcatttgttaggagatagaaaccaaataataaaggacaaggaccacgctcattccgtggagaagaggtgaactccctctgctgactatttggaatggactgaatgaggaggtctctccagccagaaggagtattgaggtcatcaggcctcagaaaacaatgtacacataatctcgggctgtgaacaagagaaaggagggggggaaacatgaaagtcaatcttaacaatttttgcaatacctcttatttgcagaccattggatttatgttattgcactctcggtgtgatttatcgtatgtatctgataggttttatgaattgttttgagttgtaaactcctataccctttattaaaatggacctaattaagtgattaaaaaaaaaaaaaaaaaa

SEQ ID NO: 749 - DNA, 7441 bp, Homo sapiens
agaggagccgggacaccgagggaagaggccggagggagatcgcggaggggagggggcgggaggggggtggggtatcctgagtcgtccgtggtccggagtctggaaggccctagagcggcgccagtcgacccgcctcgccacaacttgcccagaccagacacgtttcatcctgcgccctgcaagaaggagccggcctgcctctctccgctttgctgctcctcggcctccgcgggcccggcccgcgtcagcagcgaccctggggtctgggtcccctgtgtcgcccccgcccgcctgcagcgcccggcacccgcccaggagcgcgcagctggggttctagggacgtatacttgagcaagagagaccacagctcttgttcccgctgatcctgcagcccagtggatggagtccagaatctacagacctgccaggaaagaaaaaaaaattcctgatgtctggtccaagcaggaattccccggtggattggggaatgtctggcttttcctcagcttattgatctctgtggtaaccactggaggcccccagaagacccatagaaatgagaggcctgaggtctacaagtcgctgctagaaatattttagcctctccaaagcccagaatgcagccccgacccaagtttgtaagggttctgggtgcacgctgaccctgcgcgggcagacgcgccctttgctccaggtccggacctgggcgctgctatagcaacgtcctggacgcccagaccttaggccgccgccgccgcggaagcgaggaacccggccttctcccgctcctgagggctgtggcggcggcggcccgggaggcggcccaggctgggtaaagaccgcccggctcctcctatgcaagctgaggcagcggattggttttcaagcatgcccttccagaagcatgtctactacccgctcgccagcggcccagaggggcccgacgtcgctgtggccgccgccgccgcgggtgcggcctccatggcctgtgcgccccccagcgcggcttcggggcccctgcccttcttccagttcaggccgcggctggagagtgtggactggcggcggctgagcgccatcgacgtggacaaggtggcgggggctgtggacgtgctgacgctgcaggagaacatcatgaacatcaccttctgcaagctggaagacgagaagtgcccacactgccagtcgggggtggacccggtgctgctgaagctcatccgtctggcgcagttcaccatcgagtacttgctgcactcacaagagttcctcacctcgcagctgcacaccctggaggagcggctgcgcctgagccactgcgacggcgagcagagcaagaagctgctcaccaagcaggcgggggagatcaagacgctcaaggaagagtgcaaacgccggaagaagatgatctccacccagcagctgatgatcgaggccaaagccaactattaccagtgccatttttgtgacaaggcctttatgaaccaagcttttctacaaagtcacattcaacgccgccacactgaagaaaattctcattttgagtatcagaaaaatgcacagattgagaagctccggagtgagatcgtcgtattgaaggaagagctgcagctcaccaggtctgagctagaggctgcacaccatgccagtgcagtcagattctccaaggaatatgaaatgcagaaaacaaaagaggaagactttttgaagttatttgacaggtggaaagaagaagaaaaggagaaactagttgatgaaatggaaaaagtcaaggagatgtttatgaaggaatttaaagaattaacttcgaagaattcagcattagaatatcaactgtcagaaatccagaagtccaatatgcagatcaagtccaacataggcacattaaaagatgcacacgagtttaaagaagaccgttctccatatccccaggatttccataatgtcatgcagcttcttgatagtcaggaaagcaaatggacagctcgagttcaagctattcatcaagaacacaagaaagagaagggtcggctcctgtcacatatagagaaacttcgaacctcaatgatagatgatctaaatgcaagcaatgttttctataagaaaaggatagaagagctagggcagagactccaggagcagaatgagctgattataactcagagacagcagattaaagactttacctgtaatccattaaacagtatcagtgaacccaaagtgaatgccccagccctgcacactttggaaactaaatcaagtctgccaatggtgcatgaacaggcattctcgtcgcacatactggaaccaatagaagaactttcagaggaagaaaaaggaagggaaaatgaacagaaattaaataacaacaaaatgcatttaaggaaagctttgaagagtaactcctccctcactaagggactaagaacaatggtggagcagaacttgatggagaaactggaaaccttggggattaatgcagatatacgtggcatttcaagtgatcagttgcatagagtactaaaaagtgtggaatcagaaagacataagcaagaaagagaaatacctaactttcatcaaattcgagaattccttgaacatcaagtcagctgtaaaattgaggagaaagcactactctcttcagatcagtgcagtgtttctcaaatggataccctttcaactggagaagtacccaaaatgatacaacttccttccaaaaacagacaactgattagacaaaaagctgtttctactgataggacatctgttccaaaaattaagaaaaatgtcatggaagatccttttcccagaaagtcttcaactattacgacccctccttttagttcagaggaggagcaggaggacgacgacctcatccgggcatacgcatccccaggcccacttcctgtgccgccaccacaaaacaagggcagcttcgggaagaacacagtgaaaagtgacgcggacgggaccgagggaagcgaaatcgaggacactgatgattctcccaagcccgcaggagtcgccgttaaaacacctactgaaaaagttgaaaagatgtttccacatcgcaaaaatgtgaacaaaccagtcggtggaactaatgtccctgagatgtttatcaaaaaagaagaattacaagaactaaagtgtgcggatgtggaggatgaagactgggacatatcatccctagaggaagagatatctttgggaaaaaaatctgggaaagaacagaaggaacctccacctgcgaaaaatgaaccacattttgctcatgtgctaaatgcctggggcgcatttaatcctaaggggccaaagggagaaggacttcaagaaaatgaatcaagcacattaaaaagcagcttagtaactgtgactgattggagcgacacttcagatgtctaattccacatgtcagaagattattccagaagccagcagtatttcagtatcacagtgtttcagtaatttgcctccatgattctagtgcttctgccttaccgtgtttcccacagcaacacagagactgattcaaagaacaatggtctctttaatggcacccaatacagtattgaaaatcagatcatcaacagtatttcgaagcatgtaaaggtgtttaagacttccgctgctgcttaaaaataacatgtcattgaagtcataaaaagttttttcttcagaaaggtactctagtgttaagtgtatttttttcaactaattttttagtgaattttttttaaacttacagcatgttttggtttgaattactaaaactttaaaaaatatttttcttatgtatgctgtcgtatcgtaggcgtttatattataaaattctgttagtagtcttaaaattgaattggtggaaccactaatccttaaaagttagtctggttatttttcatatagaagtaagtttaatccgagtgtggtggtgttcacctttaatcccagctacttgggaggctgaggtgggaggataacttgagcacaggagttcaagaccagcgtgggcaatatagcaagactccacccctccacaccccaaaaaagtaagtttaggattagaatatagctaggtccaatgttaaatacattttcctggagtacatttgtcacattcagctttgagccactgtaagcatgttactattaaatggttggttattttatatagcatattctttatcttggatattttatgaataaagtatagttattttaagtgccaattaatttatcagactaaatagaaaatatttgagccattactgaattcacatatgtatgtttttttttactatttaaaatacccaacatgtattatgaaatacctcaaaagtaatttagttacattcttaaacaatgacattgtcgaaagaaagttcttataagctgttttttgcatttttataacttggttatactatattctgtttccaagtaaccttttaactaaaagatttgttgggttttagatctcttttcatttgtcaaccttttcagtaaagccctctgttacatcactgtgactgtggctgtgttattagagatgaattctgagttaaatttgtacttattaggggtcttacagagggagaatctggccttgattgctatgccatatgacattctgtcctaatggttagaacaaatctttatctgtttccacccaccctgggatcctttttacttgtagcccattcctgccctctaaaagaatccttccaacttcctataggggccatttcatgcagatatactcactttatatgtatgtttctaaaagctttagtgaaggctgaatccaagtttcatgtagtaggacagagaacagaaggccgaatccaagtttcatgtggtaggacagagaacggcaatctacaaaactacaccaagcctaagatggcccatgtgccactttgttcattcatttatttattcagcagatatttattgaaccacttggtctggtttggttttgaacacgcactaattcatttaattacaacaactttgcgatgtagttattgttataatcctcatcctaaaggtgtgagaaacagagttattaagtaagttgccagaagccatacaagtacaaagtgtcaaggggagactttaagccaggtctctattccatgttttgtgtctgccatgttttcattcctgagcagaagagcttggggaaatgaacttttgctaagtaaacccagtatttaaattaagtcactatatctgtgtcttttaagagcccctcctttagcttacatggttagttgtatctttttttttttttttttttgagacagagtctcactatgttgcccaggcttgagcgcagtggcaccatctcggctcactacaacctccgcctcccagattcaagcgattttcctgcctcagcctcccaagtagctgggattacaggtgcccaccaccatgcctggcttaattttttgtatttttagtagagatgaggtttcaccatgttggccagactggtctcgaactcctgacctcaaatgatccgctgtcttgtcctcccaaagtgctgggattataggcgtgagccatcgcgccctgctgcatttcatttttttgtataaaatttggtttgttcgtttttgaggggaaccattcctttatgttgccccttactgatgcccaactaatgtgtttctggttactaacagaccttcatcccccaccctccctaaattcttcggtgtaatctaagcgttatctgcaccacttctgaataataaatgtgtttgaaatgcacacctacacaaccctgtcccacactggcctgtaggacctaatctaccttcatgtctttcagttgatttgtatttctgcaaaagatatttcaaggattatcaaggtatggaattttttttattttttatcttttaacaaacttgttcatttccttttctttccattgagcacctctgaacaatgtgattcttttttttaagtctttcacacttcaggaaaatactacattcacccacgttgtgattcatatcggacagtttcttactcaaagataacacaaataccaattcttattcatactttgaaactatattttaccctagactgccttggttcaaaggcctagtttcgacattactgtggcaaattatttaagctctctgttttcatttctttttctgtaaatgcaggatgaaaacaatatgtatctcctaggatggctgtgaggagtgagtgagacaggacatgaaaggtgtgtatgaactgtgataactgttgcccttgtgggcatgttatatagggctggctctaggaagaagcctgtgtcttttttcagaaatccctggagcaacttaaatgtctttagaaatgacaagtctctcagttatccagttagccgtaaacaggttctggaagacacacctagatagaactcggcccgtcagttctgagtgaggcacgtaccacttgggcttgggatgtccttaacccatttatgcctgaggttgcaattttttgaatttttccaatcacaccttggcgatgaccttgagcagtaggatataaataactcccacatgcttagtgttccaataatggaacactaggcataaacaggttttaattggctcctcagtcaaccatgaccaatatctctatctcagcttctgctgatgccctagctcagggctctgcattccgtgccagggacgcctcagccccttaacatggatgtgccacatgacaggcaataatatattggccccattagcccttcctggagcagtcataatgaattacagtcatgacaggcacatgtaagaaaccaaaatttgctaaatatgtacatgagtcttcatcacagcatcgtttatgaaaacaactaaatattcactaatggtgccagtggaataaatcagagaacatcccctgctacgtaactctctgcatacatcaaagagaatggtgtggctttgctttttcaacaatctactgagtggccatgggcatgtggatatggccatgaatgagcaagatcctctctgatcctgtagaagttaagttctaccagataacttgctgcttcaacaaaaagatttacctttttaaataaatgttgtagaatacttaaaaaaaacaaactagaatttgcctgtgtgcagccagtaacatgtctatttaacctggacaccttttgaggaatattctcagattgcccccatgctgtttataagacattgttccttatacacctgtttatgaatgaaaagaaacataaggagtgggtacaaagacttctatctatgaatgattaaaaaggctagagtacgaatacttcttgaacctttggtactaaatgcttttcatgttctatataaatgtagaaaacattttacaaatcctgtaaataaactgtttattttttatagaaagccaaaaaaaa

SEQ ID NO: 750 - DNA, 5508 bp, Homo sapiens
gcttgcggacagtcggcgcgcgggccgggccgggccggcgcccctctgcctcgcgcgcttgtcgcgttgccccgggctccgggggatgcccccggccgagcccttctcatggccgccgacgtcttcatgtgctccccgcgccggcctcgcagccggggccgccaggtgctgctcaagccccaggtgtccgaggacgacgacgactcggacacggatgagccgtccccgccgcccgcctccggcgcggccaccccggcccgggcccacgcgagcgccgcgccaccgccgcctcgggccgggccgggccgcgaggaacctccgcgccgccagcagatcatccacagcggccacttcatggtgtcgtcgccgcaccgagagcacccgcccaagaagggctacgatttcgacacggtcaacaaacagacgtgccagacctacagcttcggcaagactagctcctgccacctgtccatcgacgcctcgctcaccaagctcttcgagtgcatgactttggcctacagtgggaagttggtgtctccaaagtggaagaatttcaagggcctgaagctacagtggagagacaagatccggctcaataatgccatctggcgggcctggtacatgcagtatctggagaagcgcaagaatcctgtgtgccactttgtgacacccctggacggctctgtggacgtagacgagcaccgccggccggaggccatcaccacggaagggaagtactggaagagccgcatcgagattgtgatccgggagtatcacaagtggagaacctacttcaagaaaaggctacagcagcacaaggatgaggacctctccagcctggtccaggacgatgacatgctgtattggcacaagcacggggatggatggaagacccccgtccccatggaggaggatcccctgctggacacagacatgctcatgtcggaattcagcgacaccctcttctccacactttcttcacaccagccggtggcctggcccaatccccgggaaatagcacatctgggaaatgcagacatgatccagccgggactgattcctttgcagcctaacctggacttcatggacacctttgagcctttccaggacctcttctcttctagccgctccatttttggctccatgctacctgcatctgcctcagcacctgtaccagatcccaacaacccacctgcacaggagagcatcctgccgaccacagccctccccactgtgagccttcctgacagcctcatcgcgccccctaccgccccatccctggctcacatggatgagcagggctgtgaacacacctcccggactgaggacccgtttatccagcccacggacttcggtccctcagagccgccactgagtgtcccgcagcccttcctccctgtcttcaccatgcccctgctgtctcccagccccgccccaccgcccatctcccccgtgttaccattagttcctcctcctgccactgccctgaaccccccggctccacccaccttccatcagccacagaagtttgctggagtcaacaaagcgccgtctgtcatcacccacacggcctctgccaccctcacccacgatgcccccgccaccacctttagccagagtcagggccttgtgatcaccacccatcaccctgccccgtcagcggccccttgtgggctggcactgtctcctgtcacccggcctccccagccacggttaacttttgtgcaccccaaacctgtatccttgactgggggcaggcctaagcagccccacaaaatagtgcctgctcccaaaccagagcccgtgtccttggtgttgaagaatgcccgtatcgccccagctgccttttcaggccaaccacaagcggtgatcatgacgtcagggcctctgaagagagaagggatgttggcctccaccgtgtcccagtccaacgtggtcattgcgcctgctgccatcgccagggctcctggggtcccggagttccacagcagcatcctggtgacagatctcggccatggcacgagcagcccgcctgcccccgtctcccggctcttcccaagcacagcgcaagaccccctggggaagggcgagcaggtcccgctgcatgggggcagcccccaggtcactgtcacagggcccagtcgggactgcccaaactcagggcaggcctctccgtgtgcatcggagcagagccccagtcctcaatctccccagaacaactgctcagggaaatccgaccccaaaaatgtggctgcactaaagaaccggcagatgaagcacatctcagctgagcagaaaaggcgcttcaacatcaagatgtgcttcgacatgctcaacagcctcatctccaacaattccaagctgaccagtcacgccatcacactgcagaagactgtggagtacatcaccaagctgcagcaggagagaggccagatgcaggaggaggcccggcggctgcgggaggagatcgaggagctcaatgccaccatcatctcctgccagcagctgctccctgccacgggagtccccgttacccggcgccagtttgatcacatgaaagacatgtttgacgaatacgtgaaaacccggaccttgcagaattggaagttctggattttcagcatcatcatcaagccgctgtttgagtcgttcaagggcatggtgtccaccagcagcctggaggagctgcaccggacggcgctctcctggctggaccagcactgctccctgcccatcctcaggccgatggtattgagcacgctgcggcagctgagcacctccacctccatcctcacagacccggcacagctgccagagcaggcgtccaaggctgtcaccaggattggcaagagattgggagagtcctagctgcttagctggcatgtggccgcatgagatgccaggagacccttccctgcccatggagagtaggctgcgccccccagcccttcctgacgctcagcctcggggcctctctccaactctgccggcccaccgtggcatcgggaggccatgctcaggtctgaagcaggtttggggcctgctgacagcaatagcccgcctttgggaaccccttgctgtgaactctctcactcagtgacctcagtcaccaacctcctctgccctcggggcagcccacacaaaagggaagtgctggccgtgctggtcctgccctgctggtggcctgccgggcctggcgccggtgagcggaatcgatgggatgagggtgacagggcctgctcctgtcctgaggcccagccttgtccctcctgccacgtcctgtccacatgcatgcctctgcctgatgccctgctccactctctggtctgcccgtggggcagttggaaggcgtctttctttctcccctcaactctgacagcacccagcccttgtggatggacttgggcttctattcaggcttatgcatggcaggctgccagggggaagtgccttcttcagaggtcctccaggacacatgtgtgcagaaacggtggatgtggaacacacaggaccagaatggaagcgtgtgatgcacggtggctgctctggctgagaggccctgctgggcatgtttcatctgtccccttttagctccacctgacattgcaggatccatggggactcagcccagggccttctcggatgtcacctcaccgctgtggcccttctgccgttcttctccacttggctccagctgcagctgttgacagatcaagcatgtcctgtgggagcttagaaccctgaagttctagtgtctgaaagatcagactccacgtcctgctgtcagccttgtcatcttgtctgatgtctttcagctgggagccccaaaccaggacagttctcggaccaaagatgcccccacactcaaaagtctgtcccgtcttgtgtttggagaaggaaacaatgttggcaggcagcactctgtggtggtcagccctcagagctgtttctaggcatctctcagatcagacagcaaagaatctacccagatctgggctgggtggaggtgtggctgggctgggggccattctgagcctgcagtgagagtttggcccagcctcagtccttgctcttctctggctacctctgcagggagctgcaggggcaagcactctctccagcactcaggaagcccggccgagggtacctcctcgtggaaagaatgcactttaaagctctgctgaggagttcggagcccaggctttcaggcgacctctgccctccctgcctctcctcaccctccctctcttcctgcagggcctgggaagggctttgagggagcctgggagccatgtgaagaggggcacgcctgggctgtcccacagtttagatccagttggaggttctccctggctcctgcaggcctgcggggatctctccccacttcaggcctccggccagctgcctgccctcttgtctgtgcttcagccctgcacaaaagcagcttggtgacaccactcagccacccagagtacgtgtttacaggctttccagatcaccttcctgtggggtgaacgtaatgaggcggggctggtccttggaatttcccctggaaaatggtaacagactccatccttgacccggggatgagcatgaaggcattgtcccaaaggcagaggccaccgtggtaggaattccaccaaggccagaagggaaaaaggaagaacccaccgtgtctggctgtgcgggccctggggagggtcgtgagtgcagcccctctctacttctgtgcctttgtaaaacgtgtagataaccgcagtggttggctgagccaagaactctcctaaatcagtggctttctccccaccccttgctggggagtcatttttaaaaaaatctgtgggatataaaattggcctcctgctgcttcagcctacctctccctctgctgacttaatgtcgtgattctgtttcttcagatatttaaggctgttaggttgtgtgagccttgaagtgtgtgtgtgtgtcccagcgactgtccactgtccaggagatgcatgtctttgtattggagatatttctgtaactcattctcttggtgctcacgattgccatggccatagggccacagtgccgtatctgctgcagacatgattgtttcttgttctagaggttttcttgttttcgaatcttgcctgatgaatccagccagaccaaggggcctagatttgacctctgtcctgggctcctgggccaggtgcaggaacatctgaggccactctgctggccacctccagtgggtgctgaccacaggatgggctttgtttacactcattttcaccctgattcttgcccccactttcataaaagaaacttcaaaatgctgacgctttggagagtaagaaaatcaatcttggctgggcacggtggctcctgcctgtgatcctagcactttgggaggctgaagctgaaggatcacttgagctcaggagttggagaccaaccctggcaacataacaagaccctgtctctacaaaaaaaaaaaaaaaaaaaaaaaaaaaaaaaaaa

SEQ ID NO: 751 - DNA, 4544 bp, Homo sapiens
cagcccggccggggcctgcgggcgcccagagccgcgccgtccgcgccgcccgttctggttggaagtactccatgacacacactcggagaaagtcccttcccatgctgagttcgggcctcactggccgccgagagcccctgcagatggaagacagcaacatggagcagggggttgagggtgtggagccaggcatgcccgagagcccaggtcacctcacagggcgccgcaagaattacccacttcgtaagcgcccattggttcctgagaagcccaaggcctgcaaagtgctgctgactcgcctggagaatgtggccggtccccggagtgcagatgaggctgatgagctaccgcctgacctgcccaagccccccagcccggccccatccagtgaagaccctggccttgcccagccccgcaagcggcgcctggcctccctcaatgctgaagctctcaataacctgctgctggagcgagaggacaccagcagcctggcaggcacccgccgcagtcgagcaggggatccccaccgcagccgtgaccgtgatcgtgctactgggggctggtcctcctccaagaagcggccccggctgggggaccttggaggaggaagtcgggacctgtctccagagccagcacccgatgaaggtccccgccgagatggagacccagctcccaagagactggctagcctgaacgcagctgctttcctaaaactgagccaggagcgggagctacccctgcggctgcctcgtgcccatgcagaagtagatgggcgctccactgagcccccagcacccaaggccccgaggccaaagtggcccaaggtcaatggcaagaactatcccaaggcttggcagggggccagctctggggaggctgcaggcccacctggctggcaaggctgccctgatgaaccatggccatctgcaactccttgtgggccatccgtccagccatctcatcagcccctgagcaaggctctggagagccctttggggctgcgccctcacctgcccctgctgatgggtggacaggcggctctgaagccggagcctgggcgcccaggcgaggagtcacctgcccctaagcaggaactgcatcagccctctttccccacacctcagctgtcgccgctgccgatgcctggcaaccccgccgactacaatggcctgtgtgttgggcctgagctcactgcactaggcagcttctacctgtactgtggccaagaggggctgcagtgtgggggctactcgccctgccccatgcttcctgagggcaagctgtccccagtggctgcacctcacgaggaggggctcctcttagctccgagctcagtgccctcaggcacccctttccagcaccctccctggggctcctctcgctactgctctagcgaggacactggagtgaatggctacagcatctgcggagtgttgcccctgtctgttacccacgctggcactacctgtggcggctgcccatacaaaatgccttttgcagcagaaggctgcagatccctgggccagttggaatttcctctcccggaagctggccacccagcctcacccgcccacccactcctggggtgccctgtacccagtgtgccacctgcagcagagcccgtcccccatcttcagacacccacctcggagccccagacagtagcccgtgcgtgccctcagagcgccaaacctcccagcggttctaagtcaggtctgcgcacaggctccagctgcaggcacactgcaaggagcaaggctgcccgcaggcctagccaccccaagcagccacgtgtccagcgcccacgccctcgccgccgccgtcgccgccgcactaatggctgggtacctgttggggctgcgtgtgagaaggctgtgtatgtcttggatgagccggagccagccatccgaaagagctaccaggcggtagagcggcatggggagacaatccgagtccgggacaccgtccttctcaaatcaggcccacgaaagacctccacaccttatgtggccaagatctctgccctctgggagaaccccgagtcaggagagctgatgatgagcctcctgtggtattacagacctgagcacttacagggaggccgcagtcccagcatgcacgagcccttgcagaatgaagtgtttgcatcgcgacatcaggaccagaacagtgtggcctgcattgaggagaagtgctatgtgctgacttttgccgagtactgcaggttctgtgccatggccaagcgccgaggtgaaggcctccccagccgaaagacagcactggttcccccctctgcagactattccaccccaccccaccgcacagtgccagaggacacggaccctgagctggtgttcctttgccgccatgtctatgacttccgccacgggcgcatccttaagaacccccagtagcctcctcatgcccatgctggggctacccatgggcaagtggggctcggggtagggggcactgcttgaagcacagcacttggttagggggccacagaggcctaagtttgctggcctgtggttttcttgggggggagggcaggggcccctgtgggttctgggctccaggggagggagctggggaggccagggtataagaaaagcatcagaactctcagcttggcccaaggtaccttctgtggttcccctgggtggagatttccgaaaagtagtcttctctgaggctgggccaagcctgagggaaatggggccctaggagggtgggggcgggaaggaggggcaaggtctttcaggaaccagacccaacaggcccttctgtagcctcccccttgccctcaaagggggagtgggggccagctttacctcacccactgtgacccgccgcttccccttcagcctgggaccaggctttcctagatcccagcacagctctgagcttgttcctttgaggcatagagagccagagtctggcttccagagcattgacttcctcttcctagacttgaggccttttctctggctttcctcctttgccctgcagtagcaactggtgctgggacaagttgacccacctctcacagtcatgggtgtggcccacttgtgggagtctcctgtccacctcccagagacggccacccagcgggtctggcttcccagaaagttaactgatgattgtggggtttgtcatatctgggagggaagatgggtgctgggagagggttgggggcagggggcaaggaaaattgctacctgatttgttgaagatttttcctcttgccttacacatggaggttccaggaaacctcttgcagaacttcacacgtgattcttcaagccacacccacctgaaatcaaaccaaaggagtgctgtggctccccttgccctgccaccctttccctagtcttttgtagattgcactaatttacatcctagcaagaatcaacactgtatcagtccacggacctgctgagctgcagccacttgctctaggagctaaggacttgcattttcagtttgttcctgttgcccagaggccctgttctcacctcatgctgctccccagagtagactaacaggctcagtcccctgttgtccttgtggagactaggccttggccctggccctgagactctgtgagggggctggagcagcctggttatttcctatctgtaccaaagaggagtatggtgggagagggagtggagtgcagtgtggcttgggcctggtgctgggaacctgctagctgagcacttccacaagggcatacccctgggggcaggggctggggctgagaactgcagccctgggtcttcccttagggaggaagggcagatgaacccagcaggcttaggaggtggcactgggtgaggacagctgggcaggggctgcagagggaggtggaaatgaaccctgagggctcccccaacttgccatgccctgtcccttagtagatgagttgctcctgattggtcattgggtttgggtgaggcctggaggcttcagaggtgaatttatgcttgggaagcctgatcccaaacctgaagggaagggacttggatctccttatattgaataagctgtttggaggaaggtgtctgtctgggaggatggggcagtaaatgaggttggcagagtggcagtgggggctctgcagagccagccttggagcctgctcattctgggcccttgctgccaaggagcccagcctcacctagcaggaaaggagatgaaggccctcctcccaggaggtagggtcttggctgccccgaacttaaatgcttttgaaatctcttagatgtggaaatattttttcgaacctgaaaatgcagctggtagaatttcaatggaagcataatccatgtaaaatatattttagttgatattttgtaaaatgcactttttgtgtgtgttgatcctggtttcccagatctgtatttcagtgtttacaagggaggaaggacctttcctcacctcccttttgacagagattagaagtacttctttaagaaaaaaataaatttgagaaattgtattgatttagaaaaggatcgtttaaaaaaaaaaaaaaaaaa

SEQ ID NO: 752 - DNA, 5634 bp, Homo sapiens
ttgcgcgctgcagggcaacaccccggcgtccctggaagctgggggagcgggagaaataactttatttggactgagagctggagaatgagaataggacctgagagtatattgggctaaggaggagaggtgtttgagcccagatgagtcatggctggacgacccctccgcataggagatcagctggttctggaagaagattatgatgagacctacattcctagtgagcaagaaattcttgaatttgcccgggagattggtattgatcccatcaaggaaccagaactgatgtggctggcgcgagagggcatcgtggccccactgcctggagagtggaaaccatgccaggacatcacaggtgacatttactatttcaacttcgccaacgggcagtctatgtgggaccatccatgtgacgaacactatcggagcttggtgatccaagagcgggcaaagctgtcaacttctggggccattaagaagaagaaaaaaaaaaaggaaaagaaagacaagaaggacagagacccccccaaaagttcgctggccttgggttcctcattagccccagttcatgttcctcttgggggcctggctcctttacgaggtcttgtggataccccaccctctgctcttcgtggatctcaaagcgtgagcctggggagctcagtggagtctggacgtcagcttggagaactcatgctgccttcacagggtctcaagacctctgcttatacaaagggtctcttgggctccatatatgaggacaagactgctctcagcctcttgggtttaggagaagaaaccaatgaggaggatgaggaggaaagtgacaaccagagtgtccacagctcaagtgagcctcttaggaacctacacctggacattggggcactggggggtgactttgagtatgaggagtctctgagaacaagccagccagaggagaagaaggatgtttctctggattcagatgctgccggtccccctactccctgcaagccctccagcccaggtgcagacagcagtctgagcagtgctgttggcaaagggcgacagggaagtggagcaagacctggtcttccagaaaaagaggaaaatgagaagagtgaacctaagatttgcaggaatctggtgacccccaaggcagaccctacaggcagtgagcctgccaaagcctctgaaaaggaagcaccagaggacacagtagatgcaggagaggagggttccaggagggaagaggcagccaaggagccaaagaagaaggcttctgctctggaagagggcagttcagacgccagccaagaactggaaattagtgaacacatgaaggaaccacagctctcagactccatagcttctgaccccaagtccttccatggcctggacttcggttttcgcagccggatctcggagcacctgctggatgttgatgtgctttccccagtcctgggtggagcttgtcggcaggcccagcaaccactgggaatagaagacaaggatgacagccagtccagccaagatgagctgcagagcaagcagtccaaaggcctggaggagaggttatctcctccacttccacacgaggagcgggcccagagtccccctcgcagcctggccactgaagaagagcctccccagggccccgaggggcagcccgagtggaaggaggcagaggagcttggggaggactctgcagccagcctcagcctgcagctgtccctccagagggagcaggccccaagcccacctgctgcctgtgagaagggcaaggagcagcattcccaggccgaggagctgggccctgggcaggaagaggcagaggatcctgaggagaaggtggcggtcagccccaccccgccagtctctccagaggtgcgatccacagagcctgtggctcccccagagcagctctcagaggctgcactaaaggccatggaagaggcagtggcccaagtactcgagcaagaccagaggcacctgctggaatccaagcaagagaagatgcagcaactgcgggagaagctgtgccaagaggaggaagaggagatcctccggcttcaccagcagaaagagcaatctctcagttccttgagggagcggctgcagaaagccattgaggaggaggaggcccggatgagagaggaggaaagccagaggctatcctggctccgagctcaggtccagtccagcacacaagcagatgaggaccaaatcagggctgagcaagaggcttccctgcagaaactgagagaagagttggagtctcaacagaaggctgagagggccagcttggaacagaaaaataggcaaatgctggagcagctcaaggaagagatagaggcttcggagaagagcgagcaggctgccctgaatgctgcaaaggagaaggctctgcagcagctgagggagcagctggaaggggagaggaaagaagctgtggcaacgctggagaaggagcacagtgctgagctggagcggctctgctcctcattggaggccaagcaccgggaggtggtctccagcctccagaagaagatacaggaagctcaacagaaagaggaggcccagctgcagaagtgccttgggcaagtggagcacagagttcaccagaagtcttatcacgtggctgggtatgagcacgagctcagcagtctcctgcgagagaagcgccaggaagtggaaggggagcatgagaggaggttggacaagatgaaggaggagcaccagcaagtgatggctaaggccagagagcagtatgaagctgaggagaggaagcagcgggctgagcttctggggcacctgaccggagagctggagcgcctgcagagggcccatgaacgagaactggagactgtgaggcaggagcaacacaagcgtcttgaggacttgcggcgccggcacagggagcaggaaaggaagctccaggatttagagttggaccttgaaaccagagctaaagatgtcaaggccagattggctctgctggaggtccaggaggagaccgcccggagggagaagcagcagctgcttgatgtgcagaggcaggttgctctgaagagtgaggaagccacagccacccatcagcagctggaggaggcacagaaggagcacacccacctgttgcagtcaaaccagcagctccgagaaattcttgatgagctgcaggcccgcaagctgaagctggagtcccaagtggatctgctgcaggctcagagccagcaactgcagaaacacttcagcagcctggaggctgaagctcaaaagaagcagcacctgttgagagaagtgacagttgaggaaaataatgcttccccacattttgagccagatctccatattgaggacctgaggaaatcccttggaacaaaccagaccaaagaggtgtcttcttctctctcccagagcaaggaggacttatacttggacagcctgtcctcccacaatgtctggcacctcctctctgctgagggggtagccctccgtagtgccaaggagttccttgtgcagcagacacgctccatgcggaggcggcagacagctctgaaagctgcccagcagcattggcgccatgagctggccagtgcgcaggaggtggccaaagacccaccaggcatcaaggccctggaagatatgcgcaagaacctggagaaggagaccaggcacctggatgagatgaagtcggccatgcggaaaggccacaacctgctgaagaagaaagaggagaagctgaatcagttggagtcctctctttgggaagaggcctcagatgagggcactctgggaggatcccccaccaagaaggcagtaaccttcgacctcagtgacatggacagcctgagcagtgaaagttctgaatctttttccccgcctcaccgtgagtggtggcggcagcagaggatcgactcaaccccgagtctcacctcccgcaagatccacgggcttagccactccctccggcagatcagcagccagctgagcagtgtcctcagcatcctggacagcctcaaccctcagtcgccgccgccgctcctcgcctccatgccagcccagctccctccccgggaccctaagagcacccccacccccacctactatggctccctggccaggttctcagccttatcatctgctacacccacgtccacccaatgggcctgggattcagggcaggggcccaggctcccctcctctgtggctcaaacggtggacgacttcctgttggagaagtggcgcaagtattttccatctggcatcccgctgctcagcaacagccccaccccgctggagagcaggctgggttacatgtctgccagtgagcagctccggctcctacagcactcccattcgcaagtccctgaggcgggcagcaccacctttcagggcataattgaggccaaccggaggtggctggaacgtgtcaagaatgaccccaggttacctctcttctcgtcaacacccaagccaaaagctactttgagcctcctgcagctgggccttgatgagcacaacagagtgaaggtgtatcgcttctgaggccctgagcaggggcttggggcagcccagcctctcctccacccagaccaagtgcctgaggagctgcctgccttcttccatctgagaaagcaccctccttccccctttgacttgcaggagccaccagggaccagggggttgagtggaacagtaaagccacacattctgtgactatataacctatctcaggctaaaatgtgtggactcgtacgagctcttgtcattgacatggcaagctgatggcgtgcggtggctgcggggtatcagggccgggagccctttgggaggaagggaggcgttagaggagctgccttcggaggctcagggagtccctttggagctggttgtttccttggccctgcagcgcactgctcggggctcccaaggaggttgtgtgtatggttcttaattcatcaggacaaagacccccagcatgtgtgtaccctgggacccgatttctctgggcccacatctatctccaatacctcagcctcagatcagaccctttcttttttgtctttcttctcttaatttttaaatgcctcttttcttgagcattccatctctctttttgaccctctcaggactgggcttagctgtccagagccctgccggagggtgctgggggctgtccctctgcaggcactgtgttttcctcaggggctgtcctcagaacacccctcctgctccctggggctcctcagggagccatttcagctggagtctcaggtctcaaaaacaacttctccaggaggccaaaaaaagactgggttggcttctggtcctcatgatggcttttatcctcctgggacactttgggtatattcatgggcattgtttccatctgtcttttctacctgtgccacccctgccctgattccacggctgcctcaggcaggcaggcaaggagctaggccggtgcccggccctggcagcaaggggtctttgtgcagttggagatgctgccgttgtggcagagcgtcctgcagccccgcttccatcagcaggctctggggtgggggctttgcaggggatgctctctgatgtttgttccgttgtttaaataaaatgcacttatttttgtttttttttttgcaaaaaaaa

SEQ ID NO: 753 - DNA, 4282 bp, Homo sapiens
cattttggtcaacaccctgcttactgcgcacggccaatcctatgagaactcagcatcccagctcatctgagcagatcctggaagtgatttctgcagctcaggattttttttttaagctacattgaaaatataggtttattttttgttcaggtttttcttttatattttttttctgcacaaaggaggaggatttttcacttactcatatcgaggccagatttttaaagccagctaaggcagcatcagctgtgcgggatttaaagcctatagctcagctgaaaaaaaaggtggggggcagggaagggaagataaaaggagaggaagctgggagaagacaagcatcatcttattttgctatgtggtaggaactgtctataagatagtgtagaattgtttatcttgagcagtttgttcttaacctataaggtatttttccttttttttttttttaaacctcccccacccttttcctgaaagctttgtttcagagctttgtattgggtttttttggtgaggaggttgtatttatttttttggtgtgtgtgtgtgagtgtgtgtgtgtctgtgtgtgtgttgtggtcccagctgagtcatcatgtctgctctgacgcctccgaccgatatgccaacccccaccactgacaagatcacacaggctgccatggagaccatctacctttgcaaattccgagtgtccatggatggagaatggctctgcctgcgagagctggatgacatctcacttacacctgacccagagcctacccatgaagatcctaattatctcatggctaatgaacgcatgaacctcatgaacatggccaagctgagtatcaagggcttgattgaatcagctctgaacctggggaggactcttgactctgactatgcacctctccagcaattctttgtggtgatggagcactgtctgaaacatggcttgaaagctaaaaaaacttttctcggacaaaataaatccttctgggggcctctagaactggtagaaaagcttgttccagaagccgcagagataacagcaagtgttaaagatcttccaggacttaagacaccagtaggtagaggaagagcctggcttcgtttggcattaatgcaaaagaaactttcagaatatatgaaagctttgatcaataagaaagaacttctcagtgaattctacgaacccaatgccctcatgatggaagaagaaggagccataattgctggtctgttggtgggtctgaatgtcattgatgccaatttctgtatgaaaggagaagacttggactctcaggttggagttatagatttttcaatgtatctcaaggacgggaacagcagtaaaggtactgaaggagacggtcagattactgcaattctggaccagaagaactatgtagaagaactgaacagacatttgaatgctactgtaaacaaccttcaggcaaaagtagatgcattagaaaaatccaacactaaactgacagaggagcttgcagttgcaaacaacaggatcattaccttacaagaagaaatggaacgagttaaagaggaaagttcctacatactggaatccaatcggaagggtcccaagcaagacagaactgcagaagggcaagcactaagtgaagcaagaaagcatttaaaagaagagacacaattacgattggatgttgagaaagaactggagatgcagatcagcatgaggcaggagatggaattggctatgaagatgctggagaaggatgtctgtgagaagcaggatgccctggtatctcttcggcagcagctggatgacctcagagctctcaagcatgaacttgcctttaagctgcagagttcagacttaggagtaaaacagaaaagtgaactaaacagtcgcttggaagagaagactaatcagatggctgctaccattaaacaacttgaacaaagtgaaaaggatttggtgaaacaggcaaagaccttaaatagtgcagcaaataaactgatcccaaaacatcattaggcatttttaagttggtcacgtcgcaagtccgatatcacaacttaattgtaaaaggaagaaatctgaaagttactacatttaagctctgattctatataaaatgtcaccaaaaagttgactttgaatttgttggacttttaaaaaaccagttggaaatataggttgggtttttttcttattgttttctccccagggttagaaaaattggtataagttcctaattaaaagctgaataaactttgagaaattatttctgagttgaccaataaataaaaataccactttctttaaaaaagcctagggaattgaagctctgtacatatactaatgatgcctttacaacccagtccttgataataccagattctcggtgcattgttcatgtctgtatctgcaagcctgttctgccattgcagtgtgatgaacctagaggtaactaccatgtgaacttgaactcttctaaaatagttctgtgtctcttagaccatgaccccttttcacttttgttatataggtttaatccccaagccaaggatagtacttagtatttcactacacttctattctcagtaaccaagattgcttgcaactttttttgccttggtgacttttgaaaaaaaaagaaaagaaaaagcagcatccttatatttctttaaaatacatagaaataaagttagtaattaggtaacctatgataacataataatgtggacgcctggggaaaccctcctcatgtttgtcatcttctacctctgccgttttcctgcaattccgcttcctacttaggcagttcagagagaacaattctaataaaaacactcctctcctattaacaaaaaatgatgcagtacccatttttcgtatcctgcttttcttatattggagtaaaaaggacagggtatagacatgaatgatgatattctgcctggcctgtcatttcttacctggaaacatttacttaagagtttctgttactttttgttcagatggggatttgctaaaggttctgggaagctaataattgaattattagaaaaacatttcagaataggaagtaaatgataaacttatattctttattattatttagtacaaaaatagattcccagtagatatccacaagcaatattagcagggcttctgtttctaagtgaccacagactaaccctttctaggctttaacattgtaaataatcctataaacagtttgattttttaagatgatttttgatttgaagagacaggctttacataagccttcattccttcaaaaggtcctgacaaaatacttgggtttttttctctttttttcattctggtatgctttgcagcatttcagctgctttggtggggacacagataaccccttcgcttccagctcttaaaattctttatctttttcttggcaaaaccagaattaagagtgtaagatagattccatgtgtgcttatataggtccctgcacagattggacttgaaccaaaattaagtccaaagaacatatgtttagaccaacttcatggaagtggaagatcctgtgctcttgaacttattttaattcttataatttgcacctatataaacaaagctcctactgtattcttctcttcatcaaccttttgtggtgatgggttgccttttctacgagcatttggaaggagtgatcaaataccgaaattgaactttctaaaacctacacatagcatgcgtttaaattctattatataaagccccaagtgctttaccttctaaaacatgcttctctataggtgcaaagttataagatatgtagaagaaaacatccatcagaatcttctggagaatatggtcagagtcttaaacaggcccagtgctgagttctttgtccacttagtcacacatcttttgtgggaatgggaaaggaaggagacagccaaactctgacaaaggcttttccttatagaataacccaaagcctaggtgagggttgatatataatgtcccatgatttaatatatgtggtttgggggaaaggacaagaaaaaactataattccacatataagaaggtagttgcccatttacaagttccagttatgtgtgtaaaacagaaaaattaagtaccaaacctattaggaaatttttttaaaaagtggatttaacttaaattactgtgtacttgaggttggctttggatatggattttctaaaaagtgatgttttattgtttatcatctaatggctgtaaactgtagtactagaataaaaaaaatggaaaatcaaaaaaaaaaaaaaaaaa

SEQ ID NO: 754 - DNA, 4925 bp, Homo sapiens
gtaatacctactctcctccgatccattcaccacacaacttcagccggctgaacagactcacgcagctccagcccatcttgctgacctaattcagaaaagaagtgctacagctctgtgcctgtcatctttgcagtgtagcattttcaggtgatctaggaaacagttatttttatgagcaaataagagaaacaggaatcatgatggggatatatttaacagacccagtactggataaaacttaaagccagtttctattcaacatagtgaaaaggtcaccttgcctggctgagaaaagcagcaaaatatcagctttgttggtttcagttaacctcttagcccgggctaatctcttttccttgatgttcaaaccaatttgggatatctaactctaaagagagacacactgtactcatggtagatgacaaggaaaagaacatgaaatgtctcaccttcttcttgatgcttccagagacggtaaagaacaggtccaagaaaagctcaaagaaagcaaataccagcagcagcagtagcaacagcagcaagttgccaccagtttgttatgaaataattaccttgaagactaaaaagaagaagatggctgctgatatattcccccgtaaaaagccagccaactccagcagcaccagcgtccagcagtaccaccagcagaatctcagtaacaacaaccttatcccggccccaaactggcagggtctttatcccaccattagagagagaaatgcgatgatgttcaataatgatttgatggcagatgtacattttgtggttgggccaccaggtgggactcaacggttgccaggacacaaatatgttttagctgttgggagctctgtgttccatgcgatgttttacggagaacttgcagaggacaaagatgaaatccgtataccagatgtcgaacctgctgcttttctcgctatgctgaaatatatctattgtgatgaaattgacttggctgctgacacagtgctggccacactttatgctgccaaaaagtacattgtccctcaccttgccagagcctgtgttaatttcctggagaccagcctgagtgccaagaatgcctgtgtgctcctctcccagagctgcctgttcgaggagccagacctgacccagcgttgctgggaggtgattgatgcccaggctgagttagctctcaagtctgagggattctgcgatattgacttccagacactagaaagtattctccgtagggaaactctgaatgccaaagaaattgtggtttttgaggcagctctcaactgggctgaagtagaatgccaacgacaagatctggcgttgagcattgaaaataaacgcaaggttctaggaaaggcactttacttgatccgcatacccacaatggccctcgatgattttgcaaatggtgctgcacagtccggggtattaactctcaatgagaccaacgacatcttcctctggtatactgcagccaaaaagcctgagcttcagtttgtgagtaaagcccgtaagggccttgtcccccagcgctgtcaccgtttccagtcgtgtgcctatcgaagcaaccaatggcgctatcgtggtcgctgtgacagcatccagtttgcagttgataaaagagtgttcattgctggctttgggctgtatggctccagctgtggttctgcagaatacagtgccaagattgaacttaagcggcagggcgttgtcctggggcagaacttgagcaagtacttctcagatgggtccagcaatacctttcccgtatggtttgaatacccagtgcagatcgagccagacaccttctacacagccagtgtgatactggatggcaatgaactcagctactttggacaagaaggcatgacagaagttcagtgtggcaaagtgactgtccagtttcagtgctcctcagatagcaccaatggcactggggtacagggagggcagatccctgaacttatattctatgcttgaaaactcacttcctgaagcagcttgagctccaaagtgcacatctggttccaacttgcctgatgcttagctcatctgcaaatatgtgatcagtgccggtaatttgtaatgaatgaagcggtaggcaggttctaatttcttttaaccttttaattatgtacaggcaaaaatgcagcattccgcttttaactatctgcttaaaagagctaacgttcttattaaggctttgtggtttttagagttgcatctatgaacctggggagattatgtgctttcccaagcgttccaccaccctctcagttttgtccctctgaagataattttggatcaccttgaatttccttttggacgttatttgatgaacagaaataaagtgataacaagagttatttttaaacagaactcctcttaccccccaaaacagataaacctcagtgtacaattttgaaagaagttttgccttgtaatgagtaataatttagaaagtagacagtggttgtgtttggctctcgttttattccttttacatttgttgcttctgggatttaaaaaattactaaattcataagatagttaggtattaaacacttcagaatatcaatgtaaaattggaaaataaggaactgggggcatttgtttaggccatgacttctacaagcagatttcttttcttttagtttagaagacaaaaaatttcaatacagatacttcttttagaagtaaatttttagattttattgtcagtagaaaaaagttaaactcctactaatttaaactaagacagtttaaaaaggaagcctgaaaaagactcatactacaaataatttaattgatggcatataagaatatgcagtttgaaaaagccaaactcttctctccacttagcttttgatccccactgtttgcttatttgtataagtcatactgtgtagaatttctattttctttttccccattaaaagaggaccaaacaattctttatacaaatggagtagcaactagttttgtagcactacatttaatgtaatgagatacctttgttcatttttttaaatttgaaatatactttacctgatccactttgattgtatactatattctttgttaattttaattttgtcctgttcctagactgctagaatctggcccctggccatcttaaagtgccaacatatgcctgcagggtttataaaaaatggcctggagtgacacattttattatacctaatattcactgcatcagtatcacatctagctcccttacttgtccacagataatgtaaacaaaggagggaaaaacttattaaattctccttcgctgctggcttgtgctggtttagtgcctgtgtccctggcagtgtccagtgtgttcacttccagttgaagtatccatgtgtttctgggcagcttttctgctcagtgtgatcctgagatggcttccccgccgccacccagagtgtggtccttggccgcctcctgctcctgctctgcaagcctgaaactggcttgtctggagccaggagttagtcctggggtgtgtgtgtgcctgcgcacccatgcgcatgcaagtgtgtttgccagctcaggagctgtctcctctctacctggctagtaagaggtgggacagtaatggtcctcctgctggccccagcaaggcccatgagtgactgccctgacgtattcactgtgcctctgggccacttcttcccctgtagatgtgggcttgttgccttcagccggcttccctgagggaggagaacactggattattggaaatgttttaatcactcttgccattacctacatctattagcatagatgatgaaaagctgttactggtgattatagatgagtatttccaggacaacgttctaaaagtacaattatttcttattggggagattacaggtagtttggcaaagcattgaagtacaaaggtacattttcaattaaaaagcacacttctacaaaagatttggtttttaaattatggttacacatttcagtaactcatagctgctgtgcaaattggtagaccttataagaaggcacttgtttgtaagccagagaagaaactttaattgcatcctatcagattgttgaggtgggtgtgatagtcttcaggtgcagtgcgttcattcactaacgctcactgtcagtgcccatgtttgctagctgcctccatgtgactagtgagctgctggtgaaagtcgtgtgaaatcctgtacactgtgtatagaataatgtaattttatgttaattgttattactttaaaacatatctaccatctgattggctggtaccgagagctgtgggtaaaatttgaaaattgtatttagaataagaaattttacattttaaaccctattgtcctttatgcattttcaatgaaatggaatgaaggctaatatgcttgctttatttacttttgtaatcttggattttgtagcttttaaaactagaaaccattgttctaacaaagcaggcaactttattctataaacacaactttattaagcagaatacactgtagatgcttttccccaacgtatctggctggcagtctttgtcgttgttcattctggggataaaggggaactaggctagcagttctaatgtgacattctttaagcatatcttaaaatagtatttaagtaaatggtctaatttctacataattattgcactgaacttttttgtttattaaggtgtttaaataagctcagctaattcaagacactgtagccacttgtgcatcagtgtgcttgaatttagtagcttacagcattatttatgaaggaaaaaatacataaatatgaagtacctcatgttgaatgttattgtactgtatttttaatgtaacagtgcagatcttgttagacacatgaatgtgtataatcatgttaaatgcaaataaaactagttcatagaaaaaaaaaaaaaaaaa

SEQ ID NO: 755 - DNA, 10379 bp, Homo sapiens
attgtgggcgactcggctaatggcgtcggcgagtcttaggggcctggggagctggcgctgaagcttcttgccaggttggctggtgacacccggtgtggctgggccccgcggcagcggagggacctgcccgccttgtgggtttctcggccagagtcggcggagcctagcgggacggtgcgactgcggggggcgcctccgagaaaagccagaggtgttgcggggaagctgctgggggacgctcgagcaggctccgggttcgcagcccagggcccaagaagcgggctgctgaaggaccagagacaccgggagggagctgcctgtggccctaaggagctgaccgtgccagagcttgtttgtacctctcggaaattggctgggaccttggaggatcatgtccggcaccagcagccccgaggcggtgaagaagctgctggagaatatgcagagcgacttgcgcgccttgtcactggagtgcaagaagaaattcccacctgtcaaagaggctgctgaatcaggaataataaaagttaaaacaattgctgcacgaaacactgaaattttggcagcactgaaagagaacagctcagaggttgtacagccttttttaatgggttgtggaaccaaggaaccgaagatcactcagctatgtttggctgctattcagagactcatgtcacatgaagtcgtgtctgagactgcagctggaaatataattaacatgctttggcagctaatggagaatagtcttgaagaacttaagctacttcaaacagttcttgttcttttaacaaccaatacagtagttcatgatgaggcactttctaaggcaatcgttctttgttttcgactacacttcacaaaagataatattacaaataatacagctgctgctacagtgcgacaagttgttactgttgtttttgagaggatggttgctgaagatgaacgacacagagatattatagaacaaccagtactggtacaaggaaatagtaacagaagatctgtcagtaccctcaaaccttgtgctaaagatgcatatatgcttttccaggatctttgtcagttggttaatgctgatgctccttattggctagtgggcatgacagaaatgactcggacgtttggcctcgaattacttgagtcagtcctcaatgattttccgcaggtctttttacaacaccaagaatttagtttcctcctcaaagaaagggtatgtcctcttgtgataaagctcttttctccaaatataaagttcagacaaggttccagcacctcatcttctccagcaccagttgaaaaaccatattttcctatctgcatgcgtttgctgagagtagtatctgttctgattaagcagttttacagtcttttggtaactgaatgtgagatatttctgtcacttctggtgaaatttctggatgcagataaaccacagtggctacgagctgttgcggtggaatcaatacacagattctgtgtgcagcctcaactattaaggtcattttgtcagtcctatgatatgaaacagcattctaccaaggtttttcgtgatattgtaaatgcactgggatcttttatacagtccttgtttcttgtcccccctactggaaatcctgcaacaagcaaccaagctggaaacaataatttaggtggctcagtctcagcaccagctaactcaggaatggtggggattggtggaggtgttactttgctaccagcatttgaatataggggaacctggatacctattctgacaatcacagttcaaggcagtgctaaagccacctacttagaaatgttggacaaagttgagcctccaactatacctgaaggttacgccatgtctgtggcattccattgtttgctagaccttgttcgtggaatcacaagtatgattgaaggagagctaggagagcttgaaacagaatgtcaaaccaccactgaagaaggttcttcaccaacacagtcgacagaacagcaggatttacagtcaacatcagaccaaatggataaggaaattgttagtagggctgtttgggaagaaatggtgaatgcctgctggtgtggtcttcttgctgcactctcactccttcttgatgccagcacagatgaagctgccactgagaatattttaaaagctgaactgactatggctgctctttgtggaagactgggccttgtaacttcaagagatgcctttataactgcaatatgcaaaggttccctgcctccccattatgctcttactgtattgaataccaccactgcagctacactttccaacaaatcatattccgttcagggccaaagtgttatgatgataagtccatcaagtgaatctcaccaacaagttgtggcagtgggtcaacctttagcagtccagcctcaagggacagtaatgctgacttccaaaaatatccagtgtatgaggactttacttaacttggcgcattgccatggggctgttcttggaacatcatggcaacttgtcttggcaactcttcagcatcttgtgtggattctgggattaaagcctagtagtggcggtgccttgaaacctgggagagctgtagaaggacccagtacagttctaacaacagcagtgatgacagatttaccagtgatttccaatatactttcaagattgtttgaaagctcacagtatcttgatgatgtatcactgcatcatttaataaatgcactttgctccttgtctctagaagcaatggatatggcctatggaaataataaggaaccatctctttttgctgttgccaaattgttagaaactggtttagttaatatgcaccgaatagaaattctgtggagacctctgactggccatctacttgaggtctgccagcatccaaactctcgaatgagagaatggggagcagaagctttaacttctcttattaaagcaggattaacatttaaccatgatcctccactctcacaaaaccagaggctgcagttgcttttattgaacccgttaaaggagatgtccaatattaatcatccagatattcgactcaagcagttagaatgcgtgttgcagattctgcagagtcagggagacagtcttgggcctggatggccattagtgcttggagtcatgggagcaatcagaaatgatcaaggagaatccttgatacgaactgcattccagtgtcttcagttggttgtgacagattttctaccaacaatgccttgtacttgcctgcaaatagttgtagatgttgcaggtagctttggcctccataaccaagaactcaatattagtttaacttcaataggtttattgtggaatatttcagattattttttccaaagaggggaaactattgaaaaagaactaaataaggaagaggcagcacagcaaaagcaggcagaagagaaaggagttgttttaaatcggccattccaccctgcaccgccatttgattgcttgtggttatgtctttatgcaaaattgggtgaactatgtgtggatccccgtcctgctgtcaggaagagtgcagggcaaactctgttttctacaattggtgcgcatggaactttattacagcattcaacctggcacactgttatctggaaggtactctttcatctactggacagagttcgagagtcctctaccactgcagacaaagaaaagattgagtctggaggtggcaatattctcattcatcattcaagggacaccgccgagaagcaatgggctgagacgtgggtattaacattggctggagtagcaaggatcttcaacactagaagatatttgctgcagcctttaggagatttttcaagagcttgggatgttcttcttgaccatatacagtcagcagcactcagcaaaaacaatgaagtatctctggctgctctgaaaagcttccaggaaattttacagattgtgtcccctgtcagagactcagataagcctgagacaccacctgtagttaatgtacctgtgcctgttcttatagggcccatatcaggcatgagcaggccatttgtaagaacagattccattggagaaaaactaggaagatatagtagctctgagccacccattgttactgatgagcttgaagatttgaatctatggtgggctgcgtggaatacctggtatagaattggatctgaaagtactaagcctcctattacttttgataaactaacttttattcctagccagccttttcttacagctttaattcagatatttccagctctctaccaacacataaaaactggtttcaatatggatgacttgcaaaagttgggagtcatattgcacagtgctatttcagtcccaataagttcagatgcatccccttttattcttccatcttataccgaagcagttttgacaagtttacaggaagctgtacttacagctttagatgttctccaaaaggccatttgtgtaggaccagaaaacatgcagataatgtatccagctatatttgaccagttgttggcatttgtagaattttcctgtaaacctccacagtatggacagctggaaacaaagcacattgcaaatgcaaaatataatcagatccaactatttgcaccggcggaatgggtagccttgaattatgtgccgtttgctgaaaggtctttagaagtagttgtggatttataccaaaaaacagcgtgtcacaaagcagtggtgaatgagaaagtgctccagaatattattaagactcttagggttcctctcagtttgaagtattcctgcccttctgaaagcacatggaaactagcagtatcctctctcctcagagttctttctattgggctacctgttgcccggcagcatgcttcttctggaaaatttgacagtatgtggccagaactagccaatacttttgaagattttctctttactaaaagcatacctccagataatctctctattcaagagtttcaaagaaatgaaaatattgatgtcgaggtagttcaacttatcagcaatgagatactaccttatgccaattttattcctaaggaatttgttggtcaaataatgacaatgcttaacaagggctcaatacattctcagtcatcttcatttacagaagcagagattgatattcgtttgagagaggaattttctaaaatgtgttttgaaacattactccagttttccttcagtaataaagtcacaacacctcaagaaggctacatctcacgaatggcactctcagtgcttttaaagaggtcccaagatgtactacatcgctatatagaggatgaaagattaagtggtaaatgccctcttccaaggcaacaagtaacagaaattatatttgttttaaaagcagtcagtactcttattgattcacttaagaaaactcagcctgagaatgttgatggaaatacctgggcacaagtaattgccttatacccaactttagtagaatgcatcacctgttcttcttcagaagtctgttctgcacttaaagaggcactagttccttttaaggatttcatgcagccaccagcatccagagttcaaaatggagaatcttgaccggctacaatatatttgaaagcaggaagatagtctaaaaaatgtttgctcctaattgagtcttctgtgagaaggacatttcttactgcagataattcttggcagctgttgttggcctcctttaaattctacttacctgagttcagtaattcatattacaggcttgcacatcaacaaaggctcctgaatgaacagcagtgtaaggctttaataaattaaactgatgggagggataattaacactacagtatacatgctaccatatctccagttggtgatttaaagtgagcttatgtacagtttgtggtgtatgtgttaatgatgtactttttaaaaagaaagaagagatatttcaattcagtcagatttattagtctggtgtttttgcaccctttttcaagtacaaaatcgtactagaattttatgcaagatggtactgtaacattccatattatctataaccagcctttgttaacaaagggaactgatatacttgtgtgtataataaatggtacagttctgtataaaatagtgcatttatttaaattttaaaagtattgataatgttaaatgcttaaagctctatttattattaatacaaaattgtttgcttacatttttacttataatttgccttcatatgtggcggataagctcaccatatgatcatgcagttagcttcatgcttattttaaatgtattattagtgaccattaaacatctgaccagtaaggtcatgtgaacacagcagcaaatagtttatgatttgctgattttggagctttgaaatataggttcttaatacattgatacatattgtagcactatgacttcatcatacctcatttctttaaacagctctccaagctttcactgaagtctgtctgttttttatattggctgtctggattttaaagacttttcatattttatatttctactgattttgtttcccctaacaacatttgtcactgtctttgaattatgacccaggcaagatgatttcagattttctaaaatcttgcctgtgaggttttgttcatatcagtgcttcattttgtaatgtcttctcaagaaaaatacctatgttaactcacaagtataaaatatgtgtgtattataaaacaatgaaaagtgtatttttggagatagtcaagcatttagaagtgcagtgaacttgctgtcacggagtaaaatgctaattatgtttcactttcctagcctagtgaaaaagaaaagtgctcttgagtacaataccttaattatttcttaaaatactgactttgacctagctcactgtattttttatttaatggattatggattacagtatttttcttctgagttaaattttcataatttatgtgaagacacaaagatgtttaaaacaatgattattcataagaaatcatgatggtctcagtattattttagtgtattggaaggtctttgatcttaatagaatttataaatttcagcttctccagaataatcataaaactgcaaaaagatattataattgagtcatgattgagatacagttttgaggctattataattgtataattatttaatttgcattatctgtaaaatgtagtaaggtctttgaggggatattttttatttacatgaattactgaatttctattttattatttcacctaaaattaaggtaaaatatggcatttcataagttctgctttcagcattttccttaaagttgtaaaaaatcaagctatgtacttattttctatatttgggtgtgttaaattgaggattagaaaaatccacataatcactgataaagcattgaaacagaataacccaagggtagtgtaccgattcagtaacatgttaaaaatattgctatgcatttattcaaaggaaaatggtctgttcttgagaaataaaagatcagttgcaattaggataattaaatagttaaatatgagtcaagtgtatgcaatatacatttatatgaaccaaagcttgctttatcaggaccatgccctacagttcaaaacataaacatagtgaatgtgttaatatcatataataaggtaataaatgccagtcttagtgtgaagcaagtgggtggcccccttggtagtataattggacaggattttcctccagaatatttcctgtcaccctccaagagtcactacagtaattgattgctggcatggaacacattgcccttgtcttgttagtatgaattgggttctccagtgactagaagaactggggtgtgtgaaagtattcgatgccaggagattcaaaaaggaagctctcaaagataagatcattttatggcacaattgagtctataaccagccctttaagcagtagtaaaaatgtcctttgtcatacttactagaaatactatgagttttttttttttttttcatttgagacggagtctcgctctgtcacccaggctggaatgcagtggcacgatcttggctcactgcaacctctgcttcccgggttcaagcagtttcctgcttcagacttccaagtagctgggattacagacatgccaccatgccaggctaatttttttaatatttttagtagagatggggtttcaccattttggccattctagtcttgaactcctgacctcaggtgatctgcccgccttggcctcccaaagtgctgacattacaggcctgagccactgcgcccagccaataccatgagttttaagcctcacatcgtcacttgctgtcactgccagtgcctgttttattcatattgctggacaacagacatatgccaccaattgtatgattaataaagtctttttctggccattttgtccattataaaggaaataaactaattgttaacttgcatagattacttcttagtttcctatgctaccaccactgccaagggagaaaaaaatacatcattttgtaatgtctttagtatttctttataactagtgttaaggttttgttaattttattgtatacatttgtaacatttattaggagccttttaggttccaaaacaaacaaaaggcataaaaaagtctagcttagaaccacttttcacttgctttcatttttaattttattcacttaacagctaacatctttcttgtttcttgttttttccattatatggttatcgattcaactcttgctatattccttaaatttgtatgtatcatcagaagaaagagatgaacaatttagtgtagatattttattctggagaataatattcaattaaattatttctacagcaggccagtaacaactagattatttgtcctttctcagtataattttaaagagcattttgttttattgtcacaatttggtaccactagtcccaggtaaccattgggccaaaggatcagttgagaaacagttaaggatgaattagcataagttatggaacagtgttagaaaacaactcaaaagtatattctttattaatgaggtggtcattattacatttgtgtcaatgaagggcagtgtagttattttaaaatgactaatattttctccccaaatacagaataattcagatgggcaaccaagttttcaagagactgctgtaggtgaagtctgtctagccaaggcagaacacttacaggagtccctaactgtgccacccttggaatgggttagtgtacaggctcagaatattgtggattacagtttttcagagaaaactaccacagatgtagacaaaaatgatctctgaaagcattgccagcagccaggtatgttccttagatttccacttaggtttggcattttggcagataagctaatcttgtataaagcatcacattttactatgcttagtgttcctgggttgtatttatctacattattagagggaatttttattttaaaaaaattgtcattcatgagaagaatgggagttcatgccacatagtattttaccaatttatataaagtgggaaaagtctttaatacttcatgatcacttgaattaaagtttttgtatctctggaaagtagaatagtgctttcatttgaatgaaaagtgtttatagattcagaaagagagatgatatctttgtatcttgatttatatacagaccatttcagaggaagttaaatgtcttacaaatccaatactttctaatgctctaacagtgttggctatttaaaagaacatgtggcaagttctatatgaatattcttggtcatctcgactaattctgaggcaatgatggacagagatgctacttcttatttaactctaggcatgttgacttttcaaagcggtttccttatttctaaacagagatgatgatcaatgagttactaattctttagaggaaaaaatgcataatttgagtgtggagttgattttaatgacagggtaattcaagttgtttgataaatttattactatattgtaagagagatctttgaccatttttcttcctttttcttggacatcactttcttccctccccttctctcttttatgtttttatccttgttaaattttatgtttacgttaccatctttcttatactttcccctgatttttctcttttaattcctctttcattctctgcctcttctctttcagctctttctctaattgtgcctattccttgttcataagaagtggagctgttagtggtagaaccactgctcatggttctaccactacaaagtggaaagtagaaatactttgcactttggccactgttgcgtttttgccaaggtaaagttcccctgccattttgaaatagctgaacaagttaaagtaatatgttccaaaaactggaagtgccataaaaaactaaaaataaaaaaaaattgtgacta

SEQ ID NO: 756 - DNA, 5579 bp, Homo sapiens
gagagcgaccgaggagagaagagagcagagcaatacaaaagcagcctcggatctagccggagctgcaagcgttaaggggaggcggagagtgacgcggtttgcgtctggagcggctccttggagtccacagcatccaccgccggagcctcgccttcctttctccctctgcagacacaacgagacacaaaaagagaggcaacccctagaccaccgcgaaggacccatctgcaccatgaccgagaccaccaagacccacgttatcttgctcgcctgcggcagcttcaatcccatcaccaaagggcacattcagatgtttgaaagagccagggattatctgcacaaaactggaaggtttattgtgattggcgggattgtctcccctgtccacgactcctatggaaaacagggcctcgtgtcaagccggcaccgtctcatcatgtgtcagctggccgtccagaattctgattggatcagggtggacccttgggagtgctaccaggacacctggcagacgacctgcagcgtgttggaacaccaccgggacctcatgaagagggtgactggctgcatcctctccaatgtcaacacaccttccatgacacctgtgatcggacagccacaaaacgagaccccccagcccatttaccagaacagcaacgtggccaccaagcccactgcagccaagatcttggggaaggtgggagaaagcctcagccggatctgctgtgtccgcccgccggtggagcgtttcacctttgtagatgagaatgccaatctgggcacggtgatgcggtatgaagagattgagctacggatcctgctgctgtgtggtagtgacctgctggagtccttctgcatcccagggctctggaacgaggcagatatggaggtgattgttggtgactttgggattgtggtggtgccccgggatgcagccgacacagaccgaatcatgaatcactcctcaatactccgcaaatacaaaaacaacatcatggtggtgaaggatgacatcaaccatcccatgtctgttgtcagctcaaccaagagcaggctggccctgcagcatggggacggccatgttgtggattacctgtcccagccggtcatcgactacatcctcaaaagccagctgtacatcaatgcctccggctagcagcccctcgtcctccggcaacacaatggcccctccatctttgtcagccccctgtttctctcctgcctctctgtttctccatctcctcgtcttgactgttttccctacttgctgacttaaccccccatagtgtgggggacctgcagagaaccatggcattccctattccacagtcatctttggacagactttcctctagtctccgggttgggggtgggtgagggaatggggtgggagtcgggggaagtgcagtccttggagatgtactggtgtccgtctcccagcatgctctagagaggcggctctggtgcccatcctcccagcacgctctggggaggcggctctggtgcccatcctcccagcatgctctagagaggcggctctggtgcccctcctcccagcatgctctggggaggcggctctggctcttgccttcccagcatgccctttactacaaagggctatttttcttttctttcttttgtttatttatttttctttgttcactccctgtagaacttggatgaaatcagtgtccatggttctttatgtttgtagtcttgatgtgctcctgtggtattacttcccctctgataggacattgtagccagcctcagcactcagtgagttcatcagggccacacccagtagagaaggccaagcaacctccacttcttcagcaccacacacacgcacacacacacacacgcacacatgcgtgtgcacccgcgcacgcacatacacacacacatatagcagtagcagcagcagcagcagcagcagcaacctttgatcaggagtgagattttcgggttctgaaacctgggacacgagtctgtgaatagtcggttttctcagaataatttgaatctgttttcttagtttcaaatgaccatttccctgatgctctgagcttatgatcacacagagccagtccatcctcatttcctggtggcatctgttcatttacctttgtggactgtagctgatggcacagtgcgggttccctaccagccaggggtttccaagggacctttggaggccatgcttagacacattcctgtacctgagaacaaccacataggcaggaccagatccacatcgtgcagtcgtgtcataaaaaaacaaaacaaaacaaaaaaacactaggagtccactcaaccctggaggtctttgctaattggaattatgtattgtctgttgggctgggaaatgtctctttcatattgtaagtccaggatgaactaggagaaagcaatttgttgccctgatgataactgatgattttcaccctctctagctgaggtaactcagacagtgcatgaggtcagtttcttcttgagaagcagtgccttggtcttgtttctgtggttggttctagcccctgcagagcctgggagctgcaggaactgtctgagaaaatctccctaataggggagtgggttcccagaagggagatctgggaggggtcaggagccactaagttgcttcactccttttttctctaattttctaccttcctctctgttcctgcagacagttttgccagctttgcttctggttactagggtctcatgcgtgtcctgcttggagagccataaggaaattgctgtcttgtgctttgtgtctctcatccagtctctggctcttgggattctggtctttgagaaatagtccctgagtattaggatacttttatcaaaatctagtaccagctacggccagaaagggccaggtgggacctgaaagcaaagacaatgttctttaccacacgtttcacatctgcaacatccttcaattgcgggaaaaggaacttgatttaacagaagaacatggtagagcagcatccagaaagtctgttattcctcttggattttttgaaataatcttcagaggaaggaaggaaaatcctattttggggtatcagtgtttgactagggatcatgaaataataaactgaaaaaaactttagagttcagttgatccaacactttcctttaaaagttgagggagcagaggcccatgggattaaatggctggtccaggtcagccagcaggtgtagggcctgacaagaacatattgtttccctgacccctaggccgtcacaccacaccctccatttcctcatgttgctgaccaggtgcccatatgatttctacacttcccaagccttaccctggcatctttcttttaaattatatctgtcccaggtgctctccacacataggatggtaatgccagtcccaggggagggtgtgatagtaaggaaggccactgttaggtttcctttagaaataaagagatctcagcagcttggaagaaatcccagaagcggactccatcaatccaagaaagagttgctttgtggaaggtgaaggaagacccacagagtgctcaggatgatgctattgctggagagcgaaagatggaacagccttgtccaggcagaacagtcataagccaggaaatgaaacaaaggaaaacaggtgcctgaatttcctggggaaacatggcttgtttaaggacttggagttatggatggaatttatgggacccacgtgagcagacctgaggaaggctcgatttcttttgtttcttggtccactctgtcactctgctctggtcaagccccatttggtctacagcccatgagaaggaatgaggctggttctgcactctcagcatgcagtccgaaagcatgtgggagtggggagggaaagtgagatgaattaagacaaagaacaggtgccatagaagtagatttctaggaatgaagtggggcagatcttatctttgtggattacaggcactgtactaaaaacaggtttcctatttaatataaaaagaaagtgaatcttcttttggatagaatcatccattcccatcgccgcaccccctaccccccaaacacacacacacacacacacacacacacacacacacacacacacacacacgccctactcttcatttgctaggggaaggtcacagcacaactaaatccaggacaggacattgtgaccatgacccagccacagtcaataccagaaagatgattcagagtctgaagtggtgccccaggtgccaacaggataacctctaccccccgactttgtctctggggtcctgttccttcctgcaaagcccaatccaagactggcatggctcagaggttgtgagaaaggcatggactggaacaatcatgtccagaggggtctggagctttgtttcctgttcaccagcaaaaaatgtctctcccatttttctgaaagtggctgatgtaagaacaggcagaaggaaaaccctttttgtcaataactctgtccttaaggaatggtcctctgggagggctgtgctgctagtgggtacctcagtcacacacccccaaccccaggcagcctctagagccttcttgctttcattttccttgaatgtacataggaacaagggggaaagtctcttactgaagtgcctgaaacccaaagctagagcttctagagacgccgttcttcctgtctcagcttggccagcctttcaacaatgttctctagtttcaagctccagcttctcagaaagaattaaagaacttgctgttcaaattaagtagaaagtgagactcaataataactgaactacagcaaaaggcagagaattacagggagaaaaaacttgtacttaccagcccaattctactctcctcaaactgacacacacacacacacacacacacacacacacacacacacactcttttaggggactaagagagagaagcatgttattacattttactcatccaaacagtaatgcaaaaataaaacggtagaatatgaaaagctcaggatctctcccaaggctacctactgcaggagggccaacaggtgagatgggaagaatggaaacagggaccgattttgtagctcatacaattaggacaccttaggaatagcattgtagtaatggtgatgaatatgctctgccaaattcatccagtctgcaccatcttatagctgcccagcacactcgactgttcatgtggtctctttgtagtgtgagtttggagtgtcctattagcctgttctggttaggaatgagttaacggctctttccctcaaccttagtctagtcccagggctgaggattcagctggatccacatggtcttgagggttggcatgaggagggggaagcttttttgaatcgctttttgatcacataatctgccattttaagagtaagatttgctttatggaaatcaattcattaataaaaaatgatattcaagttgcaataccatttcacagtgaaatattttgagtacaattttgttgctagaatagtcatgggcaagagttttatgcaaaatgtttcaattatgttaataaataagacaatgctacaagaaaaaaaaaaaaaaaaaaaa

SEQ ID NO: 757 - DNA, 5087 bp, Homo sapiens
cgccgccttctgtgcagtcgcggcccgggcggacggtggctggctgctccgcagcgctcggctggctgcagcggcaccgcgggttgcgcggccggggatgctccagcgggcgcgatggcccccgccatgcagccggccgagatccaatttgcccagcggctggcgtccagcgagaagggcatccgggaccgagcggtgaagaagctgcgccagtacatcagcgtgaagacgcagagggagacaggaggtttcagtcaggaagaacttctgaaaatctggaaggggctcttctactgcatgtgggtgcaggatgaaccccttctacaggaagagctcgccaacaccattgcacagctagtccatgctgttaacaactcagcggctcaacacctgttcattcagaccttttggcaaaccatgaatcgagaatggaaaggaatagacaggctacgcctggacaaatactatatgctgattcgtctggtcctgaggcagtcctttgaagtcttgaagcgaaatggctgggaagaaagccgaatcaaggttttcttggatgtcctgatgaaggaggtcctgtgtcctgagagtcagtctcctaatggagtgagattccacttcattgatatttacctggatgaactctccaaagtcggggggaaggagcttttagcagatcagaatctcaagtttatcgatccattctgcaaaattgctgcgaagacgaaggaccacaccctggtacagaccatagctcggggtgtcttcgaagctatcgtagatcagtctccttttgtgcctgaagagacgatggaggaacagaagacaaaagtgggtgatggtgacctctctgctgaggagatacctgaaaatgaggtatccttgagaagagctgtcagtaaaaagaagacagcactgggcaaaaaccattccagaaaagatggactcagtgatgaaagaggaagagatgactgtggaacctttgaggacacagggccccttctccagtttgactataaggctgttgctgatcgactcctggaaatgaccagcaggaagaacacgccccacttcaacaggaagcgcctctccaaactcatcaagaaattccaagacctttctgaaggaagcagtatatctcaactcagttttgcggaggacatttctgctgatgaagatgaccaaatcctcagtcaaggaaagcataagaagaaaggaaataaacttttagagaaaactaacttggaaaaggagaaaggaagcagagtcttttgtgtagaggaagaggacagtgaaagcagtcttcaaaagagaagaaggaagaagaagaagaagcaccacctgcagcctgaaaatccaggcccagggggtgcagccccatccctggaacagaaccggggcagggagcccgaggcctctgggctgaaagccctgaaggcacgtgtggccgagccaggtgcagaggccacgtccagcactggggaggagagtggctccgagcatcctccagccgtccccatgcacaataaaaggaaacggccacggaagaagagcccgagggcccacagggaaatgttggaatcagcagtgttgcccccagaggacatgtctcagagtggcccgagtggcagtcatcctcagggacctagagggtccccgacaggtggagcccaactcctaaaaaggaagcggaaacttggagttgtgcccgtcaatggcagtggcctgtccacgccggcctggcctccattgcagcaggaaggccctcccacaggccccgcagagggggcgaacagccacaccacgctgccccagcgcaggaggctgcagaaaaagaaggcagggcccggcagcctggagctctgtggcctgcccagccagaaaacagcaagtttgaaaaagaggaagaaaatgagagtgatgtcaaacttggtggagcacaacggggtgctggagtccgaagctgggcaaccccaggctctgggaagcagtgggacttgcagttccctgaagaagcagaagctgagggcagagagcgactttgtgaagtttgacacccccttcttaccaaagcccctgttcttcagaagagccaagagcagcactgccacccaccctccaggccctgccgtccagctaaacaagacaccatccagctccaagaaagtcacctttgggctgaacagaaacatgactgccgaattcaagaagacagacaagagtatcttggtcagtcccacgggcccttctcgagtggccttcgaccctgaacagaagcccctccacggggtgctgaagacccccaccagctcacctgccagctcacccctggtggccaagaagcccctgaccaccacaccaaggagaaggcccagggctatggatttcttctgaggagcagcagagtcccttgtaaaagactgcttttgtacagaatgcgctataaattatacctttaagaatgtggggccttttttatgattttgtaagttcccataagttgtgtgcacgaggttctgagagtgcccgcaggctgctgcgtcctggcccctctgtagtggctgcgggcgtcttggttgaatcttttgctacaaaccatgtttgcgtttgagctctccaggattttacatttttgggtaacctcagtgattcccattggtgtaggaaatgagaccctctctgaagctgaggagagcacgttgatctgaactttaaatcaatcagtgctgctggcacaatgaaaggtggaactgcacttctgttgagctctcagttctgcggaatttggtactcattaccgtattcgccgtactaagttggtttctgttagtcttaacagtctgttttcttttaaaagcatgtagggcttcattgccatgttctgtgggtgtttggcaggttaccgatggggaagattcttgtcacagaatcagcaataccatagtttttctacatgtgctcagctgggggtgtggacaggtaggggtggggaaagaagaggctctgcgttctgggggctttttcttctcctccccctacccggtttccctccctgttttcctacctctacggcaagcccaaagtgtcttcccgggagcccagcgcagcccccggctcttacccaggaccccgccccgtgctgagccttctgctgaggtccttgcgtggagcacactcattcctccaagcccttgcgctcccgtttctctctctctccgtccacgttccagccgagtcactgcctgaccggctccatggcagctccccatcttccctagaggctgcctgcgcatctggagcctgcgctccggctcagcgacctttcctctcaaatgcggaagcgtgcacttacagttcagaccgttctcctgtaagttcattacaaacacgggcggaaggcactcaggctttcgttggagaaacagaaataaggccttcttttgagcagcgattgctggatcattgatctgtttgaggaagtgtctgacctgggcctgagagctggagaaggtgcagattcaaagtgagcggctcctgaggagagccgccaaggctgctcgccttctccgtggcttccgcagctaccgtctgcacggtgagagggcacgggcacacggttcgggctggcgtgcagctctcccagccagccacgctctgctcaggcctggaagtgaaagccgcctccttcccgttatgccccccatacaggagcctcggtttttcagcaaaacgcggccagtccccttctccactgctgcctcccagcagagggccccaggatctccaaggtcccagctatggctttggacaacgtggcttcggcccctggggttgcagagcttgcattgggtttacctcggtctcattcattcatggagccaagggtggggtttcacctgcgaacatcagactgacttgctggcgtcaagagcagttgactcactgatgaaggccctggtgaggagaaagcactctgttcttcgcctactctgtaatcgttttgtcataatgagccatgaaaaaagtaatgaacttgtgctgttaatcgtcactgtaatgagaagtcttacgtacaacatagctgtggtggcttaatggctgcattagataggatcctcacatcccattcagaaccaaaactgatacagtgaaacaattaaggtgagcaaatagttttaacttttcttttttttttttaagtttcattcttcctagaatatttttctaacaatttttatttcagctttaaagatgggtcatatagccaaacgggccatataatccaacattgttgagatgtcttaggacatctaaggcaaaactggcacatttgttctgcagactattgcaggaatgttttttcctagcatttctatattatctgtccattctgaggaaccagtgaatgtcctataaatgcacctcctgtcaaaaccatgcctgagaggtcccggctgggagtgacagggtgcttcttagattctattggtccttctctcattctccgaacttactcctttttatgggtaagtcaactaggtttacagtcccttatttttaatgcctaagttttgacagcaggaagaaaacaattttttaaaaattctcattacatagacgcacaagaatatgtcacataaagaaaatgtgtttagaatactggttttctatttacgcatgatattttcctaagtaaaattgccaagtggacttggaagtccagaaaggaaaataatttaaattaatgctggtgatcttaacaatattttgtaaaatgatgcttcccccttctccatggtctagtcaattttgtacaattaggtatctgactttacaagtttgttatcctttctaatttttactgaactgaaagcacaaagaagactacacagaaaatctggaaacagttgcaggtgttgggaggaagatgaaatcgagctgtcttttaacttttgtatgtgttttatcagaatttgctggactatgctggcaaggactttgtttacgatcaaattgtactagtgtctgcagggtttgtcagtactcgtcaaagccaagtccaattaaaaaaaaaagtctttgccctccaa

SEQ ID NO: 758 - DNA, 5111 bp, Homo sapiens
accgccttccctctgcccgcctccgcctcctccccctctctccggctcctccccctccctcgctccctcgccgcctccccctcccccgtgtccctcccctctcctcttctcctccctctatcccctctccctcccctcctccccggctctccctctcagtctcaggcttttctctctctcaatctctctctctctttcgggcggagtcgcccaccactgccagcccagcgctggggggacctgctccaggctgtagccgcaggaccccaccaccccccatggctcccctggccttggtgggggtcacactcctcctggcggctcccccatgctccggggcagccaccccaaccccctccctgccgcctcccccggccaatgacagcgacaccagcacagggggctgccaggggtcctaccgctgccagccgggggtgctgctgcccgtgtgggagcccgacgacccgtcgctgggtgacaaggcggcacgggcagtggtgtactttgtggccatggtctacatgtttctgggagtgtccatcatcgccgaccgtttcatggcggccatcgaggtcatcacgtcaaaagagaaggagatcaccatcaccaaggccaacggtgagaccagcgtgggcaccgttcgcatctggaatgagacggtgtccaacctcacgctcatggccctgggctcctccgcacctgagatcctgctgtcagtcatcgaagtctgcggccacaacttccaggcgggtgagctgggcccaggcaccatcgtgggcagcgctgccttcaacatgtttgtggtcatcgccgtgtgcatctacgtcatcccagccggcgagagccgcaagatcaagcacctgagagtcttctttgtcactgcctcttggagcatcttcgcctatgtctggctttatctcatccttgctgttttttcccccggtgtggtccaggtgtgggaggcgctgctgaccctggtcttcttcccggtgtgcgtggtattcgcctggatggccgacaagcggctgctcttctacaagtacgtgtacaagcgctaccgcaccgacccacgcagcggcatcatcataggcgccgagggcgaccccccgaagagcatcgagctggacggcacgttcgtgggcgccgaggccccaggtgagctgggcggcctgggcccgggccccgccgaggcgcgcgagctggacgccagccgccgcgaggtcatccagatcctcaaggacctcaagcagaagcacccggacaaggatctggagcagctggtgggcatcgccaactactacgcgctgctgcaccagcagaagagccgcgccttctaccgcatccaggccacgcggctgatgaccggcgccgggaacgtgctgcgcagacacgcggcggacgcctcgcgcagggcggcgccggccgagggcgcgggcgaggacgaagacgacggcgccagccgcatcttcttcgagcctagcctctaccactgcctggagaactgcggctccgtgctgctgtccgtcacgtgccagggcggcgagggcaacagcaccttctacgtggactaccgcactgaggacggctctgccaaggcgggctccgactacgagtacagcgagggcacgctggtgttcaaaccaggcgagacgcagaaggagctgcgcatcggcatcatcgacgacgacatcttcgaggaggacgagcatttcttcgtgcggctgctgaacctgcgcgtgggcgacgcgcagggcatgttcgagccggacggcggcgggcggcccaaggggcggctggtggcgccgctgctggccaccgtcaccatcctggacgacgaccacgcaggcatcttctccttccaggaccgcctgctgcacgtgagcgagtgcatgggcaccgtggacgtgcgcgtcgtgcgcagctcgggcgcgcgcggcaccgtgcgccttccctaccgcacggtggacggcacggcgcgcggcggcggcgtgcactacgaggacgcgtgcggagagctggagtttggcgacgacgagaccatgaaaactcttcaggtgaagatagttgatgacgaggaatatgagaaaaaggataatttcttcattgagctgggccagccccagtggcttaagcgagggatttcagctctgctactcaatcaaggggatggggacaggaagctaacagccgaggaggaggaggctcggaggatagcagagatgggcaagccagttcttggggagaactgccggctggaggtcatcatcgaggagtcatatgattttaagaacacggtggataaactcatcaagaaaacgaacttggccttggtaattgggacccattcatggagggagcagtttttagaggcaattacggtgagcgcaggggacgaggaggaggaggaggacgggtcccgggaggagcggctgccgtcgtgctttgactacgtgatgcacttcctgacggtgttctggaaggtgctcttcgcctgtgtgccccccaccgagtactgccacggctgggcctgctttggtgtctccatcctggtcatcggcctgctcaccgccctcattggggacctcgcctcccacttcggctgcaccgttggcctcaaggactctgtcaatgctgttgtcttcgttgccctgggcacctccatccctgacacgttcgccagcaaggtggcggcgctgcaggaccagtgcgccgacgcgtccatcggcaacgtgaccggctccaacgcggtgaacgtgttccttggcctgggcgtcgcctggtctgtggccgccgtgtactgggcggtgcagggccgccccttcgaggtgcgcactggcacgctggccttctccgtcacgctcttcaccgtcttcgccttcgtgggcattgccgtgctgctgtaccggcgccggccgcacatcggcggcgagctgggcggcccgcgcggacccaagctcgccaccaccgcgctcttcctgggcctctggctcctgtacatcctcttcgccagcctggaggcgtactgccacatccggggcttctagggcctcgcgcagagactcgtccccaccgcccgcccggggctagggactcggctgcacctgctcttggaccctggtctccttttccccccagactcggcctcctctcctgggactcggcctcccttctccgccccctcccctggctttgattgccctgttctgtgtccccagtagctcagccttccctcttcctctcgggagcctccccggttcctcccctgcggtgaccccaactccagcccatcctgttggtgaccgtctatatccctggggaaatttccaccccagtcccctccccagggaaccacccccagtaaccatcctggggagtttaaggtctctctccttggtcacccagcctggctttgcccccaaagtctcccttcccctagtgaccccccccccacttcaccccatgtcccagagcctcagaacccaccctccctgggggaccctcgaaggaggctgtcagaggccgtctcagctcccagcccttccccccagccctcagggagctccgctcagccccggcggggaggagcgggtgggtgtgcgcgcaaggaggccgcacaccgttccttccaatccctccactcgggttcttgggaggacactcattctccaggctcggagacgaggggagaagtttggggtttcagtcccagggcttagccggaggaagcacattttgaacctgcaacttcagacattccagctcccccactcgccctccactacctctgagagcccagccacgccttggagggaggggcttgtgtgtgtatatagtgtgtttgggggaggggggacgcgggagggtgcatgtcttgggaaaagggggtgacagacaacttttgagagggcagcagactccctcagccatgagaaccagctttggggaggaggccgggaatcaaagcgagtccagttgatctcccctgacaatctggaaggttccttttgccctcagtgccagccaatccgggcaggaccctcgaagaggagaccgagggtcccagaggaccaatgctacaagccagcaaatgctgccacatctctgcctgatggggggtggggatgggtggggggatgggactgggccaagggatctgggtgggcatttttaactttggaggccttccatctgtcggtaggccatctgcattttcttactgttgatgtttcctgcccaaaggacacatttgggcagtgccacccactccttgggcccctaggatgacccaactacccccataactttctgcttcccacaggttttcagcattctatcgtcctgttgtgctcagccccaacatcccagacccgttacccactacccttctctcccccagctcatcatcagtcgctgtctcttttctgtgatttctgtaaaagttgccataaaactttgaaattctgcctgaaaaacagtcccgtgggaagctgggattcaggaggagggggctaataaggtctctgactgagatttgggcaactgttaaaccaagtaatctgggtttttgcggcccgcggtcgtctgcgggacacacccacatatagcagcagcgccggggtccagccgccaagctcttccactcgccacgcccccatcagtaatgagcttccactagccacgcccccatccgtcagcctagctcttccactagccacacccccatccatcagtcatgggcttccacaagccacgcacctccactctccatgcccccattcgtcagtcgtgggtttccactaaccacgcccccattcatcagccaagctcctccacttgctacgcccgcatccgtcaattacgggtttccactaaccacgcccccattcatcagcctagctcttccactaatcacacccccacttatcagtcgtgcttcagccacgccttcctgcttcagtcaggggcttccactagccacgcccccatgcatgagccacaaactgtttctctttatgggcatcctgggaacacaaaagagagacgttcatttgcctgagccaaagagctggggttgatggggtttcctaaataaagcaagtaattttctcaga

SEQ ID NO: 759 - DNA, 3744 bp, Homo sapiens
ggggtggggtggggcaggatgctggatggcccactgttctccgaggggcctgacagcccccgggagctccaggatgaggagtctggcagctgcctctgggtgcagaagtccaagctattggtgatagaagtgaagactatttcctgtcattatagtcgccgcgccccttctcgacagcccatggacttccaggccagccactgggctcgcgggttccagaaccgcacgtgtgggccgcgcccgggatccccacagccgccgccccgccggccctgggcctccagggtgctgcaggaggcgaccaactggcgggcggggcccctggccgaggtccgagctcgggagcaagagaaaaggaaagcggcgtcgcaggagcgggaggccaaggagaccgagcgaaaaaggcgcaaggctggtggggcccgacggagccccccgggtcgaccccgcccggagccccgcaacgcccctcgggtggcccagctggcagggctccctgctcccttgcggccggagcgcctggcgcctgtggggcgagcgccccgtccatccgcgcagccgcagagcgacccagggtcggcgtgggcggggccctggggaggtcggcggcccgggcccccaagctacgaggctcacctgctgctgagaggttctgccgggaccgccccacgacgccgctgggaccggccgccaccctacgtggctccaccttcttacgaaggcccccataggaccttggggactaagagaggccccgggaactctcaggtgcccacttcatcagccccagctgcgactccagccaggacagacggagggcgcacaaagaagaggctggatcctcggatctaccgggacgtcctcggggcttggggtctccgacaggggcaaggtctcttggggggatccccaggctgtggagcggccagagcaaggccagagcccggcaagggggtcgtggagaaaagcctggggctggctgctgctgacctgaacagtggtagcgacagccatccccaagccaaagctacagggagcgcaggcaccgagatagctcctgcggggtctgcaactgcggctccctgtgccccgcatcccgctcccagatccaggcaccacctcaagggctcgagggaagggaaagaaggagaacagatctggtttcccaaatgctggattccctcccctaaaaagcagccgccccgccatagccagacactccccagaccctgggctcccggaggcaccggatggagagaatctctgggtcttggagagggggcaggaccggagaccctggagggttggaaggcgacccgccgtgcccacaccttgccccgcagttcccagggcctgtcccgtggggaaggcgtctttgtcattgacgccacgtgcgtagtgatacgatcccaatatgttccaaccccccgaacccagcaggtgcagcttttgccctctggggtgacacgcgtggtgggggattcccccagccaatcgaagcccggcaaggaggagggtgaaggggccacggtctttccttccccttgtcaaaagcggctgtcgagcagtcgccttttacaccagcccggcgggggccgcgggggcgaagctgagggcgggaggccgggggactccacactggaggagcgcactttccgcatcttggggctcccggcccccgaagtaaacctgcgggacgcccccacgcagccaggtagcccagagcaccaagccttaggcccagcagcttcgggagcccagggcagagccgaggggtcggaagtggcggtggtccagcggcgcgccggccggggctgggcgcggaccccagggccctacgccggggccctgcgagaagccgtgtcccgtatccgccgccacacagcccctgactcggacacggacgaagctgaggagctcagcgtccatagcggctcctctgatggaagcgacacagaagccccgggcgcctcctggcggaatgagaggaccctgcccgaggttggaaacagttcgccagaggaagatgggaagacagcggaactgagcgacagtgtcggggagatcctagatgtcataagccaaaccgaggaggtcctcttcggggtgagggacatcagagggacccaacagggaaataggaagaggcagtgagaggccccttcttgtatttgtgtccccaacgcatccatccttgggtccactggtccccattcttccccacagacttcctttgcttctcttttccttgtatctttacccatacctgttctcatccttgaaatataaatgaaaggaagggaagcatatgcccattaatgattttgtttcaggagaggtgagaatgagcagatttaattaatgtctgttatgttcagggcacaagggtgagctcttcgcaggggctgatgcactgggtgtggagctgagcagagaggcctaaccaggatcaggcaggagggcagggatggtggcagccataggagggcagggtagggtagggcctctgaggaggagggaaaaagtgaaggagaggctttggacctggtgacagagtgatcagatgacagaggggttcttgggagaagaggcataggtccagcaacaaccaacaaagcagaaggagggctcaccttggtgtcacaagtcttggatttcaatcccaactctgccactgagttgctggttgactgaggccagtcactttccctctccaggcctccaggcctcctggtatataaaatgatggtattctaaggtccatccttccgtctctgacattttgagatctttggaaaggactctatctcatcctcccctcgacaagccaagaatgagaattgggaataagtgaacagagtttgagggtttctgggcggcctccgtgtcacccaaagtcatgatcaattcaggagactgcccaaggcttgcagaagaggtaagggagtgaggcactcctatcccagtctcccaggtttggttgagggctccccaaggcagggcaagatagcggccctgtcactgaccctggcctgtggtggtctgagctggggagggaaggacaccaatgaatcagcttgggacctctttaggccttccccttttcctccaccccgatgctccttagtgatgctctgaggcgtggccacgatctccctcccaggtggtatcgcccacctgaaaaaatcctgagaatttctcccatcttggcctcttccagaaaccggccaggcaaggaaagaggccggtcaccagaagccagcaggcgtggggtgtgatactctctatagccactacagggcgcgcgcaggtcgcggatctccccagttgctaatcccggctctgccactcaatcctatccctagttcccgagcgcgggtcccccgccttgcagtctccagccgtgcggggccgggagcaggcctccggcctcccagacttctagagcccgccgggcccatctttgtactcatccaccccagccggcttgggactcagacaccgaagtctttttttttttctctccgatccttggacacctcctctgtctgccatttattagccatgtgaacttggccacatcacttcacctccctgagcctcagtttcctcatctgtcaaatgggggtttataaacacctacctcgcagggttgttgtgaggatttaatgcgataatgtatgtaaagcgccttgcacactgcctggcacacagtaggcgctcaataaatctaagcttcccttt

SEQ ID NO: 760 - DNA, 4395 bp, Homo sapiens
atcgagcgcctaggagagccccgggtgggggagggcgcaaggggctcgggagggcccctccctgcgtcggcgcccctgacccgcccccagaggcagggttttgctgtattgcacaggctagtctcaaactccttggctcaagtgatcctcttgctttggtctcccaaagtgctgcgattacaggctccagacccagttcctggacctgccctggaaaagaagtatcccgtagagatgagctcactgcagttacttaattaacaatttgtaagctgcaaaaatggcaatgggccaaccaagaacagctacaatttgaatttttctatttccagaaaatgcttggacagaagagatgagtactatttccactaaggcctagaattgcctactgtacaaatagtcctgatcaggcaatatacgaatggcccaaggaagccaccaaattgattttcaggttttacatgacctgcgacaaaaattccctgaagtacctgaagttgttgtatccaggtgcatgttacagaataataataacctggatgcctgctgtgctgttctctctcaggagagtacaagatatctttatggtgaaggagacttgaatttttcagatgattctggaatttctggtctacgcaatcacatgacttctctcaacttggacttgcaatcacagaacatttaccaccatggaagagaaggaagtaggatgaatggaagtaggactctaacgcacagcattagtgatggacaacttcaaggtggccagtccaatagtgaactatttcagcaggagccacagacagcaccagctcaagttcctcaaggctttaatgtttttggaatgtccagttcctctggtgcttcaaattcagcaccacatcttggatttcacttaggcagcaaaggaacatctagcctttctcaacaaactcccagatttaatcccattatggtaactttagccccaaatatccagactggtcgtaatactcctacatctttgcacatacatggtgtacctccacctgtacttaacagtccacagggaaattctatctatattaggccttacattacaactcctggtggtacaactcgacagacacaacagcattctggctgggtatctcagtttaatcccatgaaccctcagcaagtttatcagccttcacagcctggtccctggactacttgtcctgcatctaatcctctgtcacatacctcatctcaacagccaaatcagcaaggccaccagacctctcatgtctacatgccaatcagttcacctactacttcacaaccaccaaccattcattcatctggtagctcacagtcttctgcccatagccaatataacattcagaatatttcaacaggacctcgaaaaaaccagattgaaatcaaacttgaacccccacaaagaaataattcttcaaaactgcgttcttctggacctcgaacctccagcacttcctcttcagtcaatagccagaccttaaacagaaatcagcccactgtttacatagctgccagccccccaaatacggatgagctgatgtcccgtagtcaacctaaggtctatatttcagcgaatgctgccacaggagatgaacaggtcatgcggaatcagcccacactcttcatatccacaaactctggagcatctgctgcctccaggaacatgtctgggcaagtgagcatgggtcctgcctttattcatcaccatcctcccaaaagtcgagcaataggcaataactctgcaacctctcctcgagtggtagtcactcagcccaatacgaaatacactttcaaaattacagtctctcccaataagccccctgcagtttcaccaggggtggtgtcccctacctttgaacttacaaatcttcttaatcatcctgatcattatgtagaaaccgagaatattcagcacctcacggaccctacattagcacatgtggatagaataagtgaaacacggaaactgagtatgggatctgatgatgctgcctacacacaagctcttttggtacaccagaaggccagaatggaacgacttcaaagagaacttgagattcaaaagaaaaagctggataaattaaaatctgaggttaatgaaatggaaaataatctaactcgaaggcgcctgaaaagatcaaattctatatcccagataccttcccttgaagaaatgcagcagctgagaagttgtaatagacaactccagattgacattgactgcttaaccaaagaaattgatctttttcaagcccgaggaccacattttaaccccagcgctattcataacttttatgacaatattggatttgtaggtcctgtgccaccaaaacccaaagatcaaaggtccatcatcaaaacaccaaagactcaagacacagaagatgatgagggagctcagtggaattgtaccgcctgtacttttttgaaccatccagccttaattcgctgtgaacagtgtgagatgccaaggcatttctgagccaaatggccctgtatcttctctaaaaccacatctaaagttcaagaaactagtctgtcatcgggaaaaagtttcactgctacataggattttgtcaaattgaaggtgtgacaagatggtgttctgctaatgttaaatgtcagcccacagagctaataatacctcagtataatgtcatgagcagttgaaattcatcacatgaaaagtaatctgctgaaagacttggttgcccactgcctaactgtgtacagtgttaccagtgtcccattatggataattctcaatatgttaacacctaggtgttcccaatacctttttcccctcatgtcactactgaattttgacaggaggaaggaatagaatgatagcttgttttatttgtaaagctttcagtgaaacactacatacacgaagaaaaggaacaaggtttaactatttaagaaccatttgctgccgcatagtgccattggatagggaagaacttcagaaatctgtggtactcttggccttgtctttgtcttccctgaacgtgtctccactctgtgaagccagcatctaggggctaaagatgcaaaggaaagcagcatgcattgtctgtacaaatgtgcagcgaaataccccaaagcttttcctactgtacagatctctcgagtctgctttaagtgatttcttttcttcttgattattttcttatatttctatatgtatagtgtaatagccttttgttaactaattttcttttttccttttagtaattaagcacgatcatgtccctttttaagccttacctgagaggaacaatgccttaaaataaaaaagcattaatgagatgaaagtatgcacagaataactttcctctacttattctgtactttgccctcatgagttccaatgttgtgtgaagacaggcagatgctgcacagtgaattgcagatgatattacagaagtgatgtctgtaggtcacattaaatactgacttgagcagtgggtgacacaacacagtgtttgtcttccacagggaagcttaaaacaaaagatatttttaacccactgacagaacaacaaggttaagcttcatctgcttggtgtcccacagaacttgcacaagcagttgttattgggaaagtacagtctcaaaaccagcaacagcagcagtacctacagccctttttttggagagaagtttaaatgctttactgttggggcagtccatttctaatcctgacttggtgacagtatcatgtgtatttataaaacaaggctagccatatttaggacaactgaagaaaagctggaaaaaaaaacaagcaaacttgaacactgaagcaacctcaagcatctctttattttgatgatatatttttgtaaggaaaatattcagatgatcaggaatgtatataactgaaatcaagaaaaagaacagtatgcatttaaaaagacagaattatgaaattatatgagtgcttagaatggggctaagggaagtgctgaaatagagcaaaggatggaagataatatagactaccacccactgtaaatgtttgcaagtggctgtgttttaaatgggattattacagttgatctctatgaatgtcagagccctaactttcaggctttgcattttgtatatgggaagaaatatgacaatcctaggtaattaaaccatagacccaaagcccttacgtttgatgcaatttatttttaaaataggccttgtttttcagcttcatctgcagttctatgtgaagattgataaatcagtttttacttgttttattaataaaacgtaatttggatatcttgagttgatggttttgtgatttagctgggtaaactatctttgtaacagataagttatttataaaaattaaaaaacttatattctaatgtg

SEQ ID NO: 761 - DNA, 6812 bp, Homo sapiens
gtgagcggcgctcggggcgcgctaggcggggagccgagccgggctggcggcaggcggacggggcgggcgcgtgcggcgcgagccgggcgctgaggacaagggccgctggtagggccggccggccggcgggcggagcgccgccgccgacgcacacgaggtgaccaggcattgatgcacccccaggaaggccacgcgctcaggagccccccccgccgctggctgctgctcacatggtgtctgggcccttggcactccggtggtgcgcgtgggcagggcgcggggacatggggcccgacatggagctgcccagccactcgaagcagctcctgctgcagctgaaccagcagaggaccaagggcttcctgtgtgacgtcatcatcatggtggagaactccatcttccgggcccacaagaacgtcctagccgccagcagcatctatttcaagtccctggtcctgcacgacaacctcatcaacctggacacagacatggtcagctccacagtgttccagcagatcttggacttcatctacacaggcaagctgctgcccagcgaccagccagccgagcccaacttcagcaccctcctcactgccgccagctacctccagctgcccgagttggcagccctctgccgccgcaaactcaagcgagccggcaagccctttggctctgggagggcggggtccactggcatggggcggcccccccgcagccagcggctgtccacggcctctgtcatccaagctcggtatcaggggctcgtggatgggcgcaagggggcccacgccccccaggagctcccccaagccaaaggctcagacgatgaactctttcttggtggctctaaccaggatagcgtgcaaggtctgggccgggctgtctgcccagctggcggggaggcgggtctggggggctgcagcagcagcaccaacgggagcagcgggggctgcgagcaggagctgggcttggacctgtccaagaaaagcccacccttgccccctgccaccccaggtccccacctcactcccgatgacgcagcccagctgagcgacagccaacatggctcgccccctgcggcctctgctcctcccgttgccaacagtgcctcttattctgagctggggggcacccctgatgagcccatggatctggagggggccgaggacaaccacctgagcctgctggaggcgcctggtgggcagcctcggaagagcctccggcactccactcggaagaaggagtggggcaagaaggagcctgtggctggctccccctttgagcggagagaagcagggcccaagggtccctgcccgggagaggagggtgagggggtcggggacagggttcccaatggcatcctggctagtggggctggccctagcgggccctatggggagcccccctacccctgcaaggaggaggaggagaacggcaaggatgcaagtgaagacagtgcgcagagcgggagcgaggggggcagcggccatgccagcgcccactacatgtaccggcaggagggctacgagacggtgtcctacggggacaacttgtatgtgtgcattccctgcgccaagggcttccccagctctgagcagctcaatgcgcacgtggagactcacacggaggaagagctgttcatcaaggaagagggggcctacgagacaggcagtgggggtgccgaggaggaggccgaggacctgtcagcacccagtgcggcctacacggctgagccccggcccttcaagtgttcggtctgcgagaagacctacaaggacccagccacgctgcggcagcacgagaagacgcactggctgacacggcccttcccctgcaacatctgtggcaaaatgttcacgcagcgcggcaccatgacgcgtcacatgcggagccacctgggcctgaagcccttcgcctgcgatgagtgtggcatgcgcttcacccgtcagtaccgcctcacggagcacatgcgtgtgcactcgggcgagaaaccttacgagtgccagctgtgcgggggcaagttcacccagcagcgcaacctcatcagccacctgcgcatgcacacctccccctcctagaagccaaagacccgcgggcgccctctgccaccttgctccccgggaacccatggaaggagaagcgaggtgatgcagcagcaggggcaagaccctgggtccagtggaggctccgggtggcccctctggcccccactgcccacacccagagctttaatggacagtccgtaccaagcagagccgagaggagggaagccaggggtcccagcccgtctacctccccatcccacccaggcccccagctccccgcgggggccaccgcagggcctgtgggctgggtcacgtgggtctcgctgggacctggtccctttgttgcaggcggcttggagaaagggcagtgggacgctggccacggccagggtggtgtcgggagcaggcctcaccccgctggccgtgtctgtgtgtgtgcacgtgtgcttgtgtctgtgcgggcgcgtgcagccctggttctgcagggaacaggtgctgggggtgcagatccctccctccttgagccagggtggcactgttcactggcgctgggacagtcagggtgaccccaccgcctacctctctacatctaaagagccctctgggcctgtgttgctgttattcctactgatctgttcctctgtttttctttttgatttttgttttttaaaccaaaacagacaatagcttattttctttccgccccctccggggctgagcctgggtctgaagactgaatgtaacaggggccgctggcactcctgcgcgtcccccggctctggcgctgcaggggtgtcggcgcgccacctctccaggccccagaagcccttcttgcccaaaggcttccctggtccctgagccctgcctcggctgcctcaggggagagtgcttttcctgtagtttccaaggaatattctttgtttagaggtacttgttttttattaagagaaaaaccagtgtaacgtttatgtgactgtttgaactggaaggtctggggttccggggggtggggggaggctagactcaatgccggggccgtcggtactcttgttttcatttgtgtgtgcgtgcgtgtgtgtgtgtgtatgtgcgtatgtgtgtgtctatgtgtggtgtgtgccgtatgcatgggcagatgtttcgctttccctccttcctcgctgaacaaggtggagacttctgaccttttgctacctcttgaattcatgacaacgatatgttggtgactggcagtggaagcccttgacactcttgttttccttcgcttagcacctaggaagtcgtgtgcaggagccagcagggcgccaagtggcccagtgcctgcagctcacctgtgggttttccctttgagcctttggccacatccacctcgaggggaccctggcaccccgggcacacaaacctctgtggtataggtgaggggtgtgaggccccagcctggagccaggcactgggtgctgacaggggaaccatgaggagggtggcaggtctttgcagctcccggccagggtgaggcggaagtgagccctcatcctgccactcctatcctccattcctgcaagagttttaagcttgagagagctgaccacagggccccccggggaacagggatggcacttccctgagcagtcctggcccccggccactgtctcggggcccacctctcgcccctcatcttggtaattagccagcctcagatacttctgtgggccctgaagtgggctctcaaggtcagaccaaggttgctgatctcagtcccactgtcttcagccagctgaagctgtggggctgggctggcagcctttattgtcatcttgcttcaccatttttttttctctctcttttcattctattttaagtttagaccaaaaaaatacagagtcatcccctacccccacccctctagagaccctccagctaaaaacagagcctgagttcagggacccaagtggtgagcggcgtcttttgggggtgagggagcttgggtagatgaggctcctggctgagccctccctgtggtgatcccagcctaagatggcccctcttccctcctggtgggagacagaggactggaccctgggtctcaggttccagcaagtcaggctagggacctggggggaggagacccatggacttcacccatactcagtgagggggctcctgccgtcctgacgccaccccgccccatcagcacttaagccacatgacacaaagtctgtaccgcacgggaaatgttcacgcgcctggccgtgtgcatggcctcccgggctgtgggcagccgcatctgtgaggtgactcgtgaaagtaggtgattcctttgcagaacttcagggactgggagcagaggcccctcactcaacgacgtttgtgcgacatagtattgtatccaccttagtattgtatcgagccttttctgtgttttaatgagaaagcagaacactagtttcctatttaagactttaagggtttgtggggcggggcgggattaacacaacatttggctttgttttctttttcctttgatttccacatcaggtgtgtgcgagtgtgtgtgtgtggagatgttaagagcctcacaaggaaactgggttattggaggccaaggcggcttacagttctctgcgttcgtcacttaattcctgaatgtttcagagaaacaggaatcagaaaatagcagatatcatgtaggaaagagaggataaacaaagaaaaaagaaaaaaaaataagctcatacccaaattcacaaagcctattttttaaaccaaagcacattttgaatgagtatggaacctccatgggctcagaaaaaagatgctaatatatttatctcattgtttacataagcttttacagtttcagacctcagcagctgtaaggccagtccagggaaccctcccctgctgctggaaacccttctgagttggccctggagtggctcacgggcagagaagggtagccctggggctgggggagggattggaagcctccctggagtcacctgagccctcgtccccattcccagggcccctccaagcccagctggcaccaaagagcttgggcccgtgctgaccagcccccaaggccctctggccggaccatgctggtcctgaccagctagcctacgcggggatggccgtcagttctggccacaggacccgagtctgggcttgggtccccctgctgctctgcccgtgacccttggggatgggttgatgcgagggtcccactcaagccaaaaagccgggacctttgcgcagctctgtcgactctggtgggtccccactcctggggccccctaaccccaccccaggcagcggaaggggctgactgggtctggtccttaccaacatagacggtgcaaacactcttaacagtgttgtttttgtatcaatatgtttgtgcagtgatgaatgtatttatttctcagacttggggcgagtgagcgggtggcaggccgggctccgccactgcatgctcccgccggaccgagccccagcaagggctcctccaggattgcaaaaaaaaaaggaagagaaaagatgaacctttaagcaaataagaatctcagagactcgcagcatagccatacacctcagcctgtgaaatgaacgatccggaccctcaccaactttccccacctcaggcagccctgtgtgtttaccgttcatcaccactcgggggcaccgggccgcccacccactcccaaaatccgtcagtattcactggacctcaggccctgtgcaggagtgcgatccgggctgggccgctgggcaggctgaccccctgccctcctgcggccatcctgagttggggtgaggcctgggcagccggagggcagggctcagggagcaggaggctgcatccgtccacccccaggcgtgggggacaaaagccaaaggtgccaggccttagagcagacaagggctctcagccctggcatgccccctaaagggaccaaggtcctcctatttcccagaaccccgttggggcagatgttactgaacctgtgaatcagacgccaggagtgagggctggggagggacctaactggagcctcagtctgacattccacgccggggtgggggtgggcatgagcggtgggaactgaggctgcccaggacccccttcctaggatgccccggcttcagtcaccccactttaactttctaccaggaccccctccccctacctcaccttgctatttattgctgtaatttattgacctcaaaaatgctgcataacagacctcactggggcagggaggatccccagggctcccaccctccacttggcgggccccgtggggccaggtgctgaggggagcctctctaccccacccatcactagcttccctctgccctctcccaccccgggggggacccaggttgggcactggctcatttctcgcaaatacctcgaaggggaggggggagggatggggttatagctgttttgtttaattggaactggaagagggatcatgttttgttttatgcccttcccagaaggggggagggacaccgggatcgcactcctgtactggccaccgccgctgtcacttgtcacattgagttcatgtcccttgagagtttgtataaattcaggtcagagctgcagctacacagctgcccagtgtcatagaaaagcaattcaccaacgactgatctctccattcagaagtgtgcagtcttaaatgtacagcgataagaaactgttattttatgatcttttcattaaaagcttgattgaaaaaaaaaaaaaaaaaa

SEQ ID NO: 762 - DNA, 6977 bp, Homo sapiens
cccgggcccgccccccgcctcccgccgcctccgggctcccggctcccggccgcgcctcgccccatgcactcgccgcgccgcgcagcccgcgcacgcccggatggctcctcgcgccgcgggcggcgcaccccttagcgcccgggccgccgccgccagccccccgccgttccagacgccgccgcggtgcccggtgccgctgctgttgctgctgctcctgggggcggcgcgggccggcgccctggagatccagcgtcggttcccctcgcccacgcccaccaacaacttcgccctggacggcgcggcggggaccgtgtacctggcggccgtcaaccgcctctatcagctgtcgggcgccaacctgagcctggaggccgaggcggccgtgggcccggtgcccgacagcccgctgtgtcacgctccgcagctgccgcaggcctcgtgcgagcacccgcggcgcctcacggacaactacaacaagatcctgcagctggaccccggccagggcctggtagtcgtgtgcgggtccatctaccagggcttctgccagctgcggcgccggggcaacatctcggccgtggccgtgcgcttcccgcccgccgcgccgcccgccgagcccgtcacggtgttccccagcatgctgaacgtggcggccaaccacccgaacgcgtccaccgtggggctagttctgcctcccgccgcgggcgcggggggcagccgcctgctcgtgggcgccacgtacaccggttacggcagctccttcttcccgcgcaaccgcagcctggaggaccaccgcttcgagaacacgcccgagatcgccatccgctccctggacacgcgcggcgacctggccaagctcttcaccttcgacctcaacccctccgacgacaacatcctcaagatcaagcagggcgccaaggagcagcacaagctgggcttcgtgagcgccttcctgcacccgtccgacccgccgccgggtgcacagtcctacgcgtacctggcgctcaacagcgaggcgcgcgcgggcgacaaggagagccaggcgcggagcctgctggcgcgcatctgcctgccccacggcgccggcggcgacgccaagaagctcaccgagtcctacatccagttgggcttgcagtgcgcgggcggcgcgggccgcggcgacctctacagccgcctggtgtcggtcttcccagcccgggagcggctctttgctgtcttcgagcggccccaggggtcccccgcggcccgcgctgctccggccgcactctgcgccttccgcttcgccgacgtgcgagccgccatccgagctgcgcgcaccgcctgcttcgtggaaccggcgcccgacgtggtggcggtgctcgacagcgtggtgcagggcacgggaccggcctgcgagcgcaagctcaacatccagctccagccagagcagctggactgtggagctgctcacctgcagcacccgctgtccatcctgcagcccctgaaggccacgcccgtgttccgcgccccgggcctcacctccgtggccgtggccagcgtcaacaactacacagcggtcttcctgggcacggtcaacgggaggcttctcaagatcaacctgaacgagagcatgcaggtggtgagcaggcgggtggtgactgtggcctatggggagcccgtgcaccatgtcatgcagtttgacccagcagactccggttacctttacctgatgacgtcccaccagatggccagggtgaaggtcgccgcctgcaacgtgcactccacctgtggggactgcgtgggtgcggcggacgcctactgcggctggtgtgccctggagacgcggtgcaccttgcagcaggactgcaccaattccagccagcagcatttctggaccagtgccagcgagggccccagccgctgtcctgccatgaccgtcctgccttccgagatcgatgtgcgccaggagtacccaggcatgatcctgcagatctcgggcagcctgcccagcctcagtggcatggagatggcctgtgactatgggaacaacatccgcactgtggctcgggtcccaggccctgcctttggtcaccagattgcctactgcaacctcctgccgagggaccagtttccgcccttcccccccaaccaggaccacgtgactgttgagatgtctgtgagggtcaatgggcggaacatcgtcaaggccaatttcaccatctacgactgcagccgcactgcacaagtgtacccccacacagcctgtaccagctgcctgtcggcacagtggccctgtttctggtgcagccagcagcactcctgtgtttccaaccagtctcggtgcgaggcctcaccaaaccccacgagccctcaggactgcccccggaccctgctctcacccctggcacccgtgcctacgggtggctcccagaacatcctggtgcctctggccaacactgcctttttccagggtgcagccctggagtgtagttttgggctggaggagatcttcgaggctgtgtgggtgaatgagtctgttgtacgctgtgaccaggtggtgctgcacacgacccggaagagccaggtgttcccgctcagcctccaactaaaggggcggccagcccgattcctggacagccctgagcccatgacagtcatggtctataactgtgccatgggcagccccgactgttcccagtgcctgggccgcgaagacctgggtcacctgtgcatgtggagtgatggctgccgcctgcgggggcctctgcagcccatggctggcacctgccccgcccccgagatccgcgcgattgagcccctgagtggcccgttggacggtgggaccctgctgaccatccgaggaaggaacctgggccggcggctcagtgacgtggcccacggcgtgtggattggtggtgtggcctgtgagccactgcctgacagatacacggtgtcggaggagatcgtgtgtgtcacagggccagccccaggaccactctcaggtgtggtgaccgtgaacgcctctaaggagggcaagtcccgggaccgcttctcctacgtgctgcccctggtccactccctggagcctaccatgggccccaaggccgggggcaccaggatcaccatccatgggaatgacctccatgtaggctccgagctccaggtcctggtgaacgacacagacccctgcacggagctgatgcgcacagataccagcatcgcctgcaccatgcctgagggggccctgccggctccggtgcctgtgtgtgtgcgcttcgagcgtcggggctgcgtgcacggcaacctcaccttctggtacatgcagaacccggtcatcacggccatcagtccccgccgcagccctgtcagtggcggcaggaccatcacagtggctggtgagcgtttccacatggtgcagaatgtgtccatggccgtccaccacattggccgggagcccacgctctgcaaggttctcaactccaccctcatcacctgcccgtcccccggggccctgagcaacgcatcagcgccagtggacttcttcatcaatgggcgggcctacgcagacgaggtggctgtggctgaggagctactggaccccgaggaggcacagcggggcagcaggttccgcctggactacctccccaacccacagttctctacggccaagagggagaagtggatcaagcaccaccccggggagcctctcaccctcgttatccacaaggagcaggacagcctggggctccagagtcacgagtaccgggtcaagataggccaagtaagctgcgacatccagattgtctctgacagaatcatccactgctcggtcaacgagtccctgggcgcggccgtggggcagctgcccatcacaatccaggtagggaacttcaaccagaccatcgccacactgcagctggggggcagcgagacggccatcatcgtgtccatcgtcatctgcagcgtcctgctgctgctctccgtggtggccctgttcgtcttctgtaccaagagccgacgtgctgagcgttactggcagaagacgctgctgcagatggaggagatggaatctcagatccgagaggaaatccgcaaaggcttcgctgagctgcagacagacatgacagatctcaccaaggagctgaaccgcagccagggcatccccttcctggagtataagcacttcgtgacccgcaccttcttccccaagtgttcctccctttatgaagagcgttacgtgctgccctcccagaccctcaactcccagggcagctcccaggcacaggaaacccacccactgctgggagagtggaagattcctgagagctgccggcccaacatggaagagggaattagcttgttctcctcactactcaacaacaagcacttcctcatcgtctttgtccacgcgctggagcagcagaaggactttgcggtgcgcgacaggtgcagcctggcctcgctgctgaccatcgcgctgcacggcaagctggagtactacaccagcatcatgaaggagctgctggtggacctcattgacgcctcggccgccaagaaccccaagctcatgctgcggcgcacagagtctgtggtggagaagatgctcaccaactggatgtccatctgcatgtacagctgtctgcgggagacggtgggggagccattcttcctgctgctgtgtgccatcaagcagcaaatcaacaagggctccatcgacgccatcacaggcaaggcccgctacacactcaatgaggagtggctgctgcgggagaacatcgaggccaagccccggaacctgaacgtgtccttccagggctgtggcatggactcgctgagcgtgcgggccatggacaccgacacgctgacacaggtcaaggagaagatcctggaggccttctgcaagaatgtgccctactcccagtggccgcgtgcagaggacgtcgaccttgagtggttcgcctccagcacacagagctacatccttcgggacctggacgacacctcagtggtggaagacggccgcaagaagcttaacacgctggcccattacaagatccctgaaggtgcctccctggccatgagtctcatagacaagaaggacaacacactgggccgagtgaaagacttggacacagagaagtatttccatttggtgctgcctacggacgagctggcggagcccaagaagtctcaccggcagagccatcgcaagaaggtgctcccggaaatctacctgacccgcctgctctccaccaagggcacgttgcagaagtttctggatgacctgttcaaggccattctgagtatccgtgaagacaagcccccactggctgtcaagtactttttcgacttcctggaggagcaggctgagaagaggggaatctccgaccccgacaccctacacatctggaagaccaacagccttcctctccggttctgggtgaacatcctgaagaacccccagtttgtctttgacatcgacaagacagaccacatcgacgcctgcctttcagtcatcgcgcaggccttcatcgacgcctgctccatctctgacctgcagctgggcaaggattcgccaaccaacaagctcctctacgccaaggagattcctgagtaccggaagatcgtgcagcgctactacaagcagatccaggacatgacgccgctcagcgagcaagagatgaatgcccatctggccgaggagtcgaggaaataccagaatgagttcaacaccaatgtggccatggcagagatttataagtacgccaagaggtatcggccgcagatcatggccgcgctggaggccaaccccacggcccggaggacacaactgcagcacaagtttgagcaggtggtggctttgatggaggacaacatctacgagtgctacagtgaggcctgagacacatggagagttggtcaggctgctgctgggagaaatggacgcccactgggcctcaacttgatcttctaccccgtgcctgtgactcagactgggaaatactgagcagagacggctggggcgggggcaggaggaggggctgctctctgagacaggggcgcccccgccttgacccctgggcacctccatcccctcccacctgtccccagatcagtctctgggatggaggccagagagctggtcaggctcccccatctgcccagcacggcctgcactgtgcccacccacttgctccacaacgtccagttggtcctgctgccaagagccccgtgcatccaggcggccaagcacaaactgggggagaggaggccgccagcccggaggctgcagcccagaaactctacctcatccacactggtgcagggagccctccttgaactgacctttgattggtttctgcttcaactaccaaaatgttatctccacttccccctcacccgtagaggatcctggccacagacagtttcaagtagtgtcagatttttgttgcttgggcggctgttggtagagtgggcagtgcccgcgccatggggtgctctgtgggcttctccaggagcagggagggtggaggggagggatggggggcacaggagctgggagccccgtctccaggaaaaggagaggggttaagatgcaccgaggctgtagctgggctacttgatcttgctgaaagtgtttctaaagatagcaccacttttttttttaaagcttttatatattaaaaaacgtatcatgcaccaactgtgaatagctgccgcttgcgcagaggacccggggaggggtcccgagaggctccccatgcaacactggaaatgactgttccagagagcgggcagacctggcagagcgcccctggcgcctgagactaccacccactccgttcctgccagaaacgaccctctgtggccgatgggccatgcgggcccctcgcagccaactcagccagtgttgggactggctcagagcccatgggggctggaggggggcagctgggactctggaatcttctttataataaaagccttacggacaaacctac

SEQ ID NO: 763 - DNA, 3302 bp, Homo sapiens
ggcctggccggccgtcgcggactcgggagatggaggaaaaggagatattacggcggcagatccgcctactgcagggtctgattgatgactacaaaaccctccacggcaatgccccggcccctggtaccccagcagcttctgggtggcagccacccacttaccacagtggcagagcctttagtgcccgctaccctcgtccaagccggaggggctactcttcccaccatgggccttcgtggcgcaagaaatactccctcgtgaatcggcccccgggaccctcagaccctcctgccgaccatgctgtgcggccgttgcacggggcccgggggggccagcctcctgtcccgcagcagcatgtccttgagagacaggtccagctcagtcagggtcagaacgtggtcatcaaagttaaaccgccatcaaagtctggctctgccagtgcctcaggggcccagcggggctctttggaagaatttgaggaaaccccctggagtgaccaaaggccccgggaaggtgaaggtgagccccctcggggacagctgcagccctcgaggccaacaagagccagggggacctgcagtgtggaagatcctcttctggtctgccagaaggagcctggtaagcccaggatggtgaagtcagtgggcagtgtgggcgacagcccccgggagccccgccggacagtcagtgagagtgtgattgccgtcaaggcgagcttcccatcctccgctctgcccccacgcactggcgtggccctgggccggaagctgggttctcattccgtggccagctgtgctccacagctccttggggacaggagagtagatgctggccacacagatcagccagttccgtctggctcagtggggggccccgccagaccggcctcaggacccaggcaggcccgggaggcctcgctggttgtgacctgtcgaactaacaagttccggaaaaacaactacaaatgggtggctgcctcctcgaagagtccccgggttgctcggagggccctcagtcccagagtggctgcagagaatgtgtgcaaggcctctgctggcatggcaaacaaggtggagaagccgcagctcatagctgacccagagcccaagcccaggaagccagccacgtcctccaagccagggtctgcccccagcaagtacaagtggaaggcctccagcccctctgcctcctcctcttcctccttccgttggcagtcggaggccagcagcaaggaccatgcctcccagctctccccagtcctgtctaggtccccgtcgggggacagaccagcagtaggacacagtggcttgaagcccctctctggggagaccccgctctcggcttacaaagtgaagagccgcaccaagatcatccggagacgcagcagcacaagccttcctggagacaagaaaagcggcacctcacctgccgccaccgccaagagccacctcagcctccggcggagacaggccctcagggggaagagcagccctgtcctgaagaagacccccaacaagggcctggtacaggtcaccacgcaccgactatgtcgcctgccaccgagccgggcccacctccccaccaaggaagcgtccagcctgcatgccgtgcggactgcacccaccagcaaggtgatcaagacccgctaccgcattgtcaagaagacgccggcctcgcctctcagcgccccgcccttccccctgtctctgccctcctggcgggcccggcggctctcactatccaggtccctggtgctgaaccgcctgcgtccagttgccagcgggggtgggaaagcccaaccgggctccccttggtggcggagcaaaggctaccgctgcatcggaggggtcctctacaaagtatctgccaacaagctctccaagacctccggccagcccagtgatgcgggcagcaggcccctcctgcgcacaggccggctggatcctgcaggcagctgtagccgttccctggccagccgggcagtgcagcgcagcctggccatcatccggcaggcgcggcagcgcagggagaagaggaaggagtactgcatgtactacaaccgcttcggcaggtgcaaccgtggcgagcgctgcccctacatccacgatcccgagaaggtggccgtgtgcaccaggtttgtccggggcacctgcaagaaaacggatgggacctgccccttctcccaccatgtgtccaaggagaagatgccggtgtgctcctacttcctgaagggcatctgcagcaacagcaactgtccctatagccacgtgtacgtgtcccgcaaggccgaggtctgcagcgacttcctcaaaggctactgccccctgggtgcaaagtgcaagaagaaacacacgctgctgtgccccgactttgcccgcaggggggcgtgtccccgcggcgcccagtgccagctgctccaccgtacccagaaacgccacagtcggcgggcagccacgtcccccgccccagggcccagcgacgcaaccgccaggagcagggtctcggccagccacgggcccaggaagccttcagcatcccagcgccccaccaggcagacgcccagctcggctgccctcactgcggctgccgtggctgcacctccccactgcccaggggggtcagcctctccctcatcctcgaaggcttcctcctcctcctcctcctcctcatcccctcccgcttccttggaccacgaggcaccatctctccaggaggctgccttagcagcagcgtgctccaacaggctctgcaagctgccttccttcatctccctgcagtcctcgccgagcccaggagcccagcccagggtccgggcccctagggcccccctcaccaaggactcagggaagcctctgcacatcaaaccacgtctgtgaggaccccagggaccggcctgcacctacctcagaccctcatccttggagaggaaagaggctctgtccaccactctaccccacaggagggccgcccgccaccaagcctcacctgggggccacagggacactgctctgcctgcctggccctcaaccttccatgaccagcgtgtgcgcagggcctggtcttcctcccccaagccaggcccctgtccccaccccaccaccttccagggtgccaggcagggctggcctccaggcctgtccccgactgccattggcaacagtggccctgcagcccccagccctccccacccaggttttcggcccagtgaagaggccactggccaggcctcccaggcaggtgttttatgttcagcaataaaggttctatccgtaactggaaaaaaaaaaaaaaaaaaaaaaaaa

SEQ ID NO: 764 - DNA, 5261 bp, Homo sapiens
cgagggccagcttggtggagcttagcacagcttgctcggcgctgcgagcgggcgggggtggacactgggcttctgtgtgccagtcgcagccgttggctggcgggcacccaatcccagggcatgccgccggagcctggccaggacgcacggtgaaagacgagtttggtggcaggcttgaccccccggctgccagcagaagccggcgtcgggagcccaggcgggcaggccgctggggtcggggctgcacgtacgagagccgggacgcccgggttcagagcgaaggaggaggcatggcttcggtgttcatgtgtggcgtggaggacctgctgttcagcggcagccgcttcgtatggaacttgaccgtgtccacgctgcggagatggtacacggagaggctgcgggcttgccaccaggtgctgcggacgtggtgcgggctgcaggacgtgtaccagatgacagaaggcaggcactgccaggtgcacctcctggatgataggagactggagctgctggttcagcccaaacttctagcaagagagttgctggacctagtggcttcacatttcaacctgaaagaaaaggagtattttggaataacattcatagatgacacaggtcagcagaactggctgcagttagatcaccgagttcttgaccacgatttgcccaagaaaccaggcccaaccattttgcactttgctgtgaggttttacattgagagcatatcgtttttaaaggataaaaccaccgtggagctgtttttcctgaatgcaaaggcctgtgtgcacaaggggcaaatcgaagtagagagcgaaaccatcttcaagttagcagcgtttattttacaggaagccaagggagattataccagtgatgaaaatgccaggaaagatttaaagacattaccagcctttccaaccaaaactcttcaggagcatccatcccttgcctactgtgaggacagggtaattgagcattatttgaaaatcaaaggtctcactcgaggtcaagctgtggttcagtatatgaaaatagtagaagctctaccgacttacggtgtccattattatgcagtaaaggataagcaaggacttccttggtggcttggaataagctataagggaattggccaatatgatatacaagacaaggtgaagcctcggaagttattccaatggaaacagctggagaacttatatttccgtgagaaaaaatttgctgttgaagttcatgatccacgaaggatttcagtttcaagaagaacctttgggcaaagtggcttgtttgtgcaaacatggtatgctaactcttctctcatcaagtccatttgggtaatggcaattagtcagcatcagttttacttggaccggaagcaaagcaaagcaaaaattccttcagccaggagtttagatgagattgcaatggatttgacagagacaggaacacaaagggcctccaagctggtgacactggaggcgaaaagtcagttcatcatggcaagtaatggcagtttaatctcctcaggttctcaagactcagaagttagtgaagagcaaaagagagaaaaaatccttgaactaaagaagaaggagaaactattacaagaaaaacttctgaaaaaagttgaggagcttaagaagatctgtctgcgggaggctgagctcacaggcaaaatgccaaaggagtatcccctgaacataggcgagaagcctcctcaggtcagaagacgtgtgggtactgcgttcaaattagatgacaacttgctgccgagtgaagaagatcctgctttgcaagaactggagagtaattttctaatacaacaaaagctggtggaagctgcaaagaaacttgccaatgagccagacctttgtaaaactgtgaagaaaaagcgaaagcaagattacacagatgcgatgaaaaagcttcaggagattgaaaatgcaataaacgaataccgaattaggtgtggaaagaaacccagccagaaagcaacagtgttaccagaagacataatcccctcagagagtagctctttgtctgacaccaccacctatgatgatcccagtgatgccttcacttttcctgggcagcgatcaagttcagtacctcattctccaagaattcttccccccaagtctcttggtattgagcgaatccatttcagaaagtcgtccatcaatgaacagtttgtggataccaggcagtccagagaaatgctgtccacacacagcagcccttacaaaactctggagaggcggccccagggaggacgaagcatgcccaccacgccagttcttacccgaaacgcctacagcagcagccacttggaacccgaatcttcatctcagcactgccgccagcggagtggaagcctggagtcccagtcccacctgctctccgagatggacagcgataagccatttttctccctctccaaatcccaaagaagcagcagcacagaaatcctcgatgacgggtcttcttatacaagccaatcaagcacagagtattactgtgtgacaccagttaccggcccctattacaccacccagaccctggacactcgcaccaggggtcggaggaggtcaaagaaacagaatgtttctacttcaaattcaggaagcatgcccaacctagcacaaaaggatagtttgaggaatggtgtttactcaaagagtcaggagccaccgtcttccagttactacattgccgggtacacaccctatgcagagtgtgacttttattacagtggtggttatgtctatgagaatgacaccgagggacagtatagtgtcaacccttcctaccggtcctcagcccactatggatatgagcgccagagggactacagcagatcctttcacgaagatgaggtcgaccgggtaccccataacccatatgcaactctccggctgccaaggaaggctgctgcaaaatcggagcacatcaccaaaaacatccacaaggccttagttgccgagcacttgcgtggctggtaccagcgggcctctgggcagaaggatcagggacacagcccgcagaccagctttgactcagacaggggatcacagagatgcctggggtttgcggggctgcaagtaccttgttctccaagcagtcgtgcatcctcgtactcttcagtgtcttctacaaatgcttctgggaactggaggacccagttaaccatagggctgtcggattacgagactccagcacattcttcttacaccagctgctatggcaatgtctataatcctttaccctctccaagcagacaatacacagaaatcagtcaactggatggtacagatggaaaccagctggaagacaacctggagagtagtgagcagagactcttttggcatgaagattcaaagcctggaacattagtctgaactgcagttggacctcctgaccaagcactgcgttctcacactagtgtgccttgcaaattgtatttgtcttccgagaggatgttcgttttagaaacctaaagacatcaaaggttgaagagaagacttagttgccctggaagtgaatcagtgaatcacacaccaagccccacaaagcccctaaaggaggatttggcctttcaaactctaggcactaacgtaactgtagggtctgcccacatgttgaagtattgccaagagaggactcagtgtgaagccttcatcaatagcaagcactttttaagggagtaaaagttgttaaaggcaaacctcaaaaacatgaaagggcattcaggatgtcccatggcaataagaacaggggaaatctcagagcacaattcagcaggatgagagaaggggaaccagaagctccggagtcattgctcacttcagagtttgaattcgtgagctgacaaagagtaacatgctctttctacacagacatggacaatttagacagtattggaaaattacttgaagctggattttcatgaagttctgaatgagtgtaaatgttttttaggatactataaagagtgatgtttttcataagcaccataaaatgggttctggaaaaactgattaccttagcatcctgtaatataacttatggtagcagattggggaaaatgaagcagcccactgaataattgacaaagtctgcttggagaacattctaaggtacaatatcatggagctcctttttcctttctccactaattgcgtgatgagctattgttctggctgttaattctccaactcggctgtcatttgaagtggcagacttaatatggaaagtttttataattatgagtttgaaaaagcattttaagatgatacagaaagtatccaaaacaacagaaaaaaaaagccacgtcattttagatgaattgcgtgccttaaaatggtgaacgttagaaaattaaacaagtctggattccacaagtagttccaagtcaccaagtgacaaaaacaaggttaacattaaaaaagaaaaacaacaacaacgacaaaaagctccaagctgcagtggatttaattatgaggctaaaactacctcatactttccttggaagaactaattagctatggtttattgtagggttttgtttgtttgttttttaaagcaaatgatttccatattccagattgatcttttttgtcatctttgcttcaaaattacataaaaggtgctcctttcccccttcttttatacaagtttcttgttcatattgtgaatagaaaagtttctgaacaacttttttggaacattttctatctatattccaaagcatgtaatatatacataaaaacgatttgttaaactggtccttagtcatttgtataattagaaatgaagtttgggaaaaaattttggaaaaaagacaagcaaaaaaaaataacttattccttttttgcatatttgtatagccttctagaatcagaaataacctttttgcatattcttttattgttctgacttttcaagacctattatttttttacataggtcaataaacaaaaggtgtgctactgaaaatgtttacgttttcttccatttatgtcaggggttcatgtgaagcaggtcgcagtgctctacttcaagtaatcatattgggcaaggcttcggatttttatttatagtattaccgtattttattaattccgggatgtacatttttaaatatttacattaaaaacatggttcatctttttattgatggcatattctacttgaattggcagttttttcttaatagtacattaaaaataatgctgtgtcttacaataaagttgccttagaattga

SEQ ID NO: 765 - DNA, 5795 bp, Homo sapiens
gagcagcggcagcagcagcggaccccggcggcggcggcggcgcgcggtcccagccaggcggccccggtgtcccggccccggtggatgcacggctggggaggagcccatgggccggagctgaggctgcccggggcggcggggcgcggggcagggggcgcggtcgaggcccggaggcggcggcgcaggaggaagcggaggaggtcgggcgctcggggcccgggaggcgggccgcgcagcgccgcagccccgggctcgccatgctcctggcctcggccgtggtggtctgggaatggctgaacgagcacggccgctggcgtccctacagcccagcggtgagccaccacatcgaggcggtggtccgcgccggcccccgcgcggggggcagcgtggtgctgggccaggtggacagccgtctcgcgccctacatcatcgacctgcagtccatgaaccagttccgccaagacacgggaactctccgcccagttcgccgcaactactacgacccctcctcggcccctgggaagggcgtggtgtgggagtgggagaacgacaatggctcctggacgccctacgacatggaagtgggcatcaccatccagcatgcctatgagaagcagcacccctggatcgacctcacttccattggctttagctacgtaattgacttcaacaccatgggccagatcaaccgtcagacccagcgccaacgccgcgtccgccggcgcctcgacctcatctaccccatggtcacagggaccttgcctaaggctcagtcctggccagtcagccctgggccagccacctcgccccccatgtccccctgctcctgtccccagtgtgtcttggtgatgagtgttaaggcagccgtggtcaatggcagcactgggcccctacagctgccagtgacccgcaagaacatgccgcctcctggagtggtcaagctacccccactgccaggctctggggccaagccactggacagcacaggcaccattcgaggcccactgaagaccgccccatcgcaggtgatccggagacaagcctccagcatgcccactgggacaaccatgggctctcctgccagtcccccaggacccaacagcaagaccggaagggtggccctggccaccttgaatcgtaccaacctgcagcgactggccattgcccagtcccgggtgctgatcgcctctggggtccccacagtcccagtgaagaacctaaatgggtccagtcctgtcaaccctgccttggcaggaatcactgggatcctcatgagtgcagcggggctgcctgtgtgtctcaccaggccaccaaagctggtcctacacccaccccccgtcagcaagagtgaaataaaatccatcccaggggtttccaacacaagccgcaagaccaccaaaaaacaagccaagaaaggtaaaaccccagaggaagtgctaaaaaaatatctacagaaagtccggcacccaccagatgaggactgcaccatctgtatggaacgcctcacggccccctcaggctacaagggcccgcagcctacggtaaaacctgacctggtagggaagctgtccagatgcggccacgtctaccacatctactgcttggttgccatgtacaacaatgggaacaaggatggaagtttgcagtgtccaacctgcaagaccatttatggggtgaagacaggcacccaacctccagggaagatggagtaccacctcatcccccactccttgcctggccacccagactgcaaaaccatccggatcatctacagcatcccccccggcattcagggaccggaacacccgaatcctgggaagagtttcagcgcccgaggcttcccacgacactgttaccttccggacagcgagaaagggagaaaagttctgaagctgctgctcgtggcctgggatcgccgcctcatttttgccattggcacctccagcaccacaggcgagtcagacaccgtcatctggaatgaggtccaccacaagacagagtttggctctaatctcactggccatggctacccagatgccaattacctggataatgtgctggctgaactggctgcccagggcatctctgaggacagcactgcccaggagaaggactgaggccagaaaagctttgaggtgggaggggccatggagactgcaggacaggaagtgaggagagtgagtcaatgtagaagaagttggtgtcctgccctcccaactttctatcctcccctcctgccctgtgtccatccctcatccctcccaaccacagtgggagccagactgaatatagcgacatcattcataaatctcatccaacacaaagggagatgggatgagggccatcctgggtctgttcccatggagtttttggtgctgggtaggcaggaatcccctccctaccccacctcccaagtaggggcatggtcagcacacctagggtatgggcagtgcttaggcactccatatcctggctttgggaagccggggtttcttgcctcagccggcttcttgctacttccactctgctttgagactggagtttctgctattctccctctgctggaggcagggagctctcactgtgcaaggttggggggtgggcaaaggggtgaatcactaaactgctgtgacatcagaaactgatgccttggtgtagagcaaggaagcacttcttcccaagagggtcggagaaggaaaagcctctgggagcacattctgctgtcatcacagtccttggcttctctgggccctcctctcctcctcacagctctcacctgtccaaagaggcatctggttctctcatgtggatggatggactctggggttcctctttggagtggcatcccatgatgctgtttctagaccctctctgatcaaaccagagcctgcatcccactgagcatctgaactgtcctcagggagaggagcccacagccttcttcccaactcattctagaccagctcaaagattccatgagtttcatcgagtcactgtgagtggagcccatgctgggctctgtgccctctgtgtctgtgcatgcgcgtgtgtgtgtgggcgtgtgtgcattgctgggccagcttgaagggaaggcccgtcatgtccctgcactctgttttgcaagatgccaaaccccagttctgatggggctccaacagccaggctgtggtcctttgacgttcctcacctgttgccaacctatcccgtagtgaactgaaaccccaatgaagacagaactgtgcctggggagatgcaatgaggtgagggctgaactcatccttttatatttcttttcaagattggatcagagctcatctccatccagtcttgtttctatgaaggcttcaatctgtttccatgcaaatttgctaatcagagcccagagctgctgggtccctcatctccctcatctattatagattgacttacagcagggagagaatctctttagctcattcctaatggagttgggatcacaatatggtctggtccaatctgcatcttgttgtgtcccaagaccctatctcctccccaacattcttattgcctttggctcccagtaaggaacgaattgggggccagggaggagaacaggggggatcaagaagggaaacccaattccccctttgaaagtgggttctttgaactatgtgtttgggggaagttcctctggatactaatttgaatttatatacctcatgttttgggggtttgacgtatatatatatatatatatatgcatatatatttcataatatttggaaggtttttgatgctagaaaaatggaaacaagagaaccttcaaaaatggtacttagatgggaactggaggccaatctttcataaagccagccccatagctgcttgctgttaggcctccagccattttgacattggggtggatagtcgattcacctgcctgtcagtcgattcacctgcctgtcacccagttctgtggatgtgctggtgctgagcctttgctctctttccaaatggttacagggatgttgatcagctccaccagagggagctctgatgggaggaattgctctgccatccttgtccctgtgtctcctgtcggcaggcagccattgtatctcaccagcagaccaggagactggtcccaaggttactgcaccacagggcaatttcctgccatagttaggaaggaaacacctgaactaaatggaagagacatccctgcggtgtttaatatcacacccatgccctttgtcaggttaccatgtacagagattacttggagagcctcatgccgtctctaccttcgcacactggtcaagtatctgctgagcttcttggccgcaaggatgcagaaataggctgagggtccatgggaagaaagacacaatgaggcagtaggaggtggggaagaaaagaagacagactttcaaaatggaattaggcactggggagagatcagtttccccacatcagggagaagaaggtataggtggggaagggggtggccaggagcagaaggaagaagactcaagatggaaagggagccgctgtgcctgtggcaataccacttggagaggtcgacttcataccttcaagccttttcccctgggcttttgattgtgtctgtgccccctttcttgtcctctctgcagatgcccagtaggggctacctcatcctcgtgctgttcttgtgtggctttctgggcagtagggatcttgaatttcctttctaacactgtgcccggcaaggcggggagcattcctctgccctttgtcttgtgccaacctggaaaggtgcagtctagatttcagtgagaaccctgccagctgagccctgtgcatctactaccttgacacagagtgttttcccactagaagctctgctctgctctcctggcccaagtaggggattccatgccttccctttcatggtcttagcaccagcagcctagtttctcccttccagagtctccagggatgacaaattggattggagacaaacctcgtcagatgctcatcccctaaaaggttaattgtgtatttgtggctgcgtgtgcctttgtgttttcattctcttcccatttttgtacattttggtcttctctgtggttttatacttggtcaaaagtactcgtcttggtattgcactgttgtgtgcatgagaaaactgggggaaggctcactggtacaagaaaggacccctgacccctttccttctctgtggtccccggcattagattgggggttctgggagaggcaggtgaatgtcctaagtgaattgttctgtttgtaactggaatgtttttgaagtctttggtgttgctccgtgaaaggacatcgccacctggtgctcatgaggtgtctttgcagaacaataaatggcaaatgaacaaccacaaaattgttactcttgttggccttctgctgtttgtagattagtgcacctatctgtgagggatttgggttacctccctgagtctgtaagcaaccacaagccctgccactgggtgggggaagtccctccccaaccacttaaaaacaaattttccacatattacccacccacacatttgacctggctagactttgtttgcctaaaggaacagaccacattgctgggaaaatgagtaagtgaacgtgtgggagaaaaacacttttagaatcacgaatattcacttttaaaggtctctttgcctggctgcaatatagtgtgtgtttaaattatttacaggctgttgtttctcaaataaatgtttaatattaatcattcccaaactgacaagaacacaaaaataaaatgcaaatacagagcc

SEQ ID NO: 766 - DNA, 6523 bp, Homo sapiens
gctgcgtagtcgtcgccgggctccgttgcccgcgctgttttaccttcccaacgcttgaggcggacgctggggggtcctgcgcctttccctcctgccgctggggactgcaggctaaggccatgtcccgaaagcaggcggcgaagagccggccgggcagcggcagccggaaagccgaggccgagcgcaagcgggacgagcgggcggcgcgccgggccctggccaaggagcggcggaatcggccggagtctggcggcggcggcggctgcgaggaggagttcgtcagcttcgccaaccagctgcaggccctggggctgaagctgcgggaggtgccgggggacggcaattgcttgttcagagctcttggtgatcaattggagggacactcacgaaatcatctcaagcacagacaggagacagtggactacatgataaagcagcgggaagattttgaaccctttgtagaagatgacattccttttgagaagcatgtggccagtttggcaaagcctggtacttttgctggcaatgatgcaattgtagcctttgcaagaaatcatcagttgaatgtagtgattcatcaacttaatgcccctttgtggcagattcgtggtacagagaaaagcagcgtgagggagttacacatcgcatatcggtatggagagcactacgacagtgttcggaggatcaatgacaactcagaggcacctgcacatctccagacggattttcagatgcttcatcaagatgaatcaaataaaagagaaaagatcaagacaaagggaatggactctgaagacgacctgagagatgaagtagaggatgctgtccagaaagtttgtaatgcaactggatgttcagattttaatttaatagtccagaacctggaagctgaaaattataatattgaatctgcaataattgccgtgcttcggatgaaccaagggaagagaaataatgcagaagagaatcttgagcccagtggtcgagtgctgaagcagtgtggccctttgtgggaggagggtggcagtggtgccagaatctttggaaatcagggcttaaatgaaggcaggaccgaaaacaataaggcacaggccagccctagtgaagaaaacaaagcaaataaaaaccagctcgcaaaggtcacaaacaaacagaggcgagaacagcagtggatggagaagaagaagcggcaggaggagaggcaccgccacaaagccctggagagcagaggtagccacagggacaataacagaagcgaagcagaggcgaacacgcaggtcaccttggtgaagaccttcgccgctctcaacatctgactctttggcctcttgggagttgtaagaagcggctggaaaaggattgctgtgtgctagactttccagtgaggccgtccttttataaaacgcaacacaaccaacgaagcccacacatgagctcacacactgagttagtttcgttcaagctgcctctttttttgttcgaagttttattagtgatatgttggtgttttatgaaaatgcagtgaggccattcatattctgtaatacaaaattaaaatactgagttttaggggcagatagttaggtcaggaaaaaccttttaagtggtggctttatttgccctgaaaatcagacttcagtgaccctaggatctttccttaacatttggggtgagttttgctgtaattgttcatgagtagtttagaataattgttagaaattcagaatgacaagtttccttagtttctctttcattctcaaacagatatatagggtagcttataaatgatctccaactcaggaatatgctttgatttacttctaatccaagttactcagaaaataattcaggaattgttttcccaaagttacgtgagggttgtggcctgcagtcaggatggaaattaaccgcatttctctccttcctgattctgatgttatttcagatgggatgcaggtgctgttagttcatttgcactcaagccatatgataaatgcagctgactgttaattaggcctggccttgttgggaagttgatagtggtgttgggtttttggtatttgtttcctgacagtggggagatggcatgttactgcttgtgatacagttctggaattctgatagtgtgtagagcagggtctatagttgtaacaggagacgaactcctggggttttgcctaagaggagtctaaagaattatgtttttataggagaagcctggaagaataaggtttttcatgttcgcattttaaataacgattttcttcccttctgttgtagacttagatgccttcagagagatacgtggtaacttgaccttataggtcgctaaacttagtattgtggaaattaaatcttataaaatgctacatttatttctttttatttaagccctgtttggcatttcaaagttgggaaaactccagcatctgctggaagttgttggaccagcagggttggttgacttaggttggaccagcagagaagagaacatactttggttgaggccttcgaatcactcttcagttctgaaatagacagacttgagcagtggagagacgtctttcctaaaactgagttaggtggatgtgaacttaagaactataacgtatgaggcagcccatcttggatcatctttgtcttttgggacctaatacttgggcaaataattgatgctgagttgaaaggtaaattattagttatcttccccacccctcgcatttcagaattataaaaattcggaggcaaattgaaaactaaaatgtttggtaggccctggagtcgccagattgtctttatcaccaggcctttggctttcttcagtttcactggtatcttttggttttgtttttgactttggtggctttttgtagttggagcatcagtagtctcttggaattgctcctaggacattgtggtttaggtttcttcctgggtacagtacattgtaaaatttagcagattaaaaaaagtacacagcattttttttctgtgcacgtcgcagagtcctgagcttgaggctgtgttactctactcattccaaacgaatgaaagatctctgttgccttactctaaggaagtgggatcgagtgcgttaggatctatggttgtcttggttttcaactctgggcagattcctgactggctgagtgtttctgaatgaagatgttttcctgtctgttttgtactgcttgagtgcagaggccagatcctctcagaaagataagattgtatgccagaaattcagattagcagtcagcttaagagagacttattgtcagaagtagtagaattgctttatttacttggttaatgaaggtggccttgggccctattgggttttagaagttttagaagctgctaaaaagttattaaagaatattgggaacatttattttttaaattacctaattctggtaataggcttcagcatttctggagtataataatggtggtttaaaaaactaatcaaacggctttagtaattttactactggtttcacagcttttcagttacagttggtctgtttagtgtgttaattattaggaatcgggtacatgcatccaacttcagtgataccttctagctaatggtttcaatttagacttcactgcctcagtctcactgggtacatgagaaggttggaatcaacatgcttagttgcctcagtgggcacttgaaaattccttcactggcagcccgagtggaggcccagtatgtctagtcctgggatgactgttgtcagcagctgttactctagtacaggtgctcctgtgaactctttattaggaactgaatgtgtcttaacctctgtgttacatcttggctggcagagatttatgttacatgagattgtcttggtagcttgtagtgtggtcaggagaaaggggatggagcagtggtgcatagctgcttactgctcttataaacggtatataaaggttttacggattttgaaaatatttttttttagaggtcaaaataaataccattttagtggcaacagctttgaactagagaggtagatgtattaaagcagcatagaaccataacttctagataatgtagttgccactaggagatattagaaagttagaatgtatgtgtgtatttagtttttcaataataatgaacatacactttcaggagcaaagtatggttgagaaattgtggcagaaagaattttaaatgttagtcgaagttgtctgtagtttctttattaagctctgaaaacacttccaatgccagtttgattctgagggcttgggaagtgggatctcccttgtggagcagctggagctggctgggagggagcctctccatgggtaatttattatgcctgccctgcttcccccagggagctgcttcagtgtgaaatgatgtgattgtcgggggtggggtgggaggagggccaccttcagtcggggagttgctcacatattacacaggtagcatcaggtggacttcagcgctgaactgtactagtagtgagtccctgtagtcaatgtgcaatttctctaattctgagaaactctgtagactctgcctgggttttactgggtcagcatagaatgctatcagtttacctctgtgaaatattcagtcagttgaaggaaacttggattcctagtcagaggtgactaaaagttaccctgaccaaaaggatctctgcggggggaagagaatggagcttcctgattttaatgtgttgcgtcagtggccctcttcgactcccgttttgggtagatgcgtagctcttcactttcttacctcaaggctctgtctagccatgttaaatctttagactcagtctgatgccgtttttctgttttgccattctcattattcacagctttcagaacaagtgttgctaaaactccggggcctttgacagttgttctgaggtgatttaataatggactttttataagttatgttttcctggctctaaagtaaatttttttttttttttttttgagacagagtcttgctttgttgcccaggctggagtgtggtggggcaatctcggctcactgcaacctccacctcccgggttcaagcgattctcctgcctcagcctcctgagtagctgggattacaggtgtgtgccaccatgcttggctaatttttgtatttttagtagagacggggtttcaccatgttagccaggctggtctcaaactcctgaccttgtgatctgcccgcctcagcctcccaaagtgctaggattacgggtgtgagcaaccctgcccggccagtaaattgtatttttttaatgacatcattgatttgaagatctagatggcataaattacgacgtctgccatcgcatattagaaaggggacagtcatatttgtaacgtggagagaacacggagcaccagtcaccacgtgcacttaggatgcagagcttaccgcacaccgctgatggggacctccggaaagagcggtgccttgtggttggcctggaagttctctcccaaggtgaaattcctttaaaacctcaggctctgacctatgtctttgaagcagctgctttgtagagtccctctctttactgtcctcgttaggactgttttgtggttccatgaaaatgtttagcatccttgcagaattacttgagaaggggctggtaccagtgtaaagaatctatttctgtaaaactacgaacttttgcatagggaatttattctaagcaggtcatagccgtgatccagagctgctgctgctcactgccagtccttgcggctggcggcgattgccggacagactctctgtggcctggctctcatccttggcgtgtcagcctgcggcaggctgccagccatccatgacaatcatgtgagctcagccacagacctcagctggcggtttgatccctggcaggtccctcgagcagtactggtaagaggcttcacacattttcccactcttacagttcatttttcatagtaggaagggcccttggcctccccagtgcctcttccagagcctccaccagcactaagctcagaggaaagaagaaaagggccaggagtcagacgtcacacccgggggctcccctttcccatgtagaagtgttggcatgcgtcagtctcctttacagaggggtggatgtatccgtggaggaggggccttctctctttctaattgcactatacttgttctagcttcagtctggagatacttaagacctccatggggtcgtgatccatagacttagcaagtcttgccttatctatggagctcgatggtgagaattgtgaccattgtctgatgtccatagttccttccccctagattgtttctttccacggattgtgttcatctgaaccattttattttttatttaccaaagtactgtacttggctatttgcagtgttttcaaaaccaaatgtttctttttttgtgtttttaatcttcgatacttggtgcaatagaagctgcaaagatgtgccactttatctatgaaatggagttttgtataccaataaattctagtttaaaaacaaaaaaaaaaa

SEQ ID NO: 767 - DNA, 6301 bp, Homo sapiens
aggaagtgactcaagaaacagtttgcgtgcgatgtggacaagagaggtccccgctgggtgaggaacccgggaaggcccgcccagattcgggccccctgcccttgtcccctgggctgggggcgcgggcaaagcgggggcctggcgggcgctgagaggacctgaagccggcgcgggcggcggaggcgggctgggggcagcagccatgcctacctggggggcccgccccgcgtccccagatcgctttgcggtgtctgcggaggctgagaacaaggttcgggaacagcagccccatgtggagcgcatcttcagcgtgggggtgagcgtccttccgaaggactgtccggacaacccccacatctggctgcagctggagggccccaaggaaaacgccagcagagccaaggagtacctgaagggcctctgcagcccagaactgcaggatgaaatccactacccgcccaaactgcactgcatctttctgggagcccagggcttcttccttgactgcctggcctggagcacgtcagcccatctggtgcccagggcgccaggctcactgatgatcagtggcctgactgaagcctttgtcatggctcagagccgggtagaagagctggcagagcggctgagctgggacttcacgccaggaccatcttccggagcctctcagtgtactggagtgctgagagacttctctgccctgctgcagtccccgggggatgcccatagagaggctctgttgcagttgcccctggctgtccaggaggagctgctgagtctggtgcaggaggcgtctagtgggcaggggccaggagcactggcttcttgggaggggcggagctcagccttgctgggtgctcagtgccaaggagtgagagctccccctagtgacggcagggagtccctggacactggatctatgggacccggagattgcaggggagcaaggggagacacttacgctgtggagaaggagggagggaaacagggtggtcccagggagatggattgggggtggaaggagttgcctggggaagaggcgtgggagagagaagtggccctcaggccacagtcagtgggtggaggggcaagggagtcagcacccctgaaagggaaggccctggggaaggaggagatagctctgggaggaggagggttctgtgtccaccgtgagcctcccggtgcccatggctcctgtcacagggcagctcagtcccgaggagcctccctcctccagcggctccacaatgggaatgcctctcctccgagggtgcccagccctccacctgcaccggaacccccatggcactgtggagaccggggtgactgcggagaccggggagacgtgggggacaggggagacaagcagcagggcatggcacggggtcgggggcctcaatggaaacgaggcgcccgagggggcaacttggtgactggcacacagcgtttcaaggaggccctgcaggatcctttcaccctgtgccttgccaatgtgcctggccagccagacctccgccatattgtcattgacggcagcaacgtggccatggtgcatggcctccagcactacttctccagccggggcattgccattgctgtgcagtacttctgggaccgtggtcaccgtgacataactgtctttgtgcctcagtggcgcttcagtaaggatgccaaagtcagagagagtcacttcctgcaaaagctgtattccctcagcctgctctccctcacaccctcacgagtcatggatggcaagaggatctcctcctatgatgacaggttcatggtgaagctggctgaagagacagatgggataattgtctccaatgaccagttccgggacctggcggaggagtctgagaagtggatggcaatcatcagagaacgcctgctgccctttacctttgtgggaaacctcttcatggtacctgatgacccactggggcgaaacggccccaccctggatgaatttctgaagaagccagccaggacacaggggtcttctaaggctcagcatccttccaggggctttgcagaacatggtaaacagcagcaggggagagaagaggaaaaaggtagtggtggcattcggaagacccgggaaacagagcggctccggcggcagctgctggaggtgttttggggtcaggatcacaaagtggacttcatcctgcagcgggagccatactgccgggacatcaaccaactgtctgaggccctgctcagtcttaacttttgagcctcacctgcttgagtggctgccgccctgtcagctccagccgcctccagctcagccctttctgtgagagtccctctgctgctcactctgatccagaggcaccctgagttggtgctttggatcagggaagccactttgggacaggtccataaagtgaactgatcttaccgagtcaggacctcagccagctctcaagaggttctgctcagccttaacttctcaactttgccttagcacagggtttctgtagggagtgggggctgctagaggggattagttccggagactgagactgttggctccacctccaagctgagctagggtggagggcagggtgggcaggaagtgacaggaagttaagctgttcctctccctggctgctgctctggatggccagagaacaagatgctcccttgctgagctcctgggagcgtggaaggagatgctaggccctggcacagtgttatgtggactgggccacgatagggtggagtgagctagtgaagaaggcagagggagacttggcttctggtctcagctatgcctgttttgtgaccttgattgagttgcttgggctttacttctgcctacaaatcaggggtaaaaatacctgttgggaggagaaatgagaacatagaggaaagcctcttggaggaaaggtgcttggaccaagtctcaggtgtgtctgcctgtggctgcacaggctctctaaccgaaacctcactttcagagagatgtgggtcctttgtctccaggatccacaccctagattttaacactgcattctcactataacgtgccctataatggctgcatcccttttgagcaacctccaaaatctacatttacacagtaggtaaattagggatgactgcattatcaaaatactctcagggttcctataaatggcagctctcctgttgtattcaggtgttgtttacagactaacaaatgtgttggcaaatccctggttagatgcacttcctggtgttgagatgaacacgtcgatttttcaccaatcgatgaagccatgctctgcaatgacaatattaatgtgatccgaccctaacattttctctatggaagacgtatgttgcataaagcaaggcacacttctgctttatgtgtgtgtgtatggggatgggaggacttaacggaagttgaaccagttggttctagatgaaccaattatctggaaaatgaaagaaccagagttggaaggcacttgactggccaccagaccaactctgctgttactgacatgctttcttcaccctgattcctagaggtcattgccctggatctgcttgaagtcctcctgtgccagggaatttactatctccagggtagcacattccctgtgtagacggtattaatcagtactccttactttagtgcagcctaaagtatgcttttctgttacatccacctttgaggctggtcatacctccaggaacaatacagagccagtcaacttcctggaatccaagaccagataaagaagtaggacaggtgcccctgggttctgttctgtgtgggcctgtggggagtctctagacaagatcttttccaggccctgacttctgcctccctctgagtggcacagggagttgaatactgcatggcgagtgtaatgatgatggggagggtccttgtgtcctcaccccttcctttttggtgatttacaccactgtaccatactgacccaggctgggggcaggtgtgttggagacaggctggtcaaagaggtgacaatgattaagagataacccagcggtccctgagaagagattggttagtatggcctgaactggtggctgggggaactgtgtctggtcaagttatggcagatgtcacagctttaggtaggtaaaaagggtcctagatgaaaaccttggagtttttttttttcctgatagggttgtttatacttcttgattggtttcttgccattttcactttcagtgatggtgggtgtgcagtagaccaaaagtgtcttctgcccttttgtgctaagggccctggttgactgagtggccccagtcagatgagaggcaagtcctaagcttcttatagacagggatgttgactttgttctgctgcagcctgataaactgggaccactgtgtggttagtaatgcacttgccatttggtgacacagactgaaggctatcctacacctgggccttacctcttcctctactggcatcctaatggcactctgacagcatccagggtgactacagggcccattggaaatggatcatcattctctcttctagtgtctatctttatcataacctgatgtcccaaacttgtgacaagttcttttggcaactgaaggaccaagaagggaaacggtgatgagagagactgctcattgtaactttcaaaaccccgtctttggggaagaatcatctagggtgacattccttgaagtaaatcccaggagaatctaggccaaagagatgagccaaggttagtgagacaatttatttttattgcctaaactgcagagcattctctacacagcgtaaaggagaagtggggcagctgcaggacatgtagagaaaccaaactgggaaatcttacaaggagttgaaaagattaatgtcccaacctgatgagattacggccttgagacaataaggtggagcaacagaacaatgggaaagaggactgggagaggaatctaagaaccagatggcttcagctctctagaggagctgagcctattcacagtgcctaacctggaagcctgtgaggaacaggcctcaggcccttgccacgacctacttaggctacaatttcctttaaggcagcccctagctctgggaaggaatactggtagccagtggccagtgttcgctgtgggatcaccttctggccctccagcagcatgatggcacgctgtcgcccaaagacagcttgcaccacagcgctggggagagggatgaaggctcggcggcccagggcagcacccaaggtctgggcaaactcagcattagtggcggaggatggagccactccattcaggaccccgtgcacgtggtttgcttcaagggcatgggtcaggattcctgccaggtccccgatgtgtatccaggggaagaattggtggcctgagccgatggggccccccaggcccaggcgaaagggcagcagcatgtggcccatggcaccacccccacggcccagcacaacccctagagcaggaaagagggaaggtacaggggtcctctcagccttgaaggagcccactgctcctcctggtttctgtttccccttcctcactctccccatgctgacttggctctgtaacagaagtgagcagtatggctgtctttaagacctcacaccttctcatctgcaggttggctagaagtggtggcatcctctcactctgtaattgtaatctcagctctcctaatcccatcacttccccagcccagagaagacattccaaccctgtctgatacccaggcccgtttctcacctgagcgcaccaccacctggcgtgtagaatctccaggaagcctggctgcagcttcccatttggttacgaggttggagaaaaagtcaaagtcccctcctgggctgtcttcatcatactccgcagtcagactgggctggtagtaagctgccggtggaacacaatcatttgccctgggtgtccttggtcctgcctggctctctgtagtggaggctccccttggcctcaccttctctggcccttaggatctccccatttggagacagagccatttggatattttccccttgaacttctccatgacctgaagcgttccttccctggaggaactctggttgcagggctaaacttagaggctgctagagtgtagtggttaagaacaggaacttgggtaccaggcgcctgaattttaatcagctccctcatttattaactctctgacttgatgcaagttacttaacctctctgtatagaattttcacatctttaaaatgggaataatagtacctacctcatagggttgttgtaaggaataaatgataataagcataaaacacttcaaaaaaaa

SEQ ID NO: 768 - DNA, 10802 bp, Homo sapiens
ggaggaggccaacatggcggcgcgcagggctgggccgggccgcagccgcgcctgagcgcctcaccgcactagctcggctcgcaggacccaagcccgcacccagcctggcccggctgctgcggagcacccggggcaggaacgcaggggccaacctgggcgcggaggcggcgcggagggtgcgccgcgcggcccgccaggcccgggacccgtagcttcgccgtgcgctggccggggcggccaggaggcccaagccatggaatcggaggaggagcagcacatgaccacgctgctgtgcatgggcttctcagaccccgccaccatccgcaaggccctgcgcctggccaagaacgacattaacgaggccgtggcactgctcaccaacgagcggccgggcctcgactacggcggctacgagcccatggacagcggcggtggccccagccccgggcccggcgggggcccgcggggcgacggcggaggtgacggcggcggcggcggcccctcccgcggcgggagcaccggaggcgggggcggcttcgaccccccgcccgcctaccacgaggtggtggacgcggagaagaatgatgagaatggaaactgctcaggggaaggaattgaattccctacaacaaatttatatgaactggaaagccgtgttttgactgatcattggtccatcccttacaagcgagaagaatcactaggcaaatgcctgttggcatctacctacctagcaagacttggtctttccgagtctgatgagaattgtagaaggtttatggacaggtgtatgcctgaagcatttaaaaagctcctgacatcaagtgctgttcacaagtggggtactgaaattcatgaaggaatttacaacatgttgatgctattaatagaactggtcgcagagagaataaaacaagatccaattcccactggtctcctgggtgtgcttacaatggctttcaatcctgataatgaataccattttaaaaacagaatgaaagtgtctcaaaggaattgggcagaagtgtttggagagggaaatatgtttgctgtttcacctgtatcgactttccaaaaggagcctcatggatgggttgtggatttggtaaataagtttggagaattaggtggatttgcagcaatccaagccaagctccattcagaagatatagaacttggggctgtctcagcactgattcagcccttaggagtgtgtgcagagtacctcaattcctccgtggtacagcccatgctagacccagtcattcttactacaatccaggatgtacggagtgtagaagagaaagacctcaaagacaagagattggttagcatccctgagctcttgtctgccgttaagttactttgcatgcgcttccaaccggatctggtgacaattgtggatgaccttcgactagatattctattgcgcatgctgaaatcaccacatttcagtgctaagatgaattctctcaaagaagtaaccaaactaatagaagatagcactttatccaaatctgtgaagaatgctatagatacagacagattattagattggctagttgaaaactcagttctgtcgattgcactggaaggcaacatagaccaagcacaatactgtgaccgtataaagggaattattgaactcttgggtagtaaattgtcgttagatgaactcactaaaatttggaagatacagtcaggacaatcatctactgtgattgagaacattcatactattattgctgcagcggctgtgaaatttaattcagatcagcttaatcatttgtttgttctcattcagaagagctgggagactgagagtgatagagtaagacagaagcttttgagcctgattggacgaataggccgggaagctcgctttgagaccacttctggaaaggttttagacgtactctgggaactggctcaccttccaaccctgcccagtagccttattcagcaggccttggaggagcacctgacaatccttagtgatgcatatgcagtgaaagaagcaatcaagaggagctacatcatcaagtgcatagaagatattaagaggcctggagaatggtcaggtttggaaaaaaacaagaaggatggattcaagtcatctcagcttaataatccccagtttgtatgggtggtaccagctttgcgtcagctccatgaaattactcgctcattcataaaacaaacctatcaaaagcaagacaagagcattattcaagacttgaagaagaattttgaaatagtgaaattggtaacgggaagtttgatcgcttgtcatcggcttgcagctgctgtggccgggcctggaggcttaagtggctcgacactagtggatggccggtacacttaccgggagtatttagaggcacatctaaaatttctagcgtttttcttgcaagaagctactctgtatctgggctggaatcgtgccaaggagatctgggagtgtcttgtaactggccaggatgtttgtgaattagatagagagatgtgttttgaatggtttacaaaaggacagcatgatcttgagagtgatgttcagcagcagctcttcaaggagaaaattcttaaattggagtcatatgaaatcactatgaatggttttaacttatttaaaactttttttgaaaatgtgaatctttgtgatcatcgattgaaaagacaaggagctcagttgtatgtagaaaagctggaattgataggaatggatttcatttggaaaatagccatggaatcacctgatgaagaaattgctaatgaagctattcagctaatcataaactatagttacattaatctaaatcctagattaaagaaggattcagtatctttacataagaaattcattgctgattgctacacaagattagaagcagccagttcagcacttggtggccccactctaacacatgctgtgaccagagcaacaaaaatgcttacagcaactgccatgccaactgtagcaacctcagttcagtctccttatagatctactaaacttgtaataattgagagattgctgcttctggcagagcgctatgtgatcactatagaggatttttactctgttccacgaactattctacctcatggtgcctcatttcatggacatcttttaacccttaatgttacctatgagtctaccaaagataccttcactgtcgaggctcacagtaatgaaaccatagggagtgtccggtggaaaatagccaagcagttgtgctctcctgtggataatatacagatatttacaaatgatagcctgctgacagtgaataaagatcaaaagctactccaccaactgggcttttctgatgaacaaatccttacagtgaagacttctggcagtgggaccccatctgggagttcagcagattcttcaaccagctccagcagcagcagcagtggggtttttagttcttcatatgccatggagcaggagaaatccctccctggtgtagtgatggctctcgtatgtaacgtatttgacatgctttatcagctcgccaatctggaagagccaaggataactctacgagtacggaagcttctgctcttgatacccactgatccagccattcaggaagcccttgatcaacttgattctttaggaagaaagaaaacattgctgtctgaatcaagttctcagtcctcaaaatctccatccctgtcatcaaagcaacagcaccagccaagtgccagttcaattttagaaagtctgtttcgatcttttgccccgggaatgtctaccttcagagtgctctacaacttagaagttctaagctccaaactcatgccaacagctgatgatgacatggccagaagctgtgccaaatccttctgtgaaaacttcctcaaagctggcggtttgagtttggttgtaaatgtcatgcagagagactccatcccatcagaagtagactatgaaacaaggcagggtgtttattccatctgtctacagcttgcaagatttttacttgtcggacaaacaatgcccacgttattagatgaagacctcaccaaagatggtatagaagcactttcttcccgcccattccgaaatgtcagccggcagacaagcagacagatgtccttatgtggtaccccagaaaagtcatcctaccgacagttgtccgtgtctgataggtcttctattagggttgaggaaatcatccctgctgctcgagttgcaatacaaacaatggaagtaagtgatttcacttctactgtggcttgcttcatgagattgtcatgggctgcggctgcaggacggcttgatcttgttgggagtagccagccaattaaagaaagtaattccctgtgtcctgctggaattcgaaacagactcagcagttcaggaagcaattgcagctctggaagtgaaggagaaccagtagccctgcatgcgggaatctgtgttcgacaacagtctgtatccaccaaagactcgctgattgcgggagaggctttgtctcttcttgttacgtgcctacagcttcggagccagcaactggcatctttctataacttgccctgtgttgctgatttcatcattgatattctgctcggatcaccaagtgctgagattcgccgggttgcctgtgatcagctgtacactcttagtcagacagacacatcagcgcatccagatgtgcagaagccaaatcagtttcttctaggcgtaatcctcacggctcagctgcctctctggtctccaactagtattatgagaggagtcaatcagagactgttatctcagtgtatggagtattttgatttgagatgccagttattagatgatctgacaacttcagaaatggagcagttaaggatcagcccagctacgatgcttgaagatgagattacttggctggataactttgaacctaatcgtacagctgaatgtgagaccagtgaagcggacaacatcttactggcagggcacttacgcctcatcaagacccttctttcactctgtggggcagaaaaggaaatgcttggttcatcactcattaaaccattgttagatgacttccttttccgagcttctagaattattttaaatagtcattctccagctggcagtgccgccatcagtcaacaggactttcatccaaagtgtagtacagcgaatagccgattggcagcctatgaagtccttgtgatgttggctgatagttcaccttcaaatcttcaaattattataaaagaactgctttctatgcatcaccagcctgaccctgctcttaccaaggagtttgattaccttcccccagtggatagcaggtccagttcagggtttgtggggctgagaaatggtggtgcaacttgttatatgaatgcagtcttccagcagctgtatatgcaacctgggctccctgagtcattactttcagtggatgatgacacagacaatccagatgatagcgtgttttaccaagtgcagtctctctttggacatttaatggaaagcaagctgcagtactatgtacctgagaatttttggaagattttcaagatgtggaataaagaactttatgtgagagaacagcaggatgcatatgaattctttactagtctcattgatcagatggatgaatacctcaagaaaatggggagagaccaaatttttaagaatacatttcagggcatctactctgatcagaagatctgtaaagactgtcctcacagatatgagcgtgaagaagctttcatggctctcaatctaggagtgacttcttgtcagagtttggaaatttctttggaccaatttgttagaggagaagttctagaaggaagtaatgcgtactactgtgaaaagtgtaaagaaaagagaataacagtgaaaaggacctgtattaaatctttacctagcgtcttggtaattcacctaatgagatttgggtttgactgggaaagcggacgctccattaaatatgatgaacaaataaggtttccctggatgctaaacatggagccttacacagtttcaggaatggctcgccaagattcttcttctgaagttggggaaaatgggcgaagtgtggatcagggcggtggaggatccccacgaaaaaaggttgccctcacagaaaactatgaacttgtcggtgtcatcgtacacagtgggcaggcacacgcaggccactactattccttcattaaggacaggcgagggtgtggaaaaggaaagtggtataaatttaatgacacagttatagaagaatttgacctaaatgacgagaccctggagtatgaatgctttggaggagaatatagaccaaaagtttatgatcaaacaaacccatacactgatgtgcgccgaagatactggaatgcctatatgcttttctaccaaagggtgtctgatcagaactccccagtattaccaaagaaaagtcgagtcagcgttgtacggcaggaagctgaggatctctctctgtcagctccatcttcaccagaaatttcacctcagtcatcccctcggccccataggccgaacaatgaccggctgtctattcttaccaagctggttaaaaaaggcgagaagaaaggactgtttgtggagaaaatgcctgctcgaatataccagatggtgagagatgagaacctcaagtttatgaagaatagagatgtatacagtagtgattatttcagttttgttttgtctttagcttcattgaatgctactaaattaaagcatccatattatccttgcatggcaaaggtgagcttacagcttgctattcaattcctttttcaaacttatctacggacaaagaagaaactcagggttgatactgaagaatggattgctaccattgaagcattgctttcaaaaagttttgatgcttgtcagtggttagttgaatattttattagttctgaaggacgagaattgataaagattttcttactggagtgcaatgtgagagaagtacgagttgctgtggccaccattctggagaaaaccctagacagtgccttgttttatcaggataagttaaaaagccttcatcagttactggaggtactacttgctctgttggacaaagacgtcccagaaaattgtaaaaactgtgctcagtactttttcctgttcaacacttttgtacaaaagcaaggaattagggctggagatcttcttctgaggcattcagctctgcggcacatgatcagcttcctcctaggggccagtcggcaaaacaatcagatacgtcgatggagttcagcacaagcacgagaatttgggaatcttcacaatacagtggcgttacttgttttgcattcagatgtctcatcccaaaggaatgttgctcctggcatatttaagcaacgaccacccattagcattgctccctcaagccctctgttgcccctccatgaggaggtagaagccttgttgttcatgtctgaagggaaaccttacctgttagaggtaatgtttgctttgcgggagctgacaggctcgctcttggcactcattgagatggtagtgtactgctgtttctgtaatgagcatttttccttcacaatgctgcatttcattaagaaccaactagaaacggctccacctcatgagttaaagaatacgttccaactacttcatgaaatattggttattgaagatcctatacaagtagagcgagtcaaatttgtgtttgagacagaaaatggattactagctttgatgcaccacagtaatcatgtggacagtagtcgctgctaccagtgtgtcaaatttcttgtcactcttgctcaaaagtgtcctgcagctaaggagtacttcaaggagaattcccaccactggagctgggctgtgcagtggctacagaagaagatgtcagaacattactggacaccacagagtaatgtctctaatgaaacatcaactggaaaaacctttcagcgaaccatttcagctcaggacacgttagcgtatgccacagctttgttgaatgaaaaagagcaatcaggaagcagtaatgggtcggagagtagtcctgccaatgagaacggagacaggcatctacagcagggttcagaatctcccatgatgattggtgagttgagaagtgaccttgatgatgttgatccctagaggaacatgcccagcctgagaggagtcaagacacaatactggatgctcagcaccttcttggaatcagaatctcgaaccctttggaagagcctggagattggactgggaaagctgctgtgacttgggcggatcgtgtatttctcaaggaaagcatttttaagccactagaaggtttgggagctgtttggcagtgggagaactccggcatgtggatcagctgtcccgggagcgtggtctatatgtggattcacatttctgtggagattttcggaaatagagccagtggcagacttttttgttacacgaacatacaagagtgagcataaagctgttgctttctctacgatgctacaaaagaaattcctttggtttttatattttaagaaaaagcaagctgcttttagatatgtgggggcaaatttttaatcttgcagtaatattaaacaggaatatccaatttaaaatgatgtaaagatgtaataaaattccttttcattgtaaaatagtaattaagtcaatttacacagacctttgtatttaatatgtctccctatttgtatagaatttcagatgggtctagatgagaaccctatgcataagcttggatcttgatgaaaggttaccaggatcaggatcaaaaattgggaaatactaagctcttgaagatatttttctgatataattagattgaaaagagcaattttgaaaatgctgtgttctccagaagtacagggtgcattatttgacatcaattacttaaagaagttatgagttgttccccaaacagattttaaaaacagcaaaataaaagcactttaagatataattttactgagtttaacttcacagaattatctttttaatgcttggagacatattgaataaactgtagtcttaaatcatgtgatctgcaatcgtttgcttttgcttaaaacataattactgaaacccttggtattggttgtatatgaagttaactatttgagttggtacacactgcttgtgagtttcatagttattgtaatgcagagaaggaatttgagaatttgtttctcctcaacatgactaattaacactgaaaagtcagtcaaggtttaagatttattttcccagaaataaatataaagcaattgaataaccatccatttagtcgtatttccaaagtatagcaccattcactcatttataccagctcccttttatggtgtgggggagaggtttacacccacatatttcatatatattttgtacattttgtattttgaattgctcacattttcggccctgttttgcctttagttacaggtcctgccttattttcatctcaccatgcacagaactagggagccttaggaagtgccaggttttcactgtcagatttgccaagtcacagaggcgcagccagccctgaagtgcctgtctggctgctgtggcattgtgtgggcatgtggccaggcagatggcatctcattactgtgctctcgccatggcccagtcttttcattctctggcagtgagggtttctgtgctgtcagacttcattgttattctgtgacttgctggaggttggcagtggcctttgtcaaacacactgagaagatggaagggccagcacttaagagcagaactgtacccttagagaaacggacagaggcgagtggcaaacttcagacggttccaatggtcttgcagtttgaaatgtgatgttctaccattggttttgagtacgtgaatacttcctgtcctactgtttcccctaccctattctcaccttctctccgcccacatcctcaccaagagattgtgtgggacatgaccttgaaatgctggcgatgatccacactgggatatcatcgctggcgactgcactctcaggagcccaaaatcaggagtgaaattgccacttctagtccccttatttcctatggaaacaacgccttccgcacccctagcacctgccgtcctcactgtaaagcttcatcaggatcgtccaccgtgtatattatacgcttcagatcatgttgcttatattgttgctgcaatgaccatcgttttcactttgctggtaaccacttgattgctgacagctacagtcaatgaacctgctgatgactttttttaatgtagtacaacagtgacagttatgacaggcttaccttggaagagttgtcatttttactgccaattttttggatgaagatgtttttataaacctttcaaaatggtctgcaaacagagcaggaattgcacaattaactcaataatgctgtgtgttctcaagaagctcccttagtgaggccgatcttaagatggccgattctgcccgttgaaggcatcctgggaaagaaaacaagcatcccagcgggcatctcaccacgacttctcctggagtcctcacacggtcactgacaactacagtcagttttaggaactagagtgccgtatcatcagacttaccctgtcctgccccaccttccctgctaacatcgaggtgtgtgcagttaccttctgagcttggaacaagcagactggaattttcctctgctacctcttgtgtataaaatcttgtttataaaatttcaaaaggaagtagatacactagggaagaaccttaattctaaatttggttcatgtgtggcaaagttcttagcttctaagagtataaaataaatttttcaaaaacaga

SEQ ID NO: 769 - DNA, 4718 bp, Homo sapiens
atgcctccggccggcggcccccgagcgccgcgtcccgccgcgctgccccgcagcctgtcccgcctgcgcgagtgcccgggccgctcccgcatcgtgctggcgctcggggccacgcagatggcgctcggatgcctcatcgtggcagtcagcttcgccgcgctggcgctcaccacctcggcccgcgtccgccactcctgccccttctgggcaggcttctcggtgctgctgtcgggactcataggtgtcgtctcctggaagaggcctctctcccttgtgataacctttttcatgctgctttctgcagtgtgtgtaatgctgaatttggctggttcaattctctcttgtcagaatgctcagctagtcaactccctagaaggctgccagttgattaagtttgacagtgtggaggtgtgtgtctgctgtgagctgcagcaccagtcgtccggctgcagcaacctcggggagacgctgaagctgaacccgctgcaggagaactgcaacgctgtgaggctgaccttgaaggatctcctcttcagcgtgtgtgccctcaacgtcctgtccactatcgtgtgtgcgctggccacagccatgtgctgtatgcagatggtctcctccgatgtcctgcagatgttccttccgcagaggtcacatcctgccaaccccacctgcgtgactcctcacggcaccgttctccaccagaccctggatttcgacgagttcatccccccactcccgcctccaccctattaccccccagagtacacctgcacaccgtccactgaggcccagaggggcctccacctggactttgctccgtctccattcggcactttgtatgacgtggccatcaatagccccggcctgctctatcctgctgagctcccccctccgtacgaggcggtggtgggccagccccctgccagccaggttacaagtataggtcagcaggtggccgagtccagctccggggacccaaacaccagtgctggcttcagcactccagtaccagctgacagcacaagcctcctggtgtccgagggcactgctacgccaggttccagcccatcccccgatggccctgtgggcgccccagcaccctccgaacctgcccttccccctggccatgtgtctccagaggatcctggcatgggctcacaggtgcagccaggtcccgggcgtgtgtcccgctccaccagcgaccccaccttgtgcacatctagcatggcaggcgatgcctcttcacacaggccgtcgtgtagccaggacctggaagcgggactgtctgaggctgtgcctgggagcgcttccatgtctcgctctgccacggctgcctgtcgggcccagctttcaccagcgggggacccagatacctggaaaactgaccaacggccaacaccagagcccttcccagcgacctccaaagagcggccacgctctttagtggacagcaaggcctatgcggatgccagggttttggtggccaagtttttggaacactcacactgtgccctccccaccgaggcacagcacatggtgggtgccatgcgcttggctgtcaccaacgaggagcgcctcgaggaggaggccgtcttcggcgctgacgttctggaccaggtatgaaggagccacatttctgaccgtggacaccaacgcctggcgccacagatgttcttggcagaagccatcatgcctgacaaagaggccttcaggcccagcttggcggaggataaatgtgggggggacacccaggatgatctgggggcggtgtgggcagggaactgttaccccctctctcgaggggagccgagcagtgtctctttggggattgcatttcctgcctagcccagtaattcggaaagatgactttcacgtccacagtgaactctctggttttatctggcgtgcagcaccttgaactgagcagtgttgcacaaatgtgaatacagcaacaggcgacacttacgtcacctaaagactcaaagtatctccaaaatcagggccttccaaagcaggagtctcccatcccccatttaacttagtgttcagtggacagagggtgacatcgagtcatgaaacattttctcatgtggctcgatggctctatcattaggcgttcatcacgctctggcctatttcctgtgaaaggaaataggtagtgttagcacagatggcagcctgggcccaactttctgtccacagggctattgtgcaaacaaatgtgcagtgcgggcctctgccatagcccggccccccccagggaacaggccggtgttgcgggggttggaggaacccaccatctcctgggccttgagctcggcctccctccgtggggtgccttccccccctcctcttgggccccctttctccaggctcccatcctgtccctggagcagttgtgtgatccgtaacaacaagtgccgattcccagctcctttgtgtctgagctcacttgattgagctcagcgggtcacagttctgcaggagagaggccggtttctctgagaagtagcccctcctgataaagcaggtccctttgacccagagctgacctttccccgggcatgcggcagcagacacacctgcgcaggaggatcataaaccacttacaaacccacacgagaagggaagcagacacccaacgtgctgcttatggagaagcagacacgcccagcttggggacagcctggggaccttggactttcttagcccccatccccttgttttctggtggcatcagtggcagctgctcccaacaatggccgtggaacagcgccatccacgagaactttgtgcagtgatggaaatgcctgttcagggccactagcagccacagcccctgagctgcgttgggtgggccctgcggtgaacaaaacagcctagaggccaaggtctccccagagagcccatgagcctggcatgggggcgcagggggaccagagggtgtcttccactcctgggtgccagggcagggggctcacgctgctgttccctcggctttgtggggcttgtccttgagctcccccaattccctaatgccactgtggccagtgtgctggggagcttctgtgtggctggaagctgggaagggggtgaggttccaatccaggtgcccagagccttcctccagtcctttatccctgccctgggggctgcggtgtgggactccttcagctgtggtcggctgaaaaggcttcgattgctttagagagctgaaaacacataagccaggccttttgatgacaacctgcacttttgcaggagagacgtactagagatgaatttttgagcactttattcagactataaaacaggaaatctctaattttcctcaagtgggggcttttgaattccctcaaggcaagtccctttgcaggtgaaattaattggtggattttcagaatggccgccctggagccgagcttcagccacgcctgacgccctggcctctgaatctccactgtctctgaggtgcgctggggccacgccgcaggggtttcacctgcttgggggggtccacactagggcttgggggttcacacagcattgtccctgggctgagcccttgggtgggctagagctgcagtcctcagacatggctgcaattccagcgaggccaagaccaccagccacccagtggactcggtctctggggtgttctcctcatgcagccggggcagaggcctactggaccccctcagcctgctgctcagcatccttcccttctctgcagcagggcccggtcccaatggccaatggggctgctgccccagcagtgcctccctgtaggcccctcacctgcaccccaccttcacccagctctgggtttgcgctggtggcagctctgttttgtggatacggaaactgtacccaacttgatgccgctgggctggaaccttctgccccttcgaaatgaggcagtcagggacggggtggggtgcccccatcagccccgctgctcagggccactcatggactctaggagggtccaggttctgggcttcctgggaaggtccccagaagagagaggtgctggtagactagggaatgtgctggcaacttgacccagaagctgtggtccccttggccccggctccacggcatccgggtaccagcagcaagagcccaggccccgggctgcacgtcagctcacagcccaggagaaagctggctgcttcccctccctatgcgtctttcccccgctccaatcatgttccatctgggatctgaaatgggccaactgtggctgctttgggggtgacacgctccttctccaactcagctgggccccgggcatcccctgccctcccctgagacccaaagggggttggcacctgctgtgacaccaccgttgaccccagcctgggggccacaaggttgctgagtggggagaacatggaccccaactctatggcaagcaagatcgcagaagggggagcatcatccgcaaggacttcaggtctcccttggctggagatgaggatccacattaaatgcttgtaacacaccaggccacagaaagctcgctacacacacatgcttctccccacccatgctgactctcagaggctgctaaggcagaatttataggaaattgttttcaagccaccagagacctgtctgtacaactggaaaggctgtatttatttaatgtacctcaaggtgttttaataatgatccgtgttttaataaaaagaagtatttctggccaaaaaaaaaaa

SEQ ID NO: 770 - DNA, 2721 bp, Homo sapiens
gcgcacttccgggtgttgtctggccgccgtagcgcgtcttgggtctcccggctgccgctgctgccgccgccgcctcgggtcgtggagccaggagcgacgtcaccgccatggcaggcatcaaagctttgattagtttgtcctttggaggagcaatcggactgatgtttttgatgcttggatgtgcccttccaatatacaacaaatactggcccctctttgttctatttttttacatcctttcacctattccatactgcatagcaagaagattagtggatgatacagatgctatgagtaacgcttgtaaggaacttgccatctttcttacaacgggcattgtcgtgtcagcttttggactccctattgtatttgccagagcacatctgattgagtggggagcttgtgcacttgttctcacaggaaacacagtcatctttgcaactatactaggctttttcttggtctttggaagcaatgacgacttcagctggcagcagtggtgaaaagaaattactgaactattgtcaaatggacttcctgtcatttgttggccattcacgcacacaggagatggggcagttaatgctgaatggtatagcaagcctcttgggggtattttaggtgctcccttctcacttttattgtaagcatactattttcacagagacttgctgaaggattaaaaggattttctcttttggaaaagcttgactgatttcacacttatctatagtatgctttttgtggtgtcctgctgaatttaaatatttatgtgtttttcctgttaggttgattttttttggaatcaatatgcaatgttaaacacttttttaatgtaatcatttgcattggttaggaattcagaattccgccggctctattactggtcaagtacatcttttctcttaaaattatttagcctccattattacaaaaaattataaaaataagttttcagtcagtcaggatgacatcactcccaatgttatgcagacatacagacggttggcatacgttatagactgtatactcagtgcaaatatagctgcatttatacctcagaggggccaagtgttaatgcccatgccctccgttaagggttgttggttttactggtagacagatgttttgtggattgaaaattattttatggaattgctacagaggagtgcttttcttctcaattgttagaagaatttatgttaaactttaaggtaagggtgtaaaaacatttttgagataaggtttttatttatgtttattattgttagagtgagttgcaatgtgggaagaaatgacattgaaattccagtttttgaatcctgtttctatttataagtgaaatttgtgatctcctatcaacctttcatgttttaccctgttaaaatggacatacatggaaccactactgatgagggacagttgtatgtttgcatcatatatgccagaaaaccttcctctgcttcctccttttgacttatttggtatgttgtatatattacataaaataacttttcaaatatagtttaataacacttagaagtgtttacttacctggaaaataattgctatgccgtacattcagagtgccccctcccctgcaaggccttgccatgattaacaagtaacttgttagtcttacagataattcatgcattaacagtttaagatttagaccatggtaatagtagttcttattctctaaggttatatcatatgtaatttaaaagtatttttaagacaagtttcctgtatacctctgaactgttttgattttgagttcatcatgatagatctgctgtttccttataaaaggcatttgttgtgtgagttaatgcaaagtagccaagtccagctatatagcagcttcagaaacatacctgaccaaaaaattcccagtaaccaggcatgatcaatttatagtggtcgtttacatctaataattatcaggacttttttcaggagtgggttataaaaacattcaagttggtctgacagtattttgttaaggatatttgtttgtatgtttattcagtatacttacataaaaattatttcgccatcagccaaaactcagtaatcatgacagctgtctgttgttttatgaagtttatttctcaagaaaatgggaataaatttgggatttgttcagcttttttactaaagatgcctaaagccacaggttttattgcctaacttaagccatgacttttagatatgagatgacgggaagcaggacgaaatatcggcgtgtggctggagccttcccactggaggctgaaagtggcttgtggtattataatgttcagatttcaagaggaaggtgcaggtacacatgagttagagagctggtgagacagttgggaactctttgtgcttgtgatctactggacttttttttgcaggaagtgcattctctggtccttccctattttctgttctggatgtcagtgcagtgcactgctactgttttatccacttggccacagactttttctaacagctgcgtattatttctatatactaattgcattggcagcattgtgtctttgaccttgtatactagcttgacatagtgctgtctctgatttctaggctagttacttgagatatgaattttccatagaatatgcactgatacaacattaccattcttctatggaaagaaaacttttgatgatgaaacaataaagattttaaatatctattttaaaaaaaaaa

SEQ ID NO: 771 - DNA, 9675 bp, Homo sapiens
actcggctcaaacatggctgcgctgagagctctattgctttgggcgccgggagcaggaggtactccgcgaatgagaacattgagaatgtgttcggcataactcatttctttgtatctccctgcactctgtgctgggaaaatgaatcatccatttggaaaagaggaagctgcttcgcagaagcagctttttggatttttctgcgaatgcctgcggaggggagaatgggagctggcacaggcatgtgtacctcagctacaggagggacaaggggatatcccaaagagggtagaagacatacttcaggcattggtggtgtgtccaaatctgctgagatgtgggcaggacatcaaccctcaaagagtagcctgggtctggcttcttgtactggagaaatggttggcccgggaaaagaagttactcccagttgttttccggagaaagcttgagtttcttttattgtcagaagacctccaaggtgacattccagagaacatcctcgaggagctgtatgagaccttaacacagggtgcagtaggccacgtgcctgacggaaatccaaggagggagagctggactcctcgtctcagctccgaagctgtctctgtgctctgggatctcctgaggcagtctccccagccagcacaggccctgctggagctcctgcttgaggaggatgacggtactggcctctgtcactggcctctgcagaatgcactggtggacctcattcgaaaggcattgcgggctttgcagggccctgattcggtgccccctggggtagtcgatgccatctatggagccctgcggactctgcgttgccccgcagaaccacttggggttgagttgcatctcctgtgtgaggaactactagaggcctgcaggaccgaggggagtcccctgcgggaggagcggctgctcagctgcctgctgcacaaggccagccggggcctgctgtccctgtatggccatacctatgcagagaaggtcacagaaaagccaccgagggctacagcctcgggaaaagtctcaccggatcatctagatcctgagcgggcaatgctagccctgttctccaatcccaacccagccgaggcttggaaagtggcctatttctactgcctgagcaacaacaaacacttcctcgagcagattctggtaacagcactaacattgttgaaagaagaagacttcccaaatcttggctgcctacttgatagagaattcaggcccctcagttgcctgcttgtactcctgggctggacacactgccagagcctagagtcagccaagaggctgctccagaccctgcacaggacccagggcccaggctgtgatgagctcctcagggatgcctgtgatgggttgtgggctcacctggaggtcctggagtggtgcatacagcagagcagcaaccccataccaaagagagatctgttgtatcatttacacggtggagacagccactcagtgctctacactctccatcaccttacaaaccttccagccctcagggaggaagatgttctcaagctcttacagaaagtgccagccaaggacccccagcaagagcctgatgcagttgatgctccagtccctgagcacctgagccagtgtcagaacctgacactctaccagggcttctgtgccatgaagtatgccatctatgccctctgtgtaaactcacaccagcactcccagtgccaggactgcaaagacagcctctctgaggacctggcctcagctacagagccagcgaatgactctctctcctccccaggtgctgcaaatctcttctcaacttacctggccaggtgtcaacagtatctgtgcagtattcctgactctctgtgcctggagcttctggaaaacatcttctcattgcttctcatcacctctgctgatcttcacccagagcctcacttgcctgaggactatgctgaggatgatgacattgaggggaagagcccctcaggtttgaggtccccatcagagagccctcagcacatagcacatcctgaaaggaagtcagaacggggttccctgggagtcccaaagacccttgcttatacaatgccaagccatgtgaaggcagagccaaaagacagttacccagggcctcataggcacagctttttggacttaaaacactttactagtggtatcagtggatttctggctgatgaatttgcaataggggccttcctcaggcttctccaagagcaactggatgagatcagtagccgcagcccccctgagaagccaaagcaagaaagtcagagctgctcaggaagcagagatggactgcagagccgcctgcatcgactttccaaggttgtctctgaggcccagtggagacacaaggtggtgacaagcaaccatcgttcagaggagcaaccttcccgaagataccagcctgccacacgtcaccccagtctccgccggggtcgtcggacaagaaggagccaggcagatggccgagacagaggttcaaacccatccctggaaagtacaagtagtgagctgagcacaagtacgtcagagggaagtctgagtgccatgtctggccggaatgagctgcacagtagattgcacccccatcctcaaagttcactcatccccatgatgttctccccacctgagtcactgctggcatcctgcatccttcgcgggaacttcgcagaagcccatcaggtgctgttcacgttcaacctgaagtcctcacccagttcaggggaactgatgttcatggagcgctaccaggaagtgatccaagaactggcccaagtagagcacaagattgaaaaccagaactcagatgcgggtagcagcaccattcggagaactggcagtggccgctcaactctacaggccattggcagcgctgcagcagcaggaatggtgttttactctatctctgacgtgactgacaagctgctcaacacctctggagaccccatccccatgctccaggaggacttttggataagcacggctctagtggagcccactgctcccctgagagaggttctggaagacctcagtccccctgccatggctgcatttgacctagcttgctctcagtgccagctctggaaaacctgcaagcagcttttggagacagccgaacggcgtttgaatagtagccttgaaaggcggggtcgacggatagaccacgtactcctaaatgctgatggcattcgaggttttccagttgttcttcagcaaatcagtaagagtctcaattatctgcttatgtcagccagtcaaaccaaatcagagagtgtggaagaaaagggaggaggccctccacggtgcagcatcactgaactgcttcagatgtgctggcccagcctaagcgaggactgtgttgccagccacaccaccctctcccagcagctagatcaggtccttcagtcactgagagaggcactagagctgccagagcccaggactcctccactgtcttccctggtggagcaggcagcccagaaagctccagaggcagaggcccaccctgtgcagatccagactcagctcctccagaagaacctgggcaaacagaccccatcaggcagcaggcagatggactacttgggcaccttcttcagttactgcagcacccttgctgcagttctccttcaaagtttgagctctgagcctgatcatgtggaggtcaaggtaggaaatccctttgttctgctgcaacagagctcttcccaactggtgtcacatctcctgtttgagagacaagttcccccagagagactggcagcccttctggcccaagagaatctcagcctaagtgtgccacaggtcatcgtcagctgctgctgtgagccccttgctctttgctcatcccggcaaagccagcagacctcctccctcctgactcgtctgggtactctggcccagctacacgcctctcactgcctggatgacctcccactttctacaccgagctccccgaggacaactgagaaccctacattggaaagaaagccctactcctccccaagggactcatcactcccagccctcacctcctctgccttggcctttcttaagtcacgctcaaagctcctagctacggtggcctgcctgggggcttccccgaggttaaaggtcagcaaacccagcttgtcatggaaggaacttcgtggccgcagggaggtgcctctggctgcagagcaggtagcccgggagtgtgagcgccttctggaacaattccctctgtttgaggccttcctcctggctgcctgggagcccctgcgagggtctttgcagcaggggcagagtctggcagtgaatctctgtggttgggccagtctttctaccgttctcctgggcctacattctcccattgccctagatgtactgagtgaggcttttgaggaatccttggtggccagagattggtcccgggcccttcagctcactgaagtgtacgggcgagatgtggacgatttgagcagcataaaggatgcagtcctgagctgtgctgtggcatgtgacaaagaaggttggcaatacctgtttcccgtgaaggatgcatctctgagaagtcggctggccctacagtttgtggacaggtggcccctggagtcatgcctggagattctggcctactgcatttcagacacggctgtccaagaaggactaaagtgtgagctacagaggaagctggcggagctgcaggtgtatcagaagattctgggtttgcagtctcccccagtgtggtgtgactggcagaccttgaggagctgttgtgttgaggacccatcaactgtcatgaacatgattctagaagcacaggagtatgaactgtgtgaagagtggggctgcctgtaccccattccaagagaacatttaatcagccttcatcaaaagcatcttctccaccttctagaaagaagagatcatgacaaggctctgcaactcctgcgaagaatccctgaccccaccatgtgccttgaagtgacagagcaatccctcgaccagcacactagcttggccacttctcacttcttggccaactacctcaccacccacttctatggacaactgactgctgtccgacaccgtgaaatccaggcgctgtatgtgggatccaagattctgctgaccctgcctgagcagcaccgggccagctattcccacttgtcctctaaccccctgttcatgctggagcagctgcttatgaacatgaaggtggattgggccactgtggctgtgcagactctccagcagctgctggttggacaggagattggcttcactatggacgaggtggactcactgctttccagatacgcagagaaagccctggactttccataccctcagagggagaaacgatcagattctgtgattcacctccaagaaattgtccaccaggctgcagatcccgagaccctccctagatcaccatcagcagagttctctcctgctgctcctcctggtatctccagtatacattcccctagtctaagggaaaggagtttcccaccaacccagccctcacaggaatttgtgcccccagcgacaccccctgccaggcaccagtgggtaccggatgagactgagagtatctgcatggtctgctgcagggagcacttcaccatgtttaacaggcgtcatcattgtcgccgctgtggccggctagtgtgcagctcctgctccactaagaaaatggtggttgaaggctgcagagagaaccctgctcgtgtgtgtgatcagtgctatagttactgcaacaaagatgtaccagaggagccttcagaaaaaccagaagctctagacagctccaagaatgaaagccctccatactcgtttgtggtgagagtccccaaagcagatgaggtggaatggattttggatctcaaagaggaggaaaatgagctggtgcggagtgaattttactatgagcaggcccccagcgcctccttgtgcattgccatcctgaatctgcaccgggacagcattgcctgtggtcaccagctgattgagcactgctgcaggctctccaagggcctcaccaacccagaggtggatgccgggctgctcacggacatcatgaagcagctgctgttcagcgccaagatgatgttcgtcaaagccggccagagccaagacttggctctttgtgacagctacatcagcaaggtagatgtgctgaatattttagttgctgctgcctatcgccacgtgccatctttggatcagatcttgcagccagctgcagtaaccaggctaaggaaccagcttttggaagccgagtactaccaactgggcgttgaggtctccacaaagactgggcttgataccaccggggcgtggcatgcttggggcatggcctgcctcaaagccgggaacctcactgctgcacgggagaagttcagtcgctgtctgaagcccccatttgacctcaatcagctgaatcatggctcaaggctggtgcaggatgtggttgagtacctagagtccacagtgaggccctttgtatccttgcaagatgacgattactttgccaccctgagggaactggaagctacccttcggacgcagagcctttctctggcagtgattcctgaagggaaaatcatgaacaacacctactaccaggaatgcctcttctacctgcacaactatagcaccaacctggccatcatcagcttctacgtgaggcacagctgcctgcgggaagctcttctgcaccttctcaacaaggagagtcctccagaagtttttatagaaggcattttccaaccaagctataaaagtgggaagctacacactttggagaacttgctagaatccattgatccaaccttggagagctggggaaagtacttgattgctgcctgccaacatttacagaagaagaactactaccacattctgtatgagctgcagcagtttatgaaggaccaagttcgggccgccatgacctgtattcggttcttcagtcacaaagcaaagtcatatacagaactgggagagaagctctcatggctacttaaggccaaggaccacctgaagatctacctccaagaaacatcccgcagctctggaaggaagaaaaccacattcttcagaaagaagatgactgcagctgatgtgtcaaggcacatgaacacacttcagctgcagatggaagtgaccaggttcttgcatcggtgcgaaagtgctgggacctctcaaatcaccactttgcctctgccaaccctgtttggaaataaccacatgaaaatggatgttgcctgcaaggtcatgctgggagggaaaaatgtagaagatggttttggaattgctttccgtgttctgcaggacttccagctggatgctgccatgacctactgcagagctgcccgccagttggtggagaaagagaagtacagtgagatccagcaactgctcaaatgtgtcagtgagtcaggcatggcagccaaaagtgacggggacaccatcctcctcaactgcctggaagcgttcaagagaattccgccccaggagctggagggcctgatccaggcaatacacaatgatgacaacaaggttcgggcctacctgatatgttgcaaactgcgttctgcctacttgattgctgtgaagcaagaacactcacgggccacagcccttgtccagcaggtgcagcaggccgccaagagcagcggggatgcagtagtgcaagacatctgtgcccagtggcttctgacaagccacccccggggtgcccatggcccaggctccaggaagtgaccttgggcagtggggccaggaacacgtggcctgagagctgggcaacagcagtgatggcgatgccctccacctctttcctccagtggagtgggacttctctggctctgccctaggttggaaagagttggattggaccctacttgccttcccgggcaaggataggacctttcacgcaagtgccatgtttctctaaaattgtggaatctatgtgtgtttgtctggagatggccagttctttctacctcagagtgagtgagtgagtatgtgtgcacacacgtgtgcatgttcctgtgcgctgatgtttacgcccaagcatttctgaacaaatgaaactcttctccatttaaaagaggcactttactttagacttgccactctgaaaaccttccctgcgttttggttcttgacccgggttgtcctgtttgtatagtcccccctctgtggacgtgctttagtagctcctcttacctagagggcttttacagagaattagagcaacaccaaaaggattgcctcttttccttccttcccattccaaaattcagagatggctttggggcaagtgctacctgtggaataaacctgttttccaggtgtctcttctcccaagcacaagaagtcctggagtctttggaaggtagtctgaatagaagggttttcaggtgcaggcatctgaaagctgtgggtatgtgtataaatgatcaggtctgtgaggctaacacgggcaagagggaaagaaaggctaaccatccaaacagggatacaggggaggcggtggggggtggtggggggagcgggtgctcacaagcacagagctgcctgttgtgaatgtccctgctgcaaagttggtgggtgagagaatgggacttcctctttgagagtctggggagagaaaaggtggccaggatcctaggactgaatgactcgattttacctatttgagctgcagtcctgtttgcgctccttgaattggttaggaagctgcttccttttccctcctgcttcccttcagtctcttcaggaccacaggatggatatgcagacatgtggggtcattgggaagggagtgcgcttcttttctctgtcttagaaaagggagtcaagggttggctttggaattgggcctctggacagagtcagaatgagggaataatgaataggtcacatctggttggtggaaaactaggtgaagtgcttctttaatatgcactgtcttgtcttcccacgcaagatgtgacaatgtttgagaaaaggtgtgtcatactcagtgacttcaatttgcaaatgtggggcctaaagaaagctctgcagctctgaacctctcactggccagagctcagcctattggtcccatccatgatgctgagacaaacagaaactggaagctgaagtcagtgtctctggtgctcagaaaccctgtggatttccctctgaaccaagatttttagtagtaaaataaacaactcatggacatctgtcagatgagaagttttggtcctgttagagaggagaaagactgtaatgaaactactagacccatttgggctaaagtttggcttttccttccttgagtcatagaacgtatccatctcccaggaaatgtccttctctggcgtctgcttgcccttctgagtctgccttttttgcactgaacataagcactttatactaatgggtcacaaatcttgcagcccttaatttgggataagaccagattttcctgacattttcctctaactcattgaactatcaaattataggcaaccactgactagactgatatgagatgaggctaaaagcctttgaacaccacgctgtagtctccaacagaaaaacaccaccaaaacagatacccatgttgaggggttgaatgttttactacaaacaagccacaataaagtgtctatcaacatgtt

SEQ ID NO: 772 - DNA, 5069 bp, Homo sapiens
gaggcggaggcggccccgggctcgggcggctgggatggagcagaagagcgcggagcaccggagggcacgcagctgacggagctgcgctgcgttcgcctcgtttgcctcgcgccctccactggagctgttcgcgcctcccggctcccaccgcagcccacccggcagaggagtcgctaccagcgcccagtgcgctctgtcagtccgcaaactccttgccgcccgccccgggctgggcaccaaataccaggctaccatggtctacaagactctcttcgctctttgcatcttaactgcaggatggagggtacagagtctgcctacatcagctcctttgtctgtttctcttccgacaaacattgtaccaccgaccaccatctggactagctctccacaaaacactgatgcagacactgcctccccatccaacggcactcacaacaactcggtgctcccagttacagcatcagccccaacatctctgcttcctaagaacatttccatagagtccagagaagaggagatcaccagcccaggttcgaattgggaaggcacaaacacagacccctcaccttctgggttctcgtcaacaagcggtggagtccacttaacaaccacgttggaggaacacagctcgggcactcctgaagcaggcgtggcagctacactgtcgcagtccgctgctgagcctcccacactcatctcccctcaagctccagcctcatcaccctcatccctatcaacctcaccacctgaggtcttttctgcctccgttactaccaaccatagctccactgtgaccagcacccaacccactggagctccaactgcaccagagtccccgacagaggagtccagctctgaccacacacccacttcacatgccacagctgagccagtaccccaggagaaaacacccccaacaactgtgtcaggcaaagtgatgtgtgagctcatagacatggagaccaccaccacctttcccagggtgatcatgcaggaagtagaacatgcattaagttcaggcagcatcgccgccattaccgtgacagtcattgccgtggtgctgctggtgtttggagttgcagcctacctaaaaatcaggcattcctcctatggaagacttttggacgaccatgactacgggtcctggggaaactacaacaaccctctgtacgatgactcctaacaatggaatatggcctgggatgaggattaactgttctttatttataagtgcttatccagtagaattaataagtacctgatgcgcattgaacgacaatcttaagccctgttttgttggtatggttgtttttgttttcctccctctcctctggctgctacaacttcccctttctggtacaagaagaaccattctttaaaggtgagtggaggctgatttgcagctgaagtgggccagccttgcaccagccaggccagaccaccatggtgaaggcttctttccccactgcaggacccactttgagaaggaccgaggaggaggatttgggttgttttgttaggggttactttcaggggaacatttcatttgtgttatttcttaaacttctatttaggaaattacattaagtattaatgaggggaaaggaaatgagctctacgaggatttcaccctgcatgggagagagcagggttttctcagattcctttttaatctctatttatctggttgtttctgacaggatgctgcctgcttggctctacaagctggaaagcagcttcttagctgcctaattaatgaaagatgaaaataggaagtgccctggagggggccagcaggtcacggggcagaatctctcaggttgctgtgggatctcagtgtgcccctacctgttctcccctccaggccacctgtctctgtaaaggatgtctgctctgttcaaaaggcagctgggatcccagcccacaagtgatcagcagagttgcatttccaaagaaaaaggctatgagatgagctgagttatagagagaaagggagaggcatgtacggtgtggggaagtggaagagaagctggcgggggagaaggaggctaacctgcactgagtacttcattaggacaagtgagaatcagctattgataatggccagagatatccacagcttggaggagcccagagaccgtttgctttatacccacacagcaactggtccactgctttactgtctgttggataatggctgtaaaatgtttaaaaacaaaacaaaacaaaaaagaggcactagtctatctgcaattactcaacgaggcattttcataggaaacagactatgattaatccatttattcttcccacacacttaccttactaagtctttgctttaataaatgagcaaccctgggtatagtcttaaaattctgcacaataaattttgagaaagaattgttcctctttgtaggtatctgtgtattgcaatcattctcaaccaggaggtgattttgccccctgactccaccccagggacattcaaaaatgtctggtgacagttttcattgtcatgacttgggggtgctactagaagccaggaatgctgccaaacattctaccatgcacagcacaacctacaacagcaaagaatcatccaccccaaaatatcagtagtgccgagattgagaaaccctgatttatcacaatgcccactgtgacagaacaagacactcacagattagtgatacgttttatttttaacaaaatgaaatgatgtgttaagtttttatttccaaagtgtttagtttattggctgatgggttgttcttggtatgcatggtgacctttttatttctgtgtgcttcctagagagctttatttcatggcgacaactctgtcttcttgtaacagctgatattagcaagcagcatcttatgtcctgatttcatatagtagaaaacaaacattgggtccgacttcaaaatgtgttgtattgtcctacagtgtcataaagaacctgaaaatgaacttttgtttctaaagttggaccttgctgccatgactgtttagtttacagaaacttgaccccggctcatcctgtctctggctgtggcccggcaaagcactgaaaacccctctggtctcagagacagtaggggcagtgccactttctacaacctgccaacccacacactggagtaattctgaaaaaaattattcctaaactctctaagtgtggacggagaatgagcaagccccagaagtattttacaaccagagtgggtaatgaggagggggcttactggaatcgtcatatctctgaatattgaaaacaacaactaaaaaagtggaccttctcagaaaaaaagggcagcaaatgaccaagggcgccccttctggccgtgcttggcttgagtaactgtctctctttccccacccccatcacagggctttcagtttggcaaaggaaaagcagataaaaacagaacattccatatgtttctttctccatcggccaaaaacattttgacacaatgtttgtgaaacacctttggagaggtgcacttctgaatgctgcctctgccgtaaatcctggggcaagggatcagcctcttcccaggaaccatcgccttctataaaccgtgaactcaagcaggcattttttttttcttaccgaaaggctgctattgtgcaagggcacataatgggtctgttgctcttattggcttccaaatgtgcatggcaaagagagagatgtgggcctagagcagatatattcagcaaggtgacagcttcccataacaattctaacacttcttatcttatgtgagaataaaatatttaagggttgaaccttattttgccaaatgtatcttttctgcttttgaattgggcagaagattttagcaactatattctacaaatgttacttataacacacacacacacatctgaaatatatgccgaaaattgacgtctttgacctcagggagagcacctgtccaggtctgcctaaaggaaatggctccagtgggtctaaacaaccacatcctatccatggataggtctagtcataacactttagagagaatgtcagagcaggagggaggcaagccgcctcttctcggccatcgactgcagatgatgaaagagcgggattcaactttgttttcttttcctgtggccccagtgaaacctcctgccctccctgcacgtctgtgtcttcatttctaaaatgggggtgatgctttcatattgacctcaccccatactacctcacagatgtgttgtgaggattaataaaattatgtctatggtattttcagtttctggagaaaaatacttatagacagtttaactattacatagatatataagtgatctcagtttcttgtttgctgtgatactaatgtgttgttttaacttattccataaaatgacagttgtgtcctagccacatcagacagctatctaagctctggactacccctttgtgcagctgaatcactgcagggttgaccatgcctggtgccacagccatggtttccatttctagatgaaaggatggcctaggacataggtctcaaagactcttggatcagaatcaggagattagggaaaacaggatggatacctgagcactaacagcagtagacgtagacctctgtcctttaccatctgaggtcttctggattctttgtggggttaattttgatttgatgtcatctgtttgcccttcatcttgcttgcaagtgtgcatggttcaatccctcacatccaggaaatgaattttgcaattgggccagatgctaatttgcacgttgattcaccttctttgcctttaagccttttttttcttttttttttttttggcaaatgaatgtaccatttcaactttgattttaatagtgctagttgatattggtaataatgctaaccaagagatcaatgccagatttttctcttggggtaagttagctgaagtcatttaaagatggaaaggtgggaaaattctttgatatttgatgtcattgtatccacatttgttgtaagacatattgcataccaattataattatatcaattaaagttgataaaagcttccaaaaaaaaaaaaaaaa

SEQ ID NO: 773 - DNA, 4915 bp, Homo sapiens
gagcggcaggtggggccggcagatcttctttgcgcatgcggaaaccgctgcccgcttccacctctaacccaggctcagagtagctgctgtttctgagagaacgattcgtaggacagcccctgacgccattcccttttgcccttctttctgcgggcctttccggtacttgagcggtgtccagagcgtggccagttctcgtctatctggctgcctttagggagcggtgcctagcgttggccaatagttggctgtcgaaagtgccggcccccgcgccggcgcctgcagcagccgggtgggaaggctcaagatggcgtgcttgttggagaccccaatccgcatgagcgtcctttcggaccaggaatgaaagttactgggagataacttcgaaggattttgcaacaaattcgagctgtccgactctgagaatggaagtaacagctagcagtcgccactatgttgacaggctatttgaccctgatccccagaaagttctacaaggtgtcatagacatgaaaaatgctgtaattggaaacaacaagcagaaagccaatctcattgttttaggagctgttccaagattgttgtacttgcttcagcaagaaacctcaagcacagagctgaaaactgaatgtgcagtggtgttgggaagtcttgctatgggtactgaaaacaatgtcaagtctctactggactgccatattatccctgccttattgcaaggactactgtccccagacctgaagtttattgaagcttgcctccgatgcctgcgtaccatcttcaccagtcctgtcactccagaggagctactgtatacagatgccacagtgataccacacctcatggcactgcttagcaggtcccgctatacccaggagtacatctgtcagatcttctcacactgctgtaaagggccagatcatcaaacaattttatttaaccacggtgcagttcagaatattgctcacctactaacctcactgtcctacaaagttcgaatgcaagcactgaaatgtttctcagttttagcttttgaaaacccccaggtatcgatgaccctggtaaatgttttggttgatggagaattgttaccacagatttttgtgaagatgttacagagggataagcctattgagatgcagctcacatcagcaaaatgtttaacttacatgtgtagagctggagcaattcggacagatgataactgtattgtattaaagacattaccttgtttggttcgaatgtgcagtaaggagagattactagaggagagagttgaaggagctgagacacttgcctatctgattgaaccagatgttgagctacagagaatcgctagcataactgatcacctcattgccatgcttgctgattatttcaagtatcccagctcagtgagtgccatcactgatattaaaaggcttgatcatgatttaaaacatgctcacgaactccgccaggctgcattcaagctctatgcctctcttggagcaaatgatgaagacatccggaagaagatcattgagactgaaaatatgatggaccgaattgtgactggcttgtctgagtctagtgtcaaggtgcggttagctgccgtcagatgtttgcacagtttatccagatctgtgcagcagcttcgaaccagtttccaggatcatgctgtttggaaacctttaatgaaggttttacaaaatgcaccagatgaaatcctagtggtagcatcttccatgctgtgtaatcttcttcttgaattttctccaagcaaagagccaattttggaatcaggagccgtagagctactttgtggattaactcagagtgaaaatcctgctttacgagtgaatggaatttgggctttaatgaatatggcatttcaggctgaacaaaaaataaaagcagatattttacgaagcttgagtactgaacagctattccggttattatcagattcagatttgaatgtgctgatgaagacattgggacttcttagaaatctcctctccactcgtcctcatatagataaaataatgagtactcatggaaagcaaattatgcaagccgtcactcttattctagaaggggaacataacattgaggtcaaagagcagacactgtgcatcttagccaacatagcggatgggacaacagcaaaagatcttattatgaccaatgatgatatcctacagaaaatcaagtattacatgggccattcacatgttaaactgcagcttgcagccatgttttgtatatcaaacctcatatggaatgaagaggaaggttcacaagaacgccaggataaattacgagacatgggcatcgtagatattctacacaaactgagtcagtcaccagattcaaacctttgtgacaaggcaaagatggcactgcagcagtacctggcatgatgggagtgcccctgggcacctgcgagcatcccacctccttgtttaaggaagtacaggaaccagcctcatttgattccttctatttgcacaagtcaccttggactgcagggagctgttttgcaaaagcagtttagtaggcttagatctcaaattcatcttgagaacatttttttgaggtagtaatttcctcagaagactcttgtgttttgttttggtttttttttctgagctactcggactctttattagaacaatcaatcattttcctttggacctacaatttttgcctatgctgcagccactttgtgagtgagaatgaatatgtctgtgtgaacacacaggcatgcgtgtgtatgtgcacgtacatgggccagaatgaatggatgtgtgtgtgtgagggatacctcagatttttcttttcttattttgtgtgaaaatctcttttctacagattttccagggtttaagcattgcttgctgtataaaaaactttactgaattatatacagtttgaatgaaatgttattttaaaaacaaaacaattgttaagtgttccataaaggttatgttgaattttggtcagatgaatatttgtaagtaaaaaatatatgcatttctgaacctcaacttacatagattttctttatataaaaaaaaagaaaaaaaaagaaaaagttggctatagttggcctgattaacaggcactatacatggtgctgtgcaaaatagtaagctagcatcttactgccgtcaatattagcaggtacagagccttttttcatcctaattcagtaagttctcaggcttccaagtcaaatggagaagtaaagtgaggcaacagattcaccataggctttttgaagcatcaaagggaaatataactactgatagtgaaagcccagccatgacccagatgggcttacccttgacaggaactggggaccaagagcctcccaattgccctaactcctgtcattggtattagcaatatctggccagatttagaaccagtcatggaaacttgtgctcaaactaaaagtaggtcatcacttcccagaaacagaataccttgtgcttcctgaaacagcatatatcactgtgaaactaaagaatattctacagacacccctgtagaaagaaacaaagaacaggatagtttagaaagctttctgttagctgtattcagcaaatttcatactagttgctcaggactgctagttggtatgcttttgtaaaacgagattgaaatttaataaaagatgcaactaaaatctttcctgcatgaagctaaaagcactcaagttgagagaggggcaagggaatctccccaggatgactgaagatgacttctttttacagcaagtactgttagcctttctgcaccccttagcttggcccctgctccaacttctgggtcagcagcaaggtgaactcaacagaagttgctcttgactgtttgaaggtagaagcagcctaccttttctctttgctaaaagaaggtcaaaggcttcgcaaccaggatgcaaggtctgcggtccagaagcttgcggtgagtgtgtgccactgatggagctccaagcccacccaccagccactcctgatggggttgctcacactgcagctgccctatcaccaccctgcacgttccttggaagatttaaatgtttggttgcaaatgaatgttttaaaaatgtatttaatgcaatttttcctgctctcaacatgaccacccaagattcaaacacagagacttccaagttactattttttcagaacatcaccgattttaaaatctgtcacaacaggacttggttttgtgcagatatcagagtgctaatgtgagaaacccagttaaaagaaaacttagtttattgggaagaaagcctcaggcccactcgtttctagaactgtgaaaatatccttggttggcatttttaacacaaaacactatagtgttggtattaaatagtactaggtaaatataaagaaaccaataatgaattgctgagacaatcttgaacccaaatagcattagaaagctgaaggcccaatgaaataacactttcacacttaaactctgtggataaattttgcctgtgggtataaacagatggtcaaattaaaaatgctttactataattaacttttctgatttgaatgaagggaaatgtatttattgaaacaaagctgtttgctgctttatgcaggtgcagtgttcagtcagcaaggaagtgggaagagtggacatggtattgtgtctacacccaagttcttaactaagcttctcgctctaatactgcattctgtttctccttttgtgccctgattgtaatccaaaatttatgaactagaaaagaatgtccaatttaataagttgcatttttttttctttaagcactttattcagaacaatacatgttcttctggtagtgtttggataatatgattttaacacatgctaataaaagccaagaaaaatcatggcaacttctaaaaaaaaaaaaaaaaaa

SEQ ID NO: 774 - DNA, 8643 bp, Homo sapiens
tggggctcgagggggcgagcggtggcggtggcgggtacggcaggctcgcgggcgccgggcttcgttacataatctcggaccggaggagcggcggcacatggcggcggagcggcgctgtggaagtatgcgagacttaagagctcaagtgactagtggtctcctgccatttccagaagtgactcttcaagcccttggagaagacgaaataacattagaatctgtgcttcgtggaaagtttgctgcagggaaaaatggacttgcttgcttggcttgtggtccacaacttgaggtagtaaactctataacaggagagcgattgtctgcttacagattcagtggagtcaatgaacagcctcctgtagttttagctgtgaaagaattctcttggcagaagagaactggattattaataggattggaagaaacagaagggagtgttctctgtctttatgaccttggaatatcaaaagtagttaaagcagttgttcttcctggaagggtaacagctattgaacctataattaatcatggaggagccagtgcaagcactcagcatttacatccaagtctgcgatggctttttggagtggcagctgtggtcactgatgttggacagatccttcttgttgacctatgtttggatgacttgtcatgcaatcaaaatgaagttgaagcatcagatcttgaagttctaactggtatcccagctgaagtaccacacattagagaaagtgtaatgagacaagggcgccatctgtgtttccagttagtaagtccaacaggaacagctgtttcaactcttagttacataagcaggacaaatcagcttgctgtaggtttttctgatggctatctagcactttggaacatgaaaagcatgaaaagagaatattacatacaattggaaagtggacaagttcctgtatatgctgtcacttttcaagaacctgagaatgatcctcggaattgctgttacttgtgggctgttcagtctacacaagatagtgaaggggatgttttgagtttgcatctgctgcagctggcctttggtaatagaaagtgtttggcatcaggacaaatcttatatgaggggttagaatactgtgaagaaagatacaccctggacctgacaggtggcatgttccctttgaggggacagacgagtaataccaaattgttgggatgccagagtatagagaaatttcgatctcatggtgacagggaggaaggcgtgaatgaagctctatcgcctgacactagtgtttcagtctttacctggcaggtgaatatatatggacagggaaagccttctgtatatttggggctttttgatataaatcgttggtatcatgcacaaatgccagattcgttaaggtcaggagaatatctacataattgctcttattttgcactgtggtcattggagtctgttgtaagtaggacttctccacatggcatcttggatatattagtacatgagagaagtttaaatagaggagtccctccttcatatccacctcccgagcagttttttaatccaagcacttataattttgatgccacttgtttgttaaactcgggagttgttcatttaacttgtactggctttcagaaggagactttgacttttttaaagaaatcaggtccatcactcaatgaactcattcctgatggttataatcgatgtcttgtagctggccttctttccccaagatttgttgatgttcagccttccagtttaagccaagaagaacagttagaagctatattgtcagcagcaattcagactagttccctgggacttttgactggttatatccgaagatggataacagaagaacaaccaaattctgccactaatttgcgctttgttcttgaatggacgtggaataaagtggttctcacaaaagaggaatttgacagactatgtgtgccattatttgatggttcgtgtcatttcatggatccacaaactatacagtctatccagcaatgctatttgcttcttagcaatcttaatatagtcttgagctgttttgcatcagaagcccgagagatcactgagagaggactgatagacttaagcaataagtttgtggtttcccacctcatctgtcagtatgcacaagtggttctttggttctctcattctgggcttttaccagaaggcatagatgattctgtgcagttgtcaaggttatgctacaactaccctgtaattcagaactactacaccagtcgtcgacagaagtttgagcgtttatcaagagggaagtggaatcccgattgcttgatgattgatggactggtttctcagttaggagagcgaattgagaagttgtggaaacgagatgaaggaggcacaggaaaatatcctcctgctagtctgcatgcagtacttgatatgtacctattagacggcgttactgaagcagccaaacactctattaccatttatttgctacttgatattatgtattcctttcccaacaaaacagacactcccattgaatctttcccaactgtatttgccatttcttggggccaagttaaacttattcaggggttttggttgatagatcataatgactatgagagtggtttggatcttttgtttcatccagctactgcaaaacctttgtcatggcaacattcaaagattattcaggcattcatgagtcagggcgagcacagacaagccctcagatatattcagacaatgaagccaacagtgtccagtggtaacgatgttatccttcacctcactgttttgctttttaataggtgtatggttgaagcctggaattttttgcggcaacattgcaataggttgaatatagaggagttactgaagcacatgtatgaagtctgtcaggaaatgggcttgatggaagatttactgaagttaccatttacagacactgagcaggaatgtttagtgaaatttttgcagtccagtgccagcgttcagaatcatgaattccttttagtgcaccatttgcagcgtgccaattatgtgcctgccttgaagctgaaccaaactctgaagattaatgttatgaatgatcgtgatcctcgtttgcgggagagatcactggctcgaaattctatattagaccagtatggaaaaatccttcctagagtccatcgaaaattagccattgaacgagctaagccttatcatctgtcaacatcatcagtttttcgattagtttctagacccaaaccattatcagcagttccaaagcaagttgtaacaggaactgtgttgacaagatctgttttcatcaacaatgtgttatctaaaattggagaagtttgggcaagcaaagaacctataaatagcaccacacctttcaatagttctaaaatagaagaaccatctcctatagtgtattcgctcccagctccagagctgcctgaggcattttttggaacaccaatttcaaaagcatcacaaaaaatttctagactgctagatttggttgttcagcctgtcccccggccttctcagtgttcggagtttattcagcaaagctccatgaaatctcctttgtacctagtatcccgttcactgccctcaagttcgcaattaaaaggatcgcctcaggccatctccagggcttcagaattacatttgcttgaaactcctcttgtagttaagaaagctaaaagtttggccatgtcagttactacttctggattttctgagttcactcctcagtccatcctgaggtctactcttcgatcaacacctttagcatctccctctccatcacctggaaggtctcctcaacgacttaaagaaactagaatttcatttgtggaagaagatgtccacccaaaatggattcctggggctgcagatgatagcaaattagaagtatttactacacctaaaaaatgtgcagttccagtggaaactgaatggctgaagagcaaagataggaccacatcttttttcctgaacagccctgaaaaggagcatcaagaaatggatgaggggtcacaaagtttagagaaactggatgtgagcaaaggaaacagcagtgtttcaatcacatccgatgagactaccttagagtatcaggatgcaccgtcaccggaagaccttgaagagactgttttcacggcctctaagcccaaaagctcttccactgcactaactactaatgtaactgaacaaactgaaaaggatggagataaagatgtatttgcatcagaagtaactccttcagacctacagaaacaaatgggcaatttagaagatgcagaaacaaaggatctcttagttgcagcagaggcattttcagaattgaatcacttaagcccggttcaaggaactgaagcttctctttgtgcaccatcagtctatgaagggaaaatcttcacccagaagtccaaggtaccagtgttggacgaaggattaacatctgttgaaacctacacccctgcaattagagcaaatgacaataaatctatggctgatgtccttggtgatggtggaaactcctcgctcactatctctgaaggtcctattgtctctgagcgcaggcttaaccaggaagtagcgctgaacttaaaagaagatcatgaagtagaagttggtgtactaaaagaaagtgttgacttaccagaagaaaagcttccaatttctgacagccctcctgatactcaagaaattcatgtgattgaacaagaaaagcttgaagctcaagattcaggagaagaggctaggaatctttcatttaatgagttatatccctctggaacacttaagcttcagtacaattttgatactattgaccaacagttttgtgacttagctgataacaaagacactgctgaatgtgacattgctgaagtagatggggaactttttgtggctcaaagcaactttaccttgatattggaaggtgaagaaggagaagttgagccaggtgattttgcatcatctgatgtgttacctaaagcagctaacacagcaactgaagaaaaacttgtatgcagtggggaaaatgataatcatggacaaattgcaaatttgccatctgccgtaactagtgaccaaaagtcccaaaaagtagacactttaccatatgtgcctgaacctattaaagtagcaattgcagaaaatttactagatgtaattaaagacacaagaagtaaagaaattacttcagatacaatggaacagtccattcatgaaacaatacctttagtgagccaaaacataatgtgtcccactaaattggtcaaatctgcatttaagactgctcaggaaacaagcacaatgactatgaatgtcagccaggttgatgacgtggtttcctccaaaactcgtacgagaggtcaacgtatccaaaacgtgaatgtcaaatcagcacaacaggaagcatcagcagatgttgctactcctaagatgccagggcagtcagtcaggaagaaaactaggaaggcaaaagaaatttctgaagcttctgaaaacatctattctgatgtcagaggactatctcagaaccagcaaatacctcaaaattctgttacgcctaggagaggaaggagaaagaaagaagttaatcaggacatactagaaaacaccagttctgtggaacaagaattacagatcactacaggtagggaatcaaaaagattaaaatcatctcagctgttggaaccagcagttgaagaaactactaaaaaagaagttaaggtttcatctgttacaaaaaggactcctagaagaattaaaagatctgtagaaaatcaggaaagtgttgaaattataaatgatctaaaagttagtacggtaacaagtcctagcagaatgatcagaaaattgagaagtactaatttagatgcttctgaaaatacaggaaataagcaagatgataaatccagtgacaagcagctgcgtattaaacatgttagaagggtcagagggagagaagttagtccatcagatgtgagagaagactccaaccttgagtcatctcagttgactgttcaagcagaatttgatatgtctgccatacctagaaaacgtggtagaccaagaaaaatcaatccatctgaagatgtaggatctaaggctgttaaggaagagagaagccccaagaagaaagaagctcccagcattagaaggagatctacaagaaataccccagctaaaagtgaaaatgttgatgttggaaaaccagctttaggaaaatccattttagtgccaaacgaggaactttcgatggtgatgagctctaagaaaaaacttacaaaaaagactgaaagtcaaagccaaaaacgttcattgcactcagtatcagaagaacgcacagatgaaatgacacataaagaaacaaatgagcaggaagaaagattgctcgccacagcttccttcactaaatcatcccgcagcagcaggactcggtctagcaaggccatcttgttgccggacctttctgaaccaaacaatgagcctttattttctccagcgtcagaagttccaaggaaagcaaaagctaaaaaaatagaggttcctgcacagctgaaagaattagtttcggatttatcttctcagtttgtcatctcacctcctgctttaaggagcagacaaaaaaacacatccaataagaacaagcttgaagatgaactgaaagatgatgcacaatcagtagaaactctgggaaagccaaaagcgaaacgaatcaggacgtcaaaaacaaaacaagcaagcaaaaacacagaaaaagaaagtgcttggtcacctcctcccatagaaattcggctgatttcccccttggctagcccagctgacggagtcaagagcaaaccaagaaaaactacagaagtgacaggaacaggtcttggaaggaacagaaagaaactgtcttcctatccaaagcaaattttacgcagaaaaatgctgtaatttcttgggaagattttaatgtacacctatttgtaaagtcatcagaatagtgtggattattaaatatctagtttggaagaaaataatttatataaattattgtaaatttttatgtaaacagaaggtcttcaataagtaaagtaactccatatggagtgattgtttcagtccaggcaatttttctattttatattaagacttcatacatttatatatgtaaatatggcttattaatggaatgttaaataaaatgtatacttcacagtcgtttgtgtcttggatttttgaaagggaggggatatctgtttaaatagttttatatgctcattggtctcattttctctataattaaaatactagaccagtcttaaaatggggatgattgaagtattgatatttctttttacagttactattttataatttatgcactttgattctgtgattcagatttctaatcagaaaatgtatttttttgtttttggctgttactatgttaaaattgaattatgggcatgtcattttgccatctttgtagtttcacaaattttgtgtaatctacctcaaatgaataatccaagtattggttaactataatgttggcatctcttattcggcaagcttaaaggctctttaaagtcttaattagtcaaagactaatccaggttagattgaccggttcactgctcacttgcaaccttatcaaagggtttgacaaagggaaatgtaaaataaatctgtttatggatattgagtgcatcttgtatgtgcctaatattgataggatgagatgtctgaacaaatttttataatattgctgtgaaggagcttgctattgaaccacagaaatcccttaatattcaggttttaaaactggcaaattctcacaggacctcaggcacagattattgaggttgggagagagtgagtagatgtagaaaaggagaaaaacaacacacgccctgttctctacagtacaactgtgtgcaattaagcaatggtacttgatgtaggctctaacactcatcaataaataagtgttgtaaaataatttataacaggtaatcgatagtgtgtaatgaatggactattaataattgattatctagaaacgaactgctttcgtgggcttttaatattttaatgtgaagcatatgcagtgtgctttctgcatttatttttctaccaaataatacagataatgagaaattggtgaaaatgcctacgcaaagtgttgacagtgtgaaagcagtgcgagtgcggccttttagtcaggttagtgatggatgttacgctgccttgttgaaaatttcactgactttgattttattacttttttaatgatagttatcaaacttgtatttaagctgcttgtcatttatggaatattgaacttatttaaatgaacttgttaaatgaataaagagctaaacataattcagtaaacaattcctttgcgcaagtagcacaataaacatggatgcaacgtatgtcaagttaatacttttttaaaccaacgcaatttggtgaatatagatgtgtggtacctgtttttaataagtgtactttttttcccccctccgtgaatgtagatcataagcaaacaaattgcctgttctaaatgaactttacatatattttaaatgaatgtatgtacttacgtataaatgtctttatatagcttgaataaaaacactgctcattaaaaaaaaaaaaaa

SEQ ID NO: 775 - DNA, 5046 bp, Homo sapiens
gccgacgccgctgcgctcccgcctcctgtcggttcccgggttcccgctgcggctgcggttctggcagccgagcccccgcggtgctgcagcccagctttagcgcgcagaccgacccgcgccccttcttcgccgccggcagcctctaatccacgcggcgcgttgcggcaggtgccctgggcgtactgaggcgcggtggcctgagcccggccgccatcgatgaccccggtcgcggacttgcttcaggctggccaccccccgtcttgtttcatcatctgtgttgagtaaccatggggaggaagctggacctgtctggtttgactgatgatgaaacagagcatgttcttcaggtggttcaaagagacttcaatcttcgcaaaaaagaagaagaacgactaagtgagctgaagcagaagctggatgaggaaggcagcaagtgcagcatcctctcgaagcaccagcagtttgtggagcactgctgcatgcgctgctgctcgcccttcaccttcctcgtcaacaccaagcgccagtgtggagattgcaaattcaatgtctgcaagagctgctgctcctaccagaagcacgaaaaggcctgggtctgctgcgtctgccagcaagcgaggcttctgagggcccaatctctggaatggttctacaataatgtgaagagccgcttcaagcgctttggcagtgccaaggttctgaagaacctgtacaggaagcaccggctggagagtggcgcgtgcttcgacattctaggaggaagcctttttgagtcaaacctggagaatgaaggaagcatttctggcagtgattcaacattttataggcagtcagaaggacatagtgtgatggacaccttggctgtggccctacgggtggctgaagaggccattgaggaagcaatttccaaagcagaggcatatggggacagcctggacaagcaaaatgaggccagttacctgcgggaccacaaggaggagctaactgaggaactggccacgacaatcctgcagaagattatacgaaaacagaagagcaaaagtgagcagcaagtggaagaagagccaggatggccacatccccagagttgcagcacaaaggtggcagatgaggggacctcagcatcccctggaggctaccgtgctcccgctgccctctggaggtcccagtctgccttctcaatcactggagaagaagccctgaagacccctccagtggaggctccatcgaggcagccaagggaccaaggccaacacccgagagcagagtctgctctgcccagctggaagagtgtggacaggctggatgaaacaaacctggccccagttttgcagagccccgacgggaactgggtggccctgaaggatggcgctccaccccccacccgactactggccaaacctaagagcgggacgtttcaggccctggaggtggcctccagtgtggcatctgcctacgatgagatgggctccgatagcgaggaagactttgactggagtgaggccttgagcaagctgtgtcccaggtcccgggccctgcccaggaacccccagcctcagcccacacaggcccagagctctgaccaaggccccatagctgcctccccatcctctgcactctcccccaaccctgaggccatgtgctctgactcggagacctcctccgcaggctcttcccgagaagttgggcaccaggccagactgtcctggttgcagaggaaggcccccaggaaccctgcagctgagaagatgcgcttgcatggagagctggacgtgaacttcaacccccagttggccagcagggagacctcggacagcagcgagccggaggaggccccccacaccacagaccggcgggccaggaggtggagaagagcccgactgggctcagaagagccaagcaaagaaccatcttcccccagcgcccagctccgggatctagacacacatcaggtgtcggatgatttatcagagacagacatcagcaatgaggctcgggatccccagactctcacagacaccacagaggagaaacggagaaacaggctgtacgagttagcaatgaaaatgagtgaaaaggagacttcttcaggggaggatcaggagtctgagcccaagacagaatctgagaaccagaaggaaagtctgtcctctgaagacaacagccagagtgtccaggaagagctgaagaagaagttttctgctgtttctctctgcaacatctccacagaagtcctgaaagtcatcaatgccacagaggagttgatagcaggatctacagggccctgggagtccccacaagtccctcctgacagacagaaggggatgtttcctcgtgggacagaccaagtgagactggatgagcagctgacttccctggaagaaaatgtatacctggcagcaggcactgtgtatggactggagacccagctgactgagctagaagatgccgcccgctgcatccacagtggcactgatgagacccatctggcggatctggaggaccaggtggccacggctgcagcccaagtccaccatgctgaactccagatttcagatattgagagccggatttcagccctgaccattgcaggattaaacatagcaccatgtgtgcgcttcacaagaagacgggatcagaagcaaaggacccaggtacaaaccatagatacatcaaggcagcaaaggaggaaactgcctgctccaccggtgaaagctgaaaaaattgagacatcttcagtgactaccattaaaacatttaaccacaacttcattctccaaggctcctcaacaaacaggactaaggaaaggaaaggcaccaccaaggatttgatggagcctgctctggagtcagctgtgatgtactgacaccatggaattccactgccagtgacccactgcctccggccgtacacgacagtgccttgacccaacagccatcgagtactgtatgtatttccacctgaggagaaggcctggggaggccacagtgcaccattgcacagggctgtcctgatacctcatccagaaagccgtctcagacttcagcactgcggtcttgcccactctctgccttaggctcccaggggaatccaagacagaaaatgaagacactggcttccaacagcagcgctccatgtttaagatacatattttccctgtttgctttgctactgtatgttgactttaagatctttttttaaatacatttgattcagctagtattccatgtcaacaatttgtccaaaggaaaactgctggagggaggtggagggaggaaggtgggaattattatttaatacatcattaatgcttattaatctctcacaagcatctttgtcttgcaaatcctaagggaaaagcaagtccctgcagtgagcactagggacagtctaatttggggattgctcaaccatcaagactgcaggtctcccttcagccacctccttcctgctaaaagcttagcctaccacactaccagtcattcccatcgctttgcaatcacaagccacaggatgagaagttctgactcactcatgccatgcccagggctatctgaaacaatgtctcattaagaatttagggttcttccatgggcttactgacagttgcccagatctgaaggggaaagggtcttgagaaagaccatcactggctcaactttagggcactgtccagagtcaacatgatgtggtttagcagtgatcacatctaaacaaagtttaggtaaatgaattatcgcagagaaaaaccacatgagaaaatttttgtactccaaatttacttcccaataaatattcagcaaagtagtaaaatgaccttaaagataaaaatgattagggaatagccttagaaaatttataggtataaaaaattcaaggacaaactgtgcatttaatggacacaagaattgactctaactccatgtctgtggtttctttgaacccatatcaaatgtatgactatttagagtgtttataagagataatggaactgaactttcactcaattaattgggcattaacaaccttcttttatgtttgttcctgatatagtctgaatcttaggaagaaggtaaaagaaaggaggcaagagaatagttatgatgaatatgtgttaagtgcctgctctgaaggaggcaatgttcttctcatttgaatccttatggcaaccttattcaataggttttcccatatttcagatttaataactgaaggccagagagattaatttgccaaagccacacctttatgctaattatgattggaatgcatcacaaaagcctaactctgttgttttcaacctctacgttattttgctgctatgtgcatttccagatctgattttctgctaacttgtgtgctatgatccactcctgatgggggtctacattaatcttccagtactccttgctgatgctgtgttatgtgtcatctaacagaaatgactcctttgaaataagtaaatctttggctttttgttctgttggtgtgattcaaagcaaaacaaacaaacaaaaacaaattttaagaacacaacaaaaaagatttgacttccgaatagaatgttttctttaagaggcatgaaaagcaactattgttgtgttacagtgttaaaaatattcagttttctttgacaaaaatgtgtactgtgtaagccttgcaaacaaaaaacaacaaaaaagaagcagcagcagcagcctgctgtgtggcatctgaacttttataaaggtttccttgtgccaaataagtgcaaagatttaatttactattaaaaaccataagcatatgttatagttccagaagaattattttgtcatcaagtgattttgatctttagtgtcaatatttatatttagattaatttttataaatgaaaatattttaatggtttaagaaaatgaggacaacaggataatatctttgatgacttctgaaagttatgcttcccttcatgttatatgcacattgccaagaattactgtcaagagaaatgataagtaaaagtcatttatgaaaataaaaaaaaaaaaaaaaaaaaaaaaaaa

SEQ ID NO: 776 - DNA, 6159 bp, Homo sapiens
atggccatagaccggcggcgcgaggcggcgggcggcgggcctgggcggcagccggccccggccgaggagaacggctccctgccgcccggggacgcggcggcctcggcgcccctcgggggacgcgcgggccccggcggcggcgcggagatccagccgctgcccccactgcatcctggaggcggcccgcacccgagctgctgctccgcggctgcggccccgagcctcttgttgctggactatgacgggtcggtgctgcccttcctcgggggcctgggcgggggctatcagaagaccctcgtgctgctcacctggatcccggcgctgttcatcggcttcagccagttctcggactcgttcctcctggaccagcccaacttctggtgccgcggggccggcaaaggcaccgagctggcaggggtcaccaccacaggccggggcggggacatgggcaactggaccagcctccccaccacccccttcgccactgccccctgggaggctgcgggcaaccggagcaacagcagcggcgcggacggaggcgacacaccacccctgccatcccctccggacaagggggacaacgcctccaactgtgactgccgcgcatgggactacggcatccgcgccggcctcgtccagaacgtggtcagcaagtgggatcttgtgtgtgataatgcctggaaggtccatatcgctaagttctccttactggttggattaatctttggctacctaataactggatgcattgctgactgggtcggccggcggcctgtgctgctgttttccatcatcttcattctgatctttggactgactgtggcactgtcagtgaatgtgacaatgttcagcacactcaggttctttgaaggattttgcctggctggaatcattctcaccttgtatgctttacgaatagagctgtgcccccctggaaaacggttcatgattacgatggtggcgagcttcgtggccatggcgggccagttcctcatgcctgggctagccgccctgtgccgggattggcaggtgctgcaggccctcatcatctgccccttcctgctcatgctgctctactggtcgatattccccgagtccctccggtggctaatggccacccagcagtttgagtctgcaaagaggctgatcctccacttcacacagaagaatcgcatgaaccctgagggcgacatcaagggtgtgataccagagctggagaaagagctttcccggaggcccaagaaggtctgcatcgtgaaggtggtggggacacggaacctgtggaagaacattgtggtcctgtgtgtgaactcgctgacggggtacgggatccaccactgctttgccaggagcatgatgggccacgaggtgaaggtgccgctcctggagaacttctatgctgactactataccacggccagcatcgcgctggtgtcctgcctggccatgtgcgtggtggtccgattcctcgggcgcaggggagggctgctgctcttcatgatcctcaccgccctggcctcactcctgcagctcggcctcctcaacctgattggaaagtacagccagcacccagactcagggatgagtgacagcgtcaaggacaaattttccatcgcgttttccatcgtgggcatgtttgcctcccatgcggtggggagcctcagcgtgttcttctgtgcggagatcaccccgacggtgataaggtgtggcgggctggggctggtgctggccagcgcgggcttcggcatgctgacggcacccatcatcgagctgcacaaccagaaaggctacttcctgcaccacatcatctttgcctgctgcacgctcatctgcatcatctgcatcctcctgctgcccgagagcagggaccagaacctgcctgagaacatttctaacggggagcactacacgcgccagccgctgctgccgcacaagaagggggagcagccactgctgctcaccaacgccgagctcaaggactactcgggcctccacgatgccgcagccgcgggtgacacactgcccgagggtgccacggccaacggcatgaaggccatgtagcccggcctgcggaacccggggctccagggtctggggcagcttgggcacaggtttacagaccagggaccgaacacgcagccaggggtgggaaagctgcctcagccaagctgagcctctcaactggtgtggggaaatcctgtctttccaaaagtccaaggagcgcgggtcggaggagacaaactctttggaaataaccctttcaagactttcttttctgccgttaaatgtgtgtatttattttggtcatttttacgagaagcactttattccctctccctctcactgatcacaaatggaatcacctccctgggcagcgagacgcagttgctctgggaagatgccacagtgaccagggccatggccggtccctctggggagatgggacacggctcctggcagcacccaggagccccccaggctgcctgcctgcgtgcagaggcaggagaggaccgtggagcgtttccgggactgcattttagacggagtgaaatgtacatgaatttggcttttgctagagtctgtgtatggttttttaaggtcctttttccctttctgtttgtaaggtaagagcttctgttcgtgtgcagggaaagcagctcacagacgccgttaaaaccagcttcatctttccttcaggatcatccttttgtacttgatgctggaagctcttggagaaaaagcttaaacatttcaccagaaatcttaattgagcagcagtcatatcgccacagctttgtgagtacacagctaacagatgcgtcgagacctgagatgtgctcgtttttattcctcctctcccagattggctccagcagaaaagtccctcgtgcacaggcagctcttgtgccggcactacttgaaaacatggctactttctaagctacaaaccattagaaaataactcaaaaagatggcagaggcaaatccacagaaggggggctgccctccacacacacacgcccgtcacccacaccttgagcacacaccatgaagatcaccagcttggatggccgtcacctcagacatcactccagggagcacccgcaggagctgggccccctcacgcctgccttcctgggccagcttcctgcttgcagtcactcgcatagcacagaggtggggcttcgggcagggagcggagattcctcataggtgagtccaaatgacctccagcctctcgaaggcatcaagacaaattgaaagaaagcaataactcaccaaagctcaacgctgcccctgcctcgacctccatgggtctcttcgtgttcctcgtttcaccccagaaagtggaggtttcctcttggcattttcggaggaaacttgtaggacacccaaggcgactaagagacagcctccttggcaagggcaggcaccactttgtagcaacttgggcaccagcttttctggacagcctggcttcttactggcattgtccaactcatcccttctcgaagcatgtctttgccatgggctgtgtccttccagggaaattgtggtctcgggcctgggtgagacaatgaagtgacttccaaccgacagttgctagaattcacagggcagaaaaggggttgaccttctccccttctggctttccacccggcctgctgcttgctgtcgccactcatgtctcctccacatgcggtccacacatcagtaagggcctggagatgtgtaaagacacagcaaggggcaagcagactcttggccacgtgtttccagtggctggaccacgccgacacctgggatcttgagatacccaggaagggaggctgtctggccagcctctccctgcctccacttgctccacgtccagctcctcaccttccctcttttttaaagtcacatttccatgtttcaacattagtttgcattcacctttacaaaggcctttctttagatctgtgcagcctttgcgtgccaaacttgtgaaattccttttaccttttttggagtacttgctataaagccacctgtcaacaaacccccattatgtacagaataggacctatccagtagccaggccagtaggcagttggggaaggtgggaaggatccagcgaggcccctgagcctgcacctggacaggtgtacgtctgcacccatcaccctcagcaccaggccaccctgcagtccacttactgtactgtgttgtggaaggatatgctaagtgatgaaagttgcgagcagtctcactggtcgtgtaaacttttttttttttttggaaattgaagctgtagagtgctgcccgaaatctctaggaagttggtggcaagggacagcactcacactcttctggtcatgatctctgatctccacctcaaatgacaataaaaaactggtccaacgaagacactgctcagcacttcagccatcaggactaatccatcgatgactggaaaagaggctagctttgaggaaaacagcctgggctcttgggagcagagtccagtgggtgtgaggctgacttgccgacggtcggcaggtaatggctctcagccggcgaggcggtcccacagctctcctcccagggcagcctgaggaggaggaggccgggtgcctgtttggtggcagcttcagcctagggatacctgaagctgttgagcaacacctttatgaaatgttgccagagcagcaacacttccctgtgggcacagccccgggaaatccggtaccaagtgagcaaggtggcaggacccacccaagcctgatacgcatctgggcccgccgggctcagcaggggaggctgctacggctgcccacttcccagcaccgtctgtcacgcttgaacccctctgtgctgttcccttcctggctaatagggagacccttcgcaggcacccactgtttcaacttgaccctcccaccccctgctactctcctccacacacccctccgttccgctagcctaccctgtcagcctttcaataaaagttatgcacaaatgtgaacacctgagatggagctgaacatttcttcactttgttctttttctgaagtcaaactcttatcaaatgccctaaaattattaccacccaagagaaacaggaaaaaggttacatgtttttgtttactgagagtaagatcacctgcatctggaagacgggctggtaaattggtttggctacagaacagaaagaaaacaaaaacaaacctcgtaagggaagtatcacactcagacaccaccgcttcctagagccaaatgagcaatcccaaactgcaagtgccataagtgggcctgtgaggtcacaccgcccggcccgaggtatcgcatgtgcgggggaggtccacactacagctgtcctctcgtctagaaggcaccacctcgctttcatgtcccgtgtgttttggaaaagcagtatggtgtgtcatgtctagcggcgaacacttccctccctgtccttgaggttgtaatataaaaactgtgtttctgtacgtgtgggtgggaattctctgacggtgctcgttcatagcacaagcttacgctgagttctgaactgtcgttcacagctgcgtgtctgcatggtgtcgcatctgttgtacctttggggaaaatttgtatgtaaatgtacagaaataaaaacgttgccccattaacagatttcctctggaatgtcttccctacctcacctgatggtatccaccgaagggcatttcactaccattaatggtgagtaataaaatcctccgtgttcattcagacctcactgcgtcactactttgaacgcctctgtaagctgtgtcttcactcgccccgaggtgggtggagggaggcctctcactctgcttcgagtcctggtcttaaaggtagtcagaggcagaggctggattaaacacacactgtttaccaagtgccactctcagaccacctgagagacgggggccatcagtaaaattaagaggaatttttttcccttgttcgtgtatgttctgctgatccgtggcctgaaggttcctagagacgtcaagaaatgaatatcttacactgtgattctgtgaggaaagactggtaacccaaaactctcttctctaatgtattttttaacgaaaatgacaatatttctttaataaagtatttataccaaaaaaaaaaaaaaaaaaa

SEQ ID NO: 777 - DNA, 3129 bp, Homo sapiens
gagtagttctcctgggtccgctctgcgggcttctgggagatgtagtttctggtctgtaggcaggacggaaggagcgggggaggccccttacgcaaactacaattcccggcggggagcgcggtgaagcgggggtgggatctgaacatggcggcggtggtagctgctacggcgctgaagggccggggggcgagaaatgcccgcgtcctccgggggattctcgcaggagccacagctaacaaggcttctcataacaggacccgggccctgcaaagccacagctccccagagggcaaggaggaacctgaacccctatccccggagctggaatacattcccagaaagaggggcaagaaccccatgaaagctgtgggactggcctggtacagcctgtacacccgcacctggctcgggtacctcttctaccgacagcagctgcgcagggctcggaatcgctaccctaaaggccactcgaaaacccagccccgcctcttcaatggagtgaaggtgcttcccatccctgtcctctcggacaactacagctacctcatcatcgacacccaggcccagctggctgtggctgtggacccttcagaccctcgggctgtgcaggcttccattgaaaaggaaggggtcaccttggtcgccattctgtgtactcacaagcactgggaccacagtggagggaaccgtgacctcagccggcggcaccgggactgtcgggtgtacgggagccctcaggacggcatcccctacctcacccatcccctgtgtcatcaagatgtggtcagcgtgggacggcttcagatccgggccctggctacacctggccacacacaaggccatctggtctacctactggatggggagccctacaagggtccctcctgcctcttctcaggggacctgctcttcctctctggctgtgggcggacctttgagggcaatgcagagaccatgctgagctcactggacactgtgctggggctaggggatgacacccttctgtggcctggtcatgagtatgcagaggagaacctgggctttgcaggtgtggtggagcccgagaacctggcccgggagaggaagatgcagtgggtgcagcggcagcggctggagcgcaagggcacgtgcccatctaccctgggagaggagcgctcctacaacccgttcctgagaacccactgcctggcgctacaggaggctctggggccggggccgggccccactggggatgatgactactcccgggcccagctcctggaagagctccgccggctgaaggatatgcacaagagcaagtgatgcccccagcgcccccagcccagcccactccccgcatggggaggccgccaccaccaacacctcatcatccttctcatcgctaacaccaccacctccatcggcacccaagcgggcatcatccccccacactgctcaggggaggggagggatcaggcgatgagactgtgaggccaaaagaagggggcctgttggaggctgggaaccccgcagcgcgaggctgcctcatcaacggcaagaggaaaggaggggtctcgggacatctccagaccctaccaactgggagggtcccctcctccttccctactcctgggacggcagcaaggacatgggggctgctgttagcttctccgtcaggaggcctcatctcactgtagccctggaacccagggtccatcttgcccttcccccatccatggttgggaaagaagctcagcccctcacagtggcctcaagtgtgatgccttacaaaagcaccactcagatgggcagctggactctggtgtcctgagactctgccctcttcccacagcctccctgccccacccatccctgcaaagccatttttcagacagagccattcctaagaacactgaagggctggaatgctggctggccactctctgcctcagtggcctccctacagcctggaagaaggagggtcctgattgccaaggaaacctcctcattgggctaaggagacactggagtctggagtgtggagccccacagtcttgcaggtcacatgctctccttgcacatctggcctggttgtacccactggcctctgcctctgccctgggccaaaagggcccctccttgccaggggagagacagccacggtcctctttggccgatgctgtattctcattttggcccttgttcttaggcccgtctgcccgccttcctccatctaacctttcctgttttatccgcagcccttttcttctttgagttagtaaagatttattctgtaacctgacactcatctggccctttgcagtttgccagccatattcccatgtgatttcccactggatccaggcccccatccggctggcaggagggggctctgacgtgcaggttggaaatcagaagtctgtgagagcgcgggagtgcatggcagctctgggtcccagacctggcccgacccctctgcttcacctccagctctgctgctcctctactcttgggtcgagatccctttggagccacagcgaggaaccctgtggtcctcaggcaggtgtaccttgagtcagccaggagccctcttttcctgtgtcaaagcctgccctcgggctctgctcacctctggtgaccctccaagatgcccctgccctcagtttcccctcatgatctggcctctgcccccttctctagccacagcctctagtacactttagcaataccaccagactagttagagttccccactcaccaagcaagacatgcagtttcatgcctctgtgccttcgctcatgctgtttcttccgactggaatgccttcccctgctcctcctgccttgtctgcctggcaagttcatctctcacgatcccctcaaaggccccctcctccaggaaggcaacccctgtgcccctcccctccaggctacctctgcactttgtcaatgcttctcttgtggcacttatcacactgtattttacttgtttacatgtttgtctccccttctagactgtgaatccttaagggcatggactgtatcttatgcatctctgtatttctgcgcctagcacggtgcctagcacacagtaggcgctcaataaatgttgaatgaatgaatgatttaatcaagaaaaaaaaaaaaaaaa

SEQ ID NO: 778 - DNA, 4631 bp, Homo sapiens
gccagaggagcggctccggccgccgcgcctgacccttgtccggggtcttccgcacagtgggctgagggccatgtcagttttctgccacctacaggatagaccatgaagctgaaggaacttgagcggccagctgtccaggcatggagcccagccagccaataccctttgtatctggccacaggaacatctgcccaacagctagattcctccttcagcacaaatggcacattggaaatatttgaggttgatttcagggacccttctctggacttgaaacacagaggagtcctttctgccttgagcaggtttcacaagctggtctgggggagctttggcagtgggcttctggaaagctccggggttattgttggcggcggggacaatggcatgcttattctatacaatgtgacccacatcctgtcttcggggaaggagcctgtgattgctcagaaacagaagcacacgggggctgtcagagccctcgacttgaatcctttccagggcaacctcctggcttcaggggccagcgattctgaaatcttcatttgggatctgaataacttgaatgtgccaatgaccctgggatccaagtcacagcagcctccagaggacatcaaggcactgtcttggaaccggcaagcccaacacattctgtcttctgctcaccccagtggcaaggcagttgtgtgggatctcaggaagaatgaacctatcatcaaagtcagtgatcacagcaacaggatgcactgctcaggcctggcctggcatcctgacatagccacccagttagtgctgtgctcagaggatgatcgacttcccgtgattcagctgtgggacttgcgctttgcctcctcgcccttgaaggtgctggagagccacagcagggggatcttgtcagtgtcatggagccaggctgatgctgagctgctgctcactagtgctaaggacagccagatcttgtgccggaacctggggagcagtgaggtggtatataagctaccaacacagagcagctggtgctttgatgtgcagtggtgccctcgggacccttcagtgttctctgctgcctccttcaacggctggatcagtttgtactctgtgatgggtaggagctgggaagtccagcatatgagacaggctgacaagatctcctcttccttcagcaaaggccagcctctcccaccactgcaggtgccagagcaagtggcacaagcaccactgatacctcccctgaaaaaaccccccaaatggattagaagaccaacaggtgtttcatttgcttttggagggaagctggttacttttggcctccccagcacccctgcccatctggtgccacagccttgcccccgcctagtcttcatcagtcaagtcaccacagaatctgaattcctgatgcgatcagctgagctgcaggaggccttgggatcaggaaatctactgaattactgtcagaacaagagccagcaagctttactgcaaagtgaaaagatgctgtggcagttcctgaaggtgaccttagagcaagactccagaatgaaattcctaaagcttttaggatacagtaaagatgagcttcagaagaaggtggccacatggttgaagagtgacgtggggctaggtgagagtcctcagcccaagggaaatgacctcaacagtgacagacaacaggccttctgcagccaggcctccaaacacaccacaaaggaagcctctgcttcctcagccttctttgatgagctggtccctcagaacatgactccttgggagatccccatcacaaaagatattgatggactcctaagccaggctctcctgcttggggaactgggtccggccgtggagctgtgtctgaaggaggagcgctttgctgatgccattatcctggcccaggctgggggtacagatctgctgaagcaaacacaggagcgctacttggccaagaagaaaaccaaaatctcctcgcttctagcctgtgttgtgcaaaagaattggaaggatgtggtgtgtacctgtagcctgaagaactggagagaggcactggctttgctactgacatactcaggcacagagaaatttcccgagctctgtgacatgctgggaactcgcatggaacaggagggcagcagggcactaacctccgaagccagactctgttatgtgtgctcagggagtgtggagcggctggtggagtgctgggcaaaatgccaccaggctttgtcccccatggctctgcaggacctgatggagaaggtgatggttcttaacaggagcttggagcaactgcggggtcctcatggggtgagcccaggccctgccacaacctacagggtcactcagtatgccaacctcctggcagcccagggcagcctggccactgccatgagctttctacccagggactgtgctcagccaccagttcagcagctaagagatcggctttttcatgctcaaggttctgctgtcttgggccaacagtctccccctttccccttcccccggattgttgtgggagctaccctccactctaaagagacatcatcttacagattgggatcccagccttctcaccaggtcccaactccatctccaaggccaagggttttcacccctcagtcatcaccagcgatgcccttggcaccttcccatcctagcccttatcagggtcccaggacacagaatataagtgactacagggcacctgggccccaggccatccagcctttgcctttgagccctggggtaaggcctgcttcatctcagccacagctattaggagggcaaagggtgcaagttcctaacccggtgggattccctgggacatggcctcttcctggttcccctctacccatggcatgcccaggcatcatgcgacctggctctacctccctgcctgagactcctagactgttccctctgcttcctctgagaccactaggtcccggccgcatggtctcccacaccccagcccctcctgcaagcttccctgtgccataccttccaggggacccaggtgccccatgctctagtgtcctcccaaccactggcatcttgactcctcacccaggacctcaagattcctggaaagaagccccagcccccaggggaaacctccagaggaacaagctgccagagacatttatgcccccagcaccaattactgctccagttatgagcctcacccctgagctacaagggattcttccctcacagccccctgtctccagtgtgagtcatgctcccccaggagttccaggagaactcagcctgcagcttcagcacctgccacctgagaagatggaaaggaaggagctgcccccagagcatcagtccttgaagagcagctttgaggcgcttctccaacgctgctccctgtctgcaactgacttaaagacaaaaaggaagctggaagaggcagcccagcgtctggagtatctatatgagaagctctgtgaggggacactctcacctcatgtcgtggctgggctccatgaggttgcccgatgtgtggatgcaggaagctttgagcagggccttgcagtgcatgcccaggtggcgggctgtagcagcttcagcgaggtgtccagcttcatgcctatcctgaaggctgtcctcatcatcgctcataagctgctggtctaaaccaggcagcctctcttgctaggaggccacttctgctgttacataactcctccctgcagaagaggggacttctgcaacagattctgtttctttttcccgactcttttccttgctgccaggtatgtgatgctgtaggcttggctccaaaccagctgagtgcctgctttttactcctttatgtctggccttctaggatctgtccaagacactctcaggcctggaggcagggcatagaatcagttcttcactctccctaatactacactctgtaaggacctggggcaggatatcttctcccccagggatcttctatttaagtggcttctgagagggtgaacaggattgttacttttaagcctacctctgctgtgacccatcatgtgggtcttttgtttctcccttctgtggtttatgagcctgcccttaccttttccctgcctctgacttggtatttccaggtccgtatttctctgtagcccagggtctggggtagagctgactgctgttcaccctttgaacaactcatggacgtgagggatgggtgctgagcagaaccaagagaggaaactttggcgctgttaaaatggaatttctcatctgccggcattattaagggtgggctaggttggatggaaggtgaaagggatgaactgccttttgctggaagctgtcttaggctgtgagacaggagcaggggaaccacagcctatggggaactgcccttgactccacctatgttggagccttagcccaaggccattccttctgtgatgataaagcccagttctggaattggagccatattaaggaatgattctcttccagcgctgctcctcaagggttgggggtccttctccctcgcagccaccacatgtctcagggctaccttctccgattggatttgcatttgtggcactgtctttgatgcagtgatgtacttaatggtgcaataaagctgcttcgatttggtaaaaaaaaaaaaaaaaaaa

SEQ ID NO: 779 - DNA, 4443 bp, Homo sapiens
gcagacggcgcccagcggcggcgcgaacggcagctaggagggttgctccgggcttggtgctcactgcgacttcccgcgcagggcccggtcggactaggacccgcggcctgagagacgctggaggatgcggacgcggaggccgcctggggtagcggcggcgggagtcctggcgctctgcaggtcagaagttgagtagcaggggcctaggagggctcgaagccttcacagcgatggcagagaagcgacccctgagaaccctggggcctgtgatgtatggcaagctgccccgcttagagacagactccgggctcgagcacagcctgccccactctgttggtaaccaggatccctgcacctacaaggggtcctacttctcctgccccatggcgggtactcctaaggccgagtctgagcagttggcgtcctggaccccatacccacccttgtactctaccggtatggcaggacccccacttcaggcagacaacctgctgaccaactgcctgttctaccgctcgccagcagaaggccctgagaagatgcaggactccagccctgttgagctcctgcccttcagtccccaggctcactcctacccaggcccaccactggcagcacccaaacctgtctaccgcaaccctctgtgctatgggctctcaacttgtctgggggaaggagcagtgaagaggccactggatgttgactggactctggcgactgggcccctgttgccctcagctgacccaccctgctctctggccccagctcctagcaagggccagactctggatggcaccttcttgcggggggtgccagctgaggggtccagtaaagactcctcagggagcttctccccatgccagcccttcctggagaaatatcagaccatccacagcacgggcttcctggcctccaggtacacaggtccttaccctaggaactccaagcaagcaatgtctgaggggccctcaagtccttggacccagctggcccagcccctggggccaccctgtcaggacaccgggcccacccactacccaccaccccaccacccaccaccccaccctccacaggccctgccttgccctccagcctgtcgccacccagagaagcagggcagctacagcccagcactcccactgcagcctctggggggccacaaggggaccgggtaccaggctggtgggctgggcagcccctacctgaggcagcaggcagcccaggcaccttacattcccccactggggctggacgcttacccctacccctctgcccctctcccagcaccctctccaggcctcaagctggagccgcctctcactccacggtgcccattggactttgccccccagacactgagttttccttatgcccgggatgacctctctctctatggagcatcccctgggcttggagggacaccaccttcccagaacaatgtgagggctgtgccacagcctggtgccttccagagggcatgccagcctttgccagcgagccagccctgctcagagcctgtgaggcctgcacaggaagccgaagagaagacctggctgcccagctgcaggaaagagaagctccagccccggctcagtgagcactctgggccgcccatcgtcatccgagacagtccagttccctgtacccccccagcactgcccccctgtgcccgggagtgccagtctcttccacagaaggaggacgcaaggccacccagctctccaccaatgcctgtcattgacaatgtcttcagcctggccccctaccgtgactatctggatgtgccggcacccgaggccacaactgagcctgactctgccacagctgagcctgactcagccccagccaccagtgaaggtcaggacaaaggctgcagggggaccctgcctgcccaggagggcccctcagggagtaaacccctaaggggctcacttaaggaggaggtagccctggatttgagtgtgaggaagcccacagcagaggcctcccctgtcaaggcttcccgttctgtggagcatgccaagcctactgcagccatggatgtgccagatgtgggcaacatggtgtcagatctgccaggcctgaaaaagatagacacagaagcaccaggcttgcctggggtgccagtgaccacagatgccatgccaaggaccaacttccacagctctgtggccttcatgttccgaaagttcaagatcctccgtccggcacctttgcctgcagccgtggtcccgtccacgcccacctcagctcctgctcccacacagcctgcacccacccccacatctgggcccattggactgcggattctcgctcaacagcccttgtctgtgacctgcttcagcctggcactgcccagccctccagccgtagctgtggcctcccctgcccctgctccagctccatcccctgctccggctcgagctcaggctccagcttcagcccgggatccagctccagctccagctccagttgcaggccctgctccagcatctacttcagccccaggggactccctggagcagcattttacaggactacatgcgtccctgtgtgatgctatttctggctccgtcgcccactctcctccagagaagcttcgcgagtggctagagacggctgggccctggggccaggctgcgtggcaggactgccagggtgtgcaggggctgctggccaagctgctgtctcagctgcagcgcttcgatcgcacccaccggtgccccttcccccatgtggtgcgagctggcgccatcttcgtgcccattcacctggtgaaggagcggctcttccctcggctgccacccgcttctgtggaccatgtgctgcaggagcatcgtgtggagctgcggcccaccacgctgtcggaggagcgggcactgcgggagctcgccctgccaggctgcacctcacgcatgctgaagttactggcgctgcgccagctgccggacatttaccccgaccttctcggcctgcagtggcgcgactgtgtacgccgccagctgggtgactttgacactgaggctggagctgtgtcctcctcagagcccactgtggccagagatgagccagagagcctagccctggctcagaagtcaccggcccccaaggtcaggaagccaggcaggaagccaccaacccctggcccggagaaagcagaggcagctgctggggaagagtcctgtggtgcctcccctacccctgctaccagtgccagcccacctggccccacactgaaggcccgcttccgcagtctgctggagaccgcctggctcaatggcctggctctgcccacctggggccacaagtcctcaagaccagaccagccctcaccctgcccacagctgctggacagccagagccatcacctgtagcactggttgccagtgctgtgtgtatagcagtcactctccacccttcccttctgcctgcccagctgccccggggccacgagtggatgctggggctgtggctgctcccctggaggggttccatctctgaccctgtggcccattcagggtgggctgaagagcccctgagcttttaacgtgagggtctttattggataggactactccctatttcttgcctagagaacacacatgggctttggagcccgacagacctgggcttgaatcccggctcgtgttcttgctgcaggacctgggcaagaaacttcacctctgctgagccctcattccccatgtgtaaaatgggacaacgcaacctacctcacagggttgttgtggggatgctgcctgatacataccctgtcaccatttggtctctgcttcctctctgggacagggcctagaattggaggcagagaaccttcctatagaaagtcttcgtgtgtcctaggacttggctatcgtagagtggtaccttaggcagtggatgtgactcacactttcaggagtcaccccccagcatttggggttgggttggccctactccagcctggagctccctgagggagcctgcactccctgctcccaatccccgctactggtgcagggatgcagcctggagctggcgtccttgttctgggcctgctgctgccgccaccccaggaggccccaggcctgtcctgaattgacatcagtgcttccctgaactgcctcccccacccctggcattatcccaggaaacttatgttttctagaagctaagcagctgctgggactcagggactggtgcaggtaggctgagtggcagctcagtcctagaaggtctctgaagatctggactgaggaccctgctactccccaagccagagcccatcagccaggcctgctgtgagccacctgcctgtggagtgctgagctcaaccaaaggctggcaagctctgggcctcatttaagggattctgatgagccgatgggccctggaggcagcccattaaagcatctggctcgtttttggaaaaaaaaaaaaaaaaaa

SEQ ID NO: 780 - DNA, 4812 bp, Homo sapiens
gcgctccagacaagatggcgcggccggtccggggagggctcggggccccgcgccgctcgccttgccttctccttctctggctgcttttgcttcggctggagccggtgaccgccgcggccggcccgcgggcgccctgcgcggccgcctgcacttgcgctggggactcgctggactgcggtgggcgcgggctggctgcgttgcccggggacctgccctcctggacgcggagcctaaacctgagttacaacaaactctctgagattgaccctgctggttttgaggacttgccgaacctacaggaagtgtacctcaataataatgagttgacagcggtaccatccctgggcgctgcttcatcacatgtcgtctctctctttctgcagcacaacaagattcgcagcgtggaggggagccagctgaaggcctacctttccttagaagtgttagatctgagtttgaacaacatcacggaagtgcggaacacctgctttccacacggaccgcctataaaggagctcaacctggcaggcaatcggattggcaccctggagttgggagcatttgatggtctgtcacggtcgctgctaactcttcgcctgagcaaaaacaggatcacccagcttcctgtaagagcattcaagctacccaggctgacacaactggacctcaatcggaacaggattcggctgatagagggcctcaccttccaggggctcaacagcttggaggtgctgaagcttcagcgaaacaacatcagcaaactgacagatggggccttctggggactgtccaagatgcatgtgctgcacctggagtacaacagcctggtagaagtgaacagcggctcgctctacggcctcacggccctgcatcagctccacctcagcaacaattccatcgctcgcattcaccgcaagggctggagcttctgccagaagctgcatgagttggtcctgtccttcaacaacctgacacggctggacgaggagagcctggccgagctgagcagcctgagtgtcctgcgtctcagccacaattccatcagccacattgcggagggtgccttcaagggactcaggagcctgcgagtcttggatctggaccataacgagatttcgggcacaatagaggacacgagcggcgccttctcagggctcgacagcctcagcaagctgactctgtttggaaacaagatcaagtctgtggctaagagagcattctcggggctggaaggcctggagcacctgaaccttggagggaatgcgatcagatctgtccagtttgatgcctttgtgaagatgaagaatcttaaagagctccatatcagcagcgacagcttcctgtgtgactgccagctgaagtggctgcccccgtggctaattggcaggatgctgcaggcctttgtgacagccacctgtgcccacccagaatcactgaagggtcagagcattttctctgtgccaccagagagtttcgtgtgcgatgacttcctgaagccacagatcatcacccagccagaaaccaccatggctatggtgggcaaggacatccggtttacatgctcagcagccagcagcagcagctcccccatgacctttgcctggaagaaagacaatgaagtcctgaccaatgcagacatggagaactttgtccacgtccacgcgcaggacggggaagtgatggagtacaccaccatcctgcacctccgtcaggtcactttcgggcacgagggccgctaccaatgtgtcatcaccaaccactttggctccacctattcacataaggccaggctcaccgtgaatgtgttgccatcattcaccaaaacgccccacgacataaccatccggaccaccaccatggcccgcctcgaatgtgctgccacaggtcacccaaaccctcagattgcctggcagaaggatggaggcacggatttccccgctgcccgtgagcgacgcatgcatgtcatgccggatgacgacgtgtttttcatcactgatgtgaaaatagatgacgcaggggtttacagctgtactgctcagaactcagccggttctatttcagctaatgccaccctgactgtcctagagaccccatccttggtggtccccttggaagaccgtgtggtatctgtgggagaaacagtggccctccaatgcaaagccacggggaaccctccgccccgcatcacctggttcaagggggaccgcccgctgagcctcactgagcggcaccacttgacccctgacaaccagctcctggtggttcagaacgtggtggcagaggatgcgggccgatatacctgtgagatgtccaacaccctgggcacggagcgagctcacagccagctgagcgtcctgcccgcagcaggctgcaggaaggatgggaccacggtaggcatcttcaccattgctgtcgtgagcagcatcgtcctgacgtcactggtctgggtgtgcatcatctaccagaccaggaagaagagtgaagagtacagtgtcaccaacacagatgaaaccgtcgtgccaccagatgttccaagctacctctcttctcaggggaccctttctgaccgacaagaaaccgtggtcaggaccgagggtggccctcaggccaatgggcacattgagagcaatggtgtgtgtccaagagatgcaagccactttccagagcccgacactcacagcgttgcctgcaggcagccaaagctctgtgctgggtctgcgtatcacaaagagccgtggaaagcgatggagaaagctgaagggacacctgggccacataagatggaacacggtggccgggtcgtatgcagtgactgcaacaccgaagtggactgttactccaggggacaagccttccacccccagcctgtgtccagagacagcgcacagccaagtgcgccaaatggcccggagccgggtgggagtgaccaagagcattctccacatcaccagtgcagcaggactgccgctgggtcctgccccgagtgccaagggtcgctctaccccagtaaccacgatagaatgctgacggctgtgaagaaaaagccaatggcatctctagatgggaaaggggattcttcctggactttagcaaggttgtatcacccggactccacagagctacagcctgcatcttcattaacttcaggcagtccagagcgcgcggaagcccagtacttgcttgtttccaatggccacctccccaaagcatgtgacgccagtcccgagtccacgccactgacaggacagctccccgggaaacagagggtgccactgctgttggcaccaaaaagctaggttttgtctacctcagttcttgtcataccaatctctacgggaaagagaggtaggagaggctgcgaggaagcttgggttcaagcgtcactcatctgtacatagttgtaactcccatgtggagtatcagtcgctcacaggacttggatctgaagcacagtaaacgcaagaggggatttgtgtacaaaaggcaaaaaaagtatttgatatcattgtacataagagttttcagagatttcatatatatcttttacagaggctattttaatctttagtgcatggttaacagaaaaaaattatacaattttgacaatattatttttcgtatcaggttgctgtttaattttggagggggtggggaaatagttctggtgccttaacgcatggctggaatttatagaggctacaaccacatttgttcacaggagtttttggtgcggggtgggaaggatggaaggccttggatttatattgcacttcatagacccctaggctgctgtgcggtgggactccacatgcgccggaaggagcttcaggtgagcactgctcatgtgtggatgcccctgcaacaggcttccctgtctgtagagccaggggtgcaagtgccatccacacttgcagtgaatggcttttccttttaggtttaagtcctgtctgtctgtaaggcgtagaatctgtccgtctgtaaggcgtagaatgagggttgttaatccatcacaagcaaaaggtcagaacagttaaacactgcctttcctcctcctcttattttatgataaaagcaaatgtggccttctcagtatcattcgattgctatttgagacttttaaattaaggtaaaggctgctggtgttggtacctgtggatttttctatactgatgttttcgttttgccaatataatgagtattacattggccttgggggacagaaaggaggaagttctgacttttcagggctaccttatttctactaaggacccagagcaggcctgtccatgccattccttcgcacagatgaaactgagctgggactggaaaggacagcccttgacctgggttctgggtataatttgcacttttgagactggtagctaaccatcttatgagtgccaatgtgtcatttagtaaaacttaaatagaaacaaggtccttcaaatgttcctttggccaaaagctgaagggagttactgagaaaatagttaacaattactgtcaggtgtcatcactgttcaaaaggtaagcacatttagaattttgttcttgacagttaactgactaatcttacttccacaaaatatgtgaatttgctgcttctgagaggcaatgtgaaagagggagtattacttttatgtacaaagttatttatttatagaaattttggtacagtgtacattgaaaaccatgtaaaatattgaagtgtctaacaaatggcattgaagtgtctttaataaaggttcatttataaatgtcaaaaaaaaaaaaaaaaaaaaaaaaaaaaaaaaaaaaaaaaaaaaaaaaaaa

SEQ ID NO: 781 - DNA, 6786 bp, Homo sapiens
ggctcctcgggctaatcgccgggcggcgcgcgccgagaagttctgggcaaagtactcagaactggccgcgtgctggtggcgcccgccagccggcccgggagaggggacttgagcgcttcgcggccggtgcgcagcgcggctccggccccgcagtctgtctgcaagtggccatccccgcccccgactcctgcggccggtgcgggagctgtcagctgcacgttgcgggggtaccggagaagccggggttgccttctcccggttctgtgcgctaaccccggagcccggccccggggaactagggagcgtctccggctgcacagcgctcaggttttagggtttcctttgggccacccaaaatgttttttaaatactttggataagagctaaaccacctgccactggggacttccatactctcggctcccttgtcatctgatggcattttgattgtctcgaggccaagtgacttgctgtccatgatgagtgatgagaagaaccttggtgtgtcccaaaaattggtatcaccttcaaggagcacaagtagctgctcttccaagcaaggaagtcgacaggacagctgggaagtggtggaaggactgaggggggagatgaattacacccaggagccaccagttcagaaaggatttttgctgaaaaagaggaagtggcccttaaaaggctggcataagagattcttctatctggacaaaggaatcttgaaatatgccaagagccaaaccgatatagagagagagaagctgcatggctgcattgatgtcgggctctcagtgatgtctgtaaagaagtcatcaaaatgcatagaccttgacaccgaggagcacatctaccatctgaaggtcaagtcagaagaagtctttgatgagtgggtatcgaaacttcgccaccacagaatgtatcgtcagaatgaaattgccatgtttccacatgaagttaaccactttttctcagggtccaccatcacagactcttcatctggggtgtttgactccatttcaagtaggaagcgtagcagtatatcaaagcagaatttatttcaaactggaagcaatgtatcattttcttgtggtggtgagacacgagttccattatggttacagtcttcagaggacatggaaaaatgctccaaagacctggcgcactgtcatgcctacctggtagaaatgagccagctcctgcaaagcatggacgtcctgcatcggacatactcggcaccagctatcaacgccatccagggtggatcttttgaaagtcccaaaaaggaaaaaagatcgcacaggaggtggcggtccagagctattggcaaagatgctaaaggaacactgcaggtcccgaaacctttttctggcccagtaagactacactcctccaatcctaatttgtcaacactagattttggagaagagaaaaattattctgatggctctgaaacctcatcagagttttctaaaatgcaagaagatctgtgtcatattgcccataaagtttacttcactttaaggtcagcttttaatatcatgtcagcggagagagagaaactgaagcagctgatggagcaggatgcctcctcctccccgtctgctcaggtcattggtctgaagaacgccctgtcatccgccctagcacaaaacacagatcttaaagaacgcttacgcagaatccatgccgagtctctgctcctcgactcccccgctgtcgccaagtcgggtgacaatctggcagaggaaaactccagagatgaaaaccgagctctagttcatcagctttctaatgaaagtagactctccatcactgactccctttctgagttttttgatgctcaggaagttctgttatctccaagctcttcagaaaacgagatttctgatgatgactcatatgtcagtgacataagtgataatctttccttagataatctcagtaatgatttagataatgagagacagaccttggggcctgtccttgatagtggtcgggaagcgaagtcccggagaagaacgtgcctgccggcgccctgcccgagcagcagtaacatcagcctgtggaacatcctgaggaacaacatcgggaaggacctgtccaaggtggccatgccggtggagctgaacgagcccctgaacacgctgcagaggctctgcgaggagctggagtacagcgagctcctggacaaggccgcgcagattcccagccccctggaaaggatggtatatgtggcagcctttgccatatcagcgtatgcatctagctactaccgagctggaagcaagccatttaatccggttcttggagaaacatatgaatgtattcgggaggacaagggcttccagtttttttcagaacaggtcagccaccatccgcctatctctgcgtgtcatgctgagtctagaaattttgttttctggcaagatgtgagatggaaaaacaaattctggggcaaatccatggaaattgttccaattggcacaacccatgtgactctgccagtttttggggatcattttgagtggaacaaagtgacctcttgcatccataacatcttaagcgggcagaggtggattgagcactatggagagattgtcatcaagaacctgcatgatgattcctgctactgcaaagtgaattttataaaggcaaaatactggagcactaatgcccatgagattgaaggcacagtgtttgacaggagtggaaaagcggttcatcggctgtttgggaaatggcatgaaagcatctactgtggcggcggctcctcttctgcctgtgtatggagagcaaatcctatgccgaaaggctacgagcaatactatagcttcacacagtttgcgctggaattaaatgaaatggatccatcatcaaagtctttattgccacctactgacactcgatttaggccagaccagaggtttctagaggaagggaacttagaagaagctgaaatacaaaagcagaggattgaacaactgcagagagaaaggcggcgggtcttagaagaaaatcatgtggagcaccagcctcggtttttcaggaaatccgacgatgactcttgggtgagcaacggcacctatttggaacttagaaaagatcttggtttttccaaactggaccatcctgtcttatggtgaaaaagtaaagaagaaagataacattagtgtatttctcctgtgcttgccttctgaagtggcacaaacctgtgtttatatatttaaaagatactctaggatgatcacttgtgcttagcttagcattgtaactctttaagtctatattttcctcagtgcgtttctttacaatttcaaatgttaccctgattgtttatatgaatgtagaacaccttgacatttctttttatatataaactatttaataaaaatgaaagattgaatgttcatgtgtgggttaaaaaaagaagctttaacactaattttccaaaggttagggaagattccaattaaatttatgccttataaaattatgttgtagaaaaaaaatcaacctctcccaggtgcattaagaaataagaattcccagggttactcacccatgcgtaagctacccaagtttaatttggtagctgaaatatctttttgcctcagacagctcttgaattgctcatacagaacaattctgctggtgctggagtctgaagaatattttcatttgcattttagtggttagggagaggatataagattaatggaatgtatatttttatataagacgtatacggcaccttcttgaaaaggaagcatttgaacttgttcctccctatagttctattgccttatatgcaaaattgtaccctgttgctcagagaaattattcataagagaaaagaattccaattaattaaatatcacaatagcatcccagagagacagtaggaaatttctccttagtgagagctgagtccttgagaagttaagagactgtttcctgcttcccaccccaccccgttttttgtccctccgtttgatcacctccctgttgagtatggaatgtcccagtttaatataaaacatacagtttattccacacagcagtttgactttgtaaaagtttagcaaaataactgattgttttggataactcaacatgtttttcttaaatgctgttttagtattttctacctcttaataagcaccatattttagatcttgtataaaaagttgccatctgccttatagacaaatgtagagaattgatgttcttgctttgtgttgtgttctggtaaagctttaagtgagtgtcttacccctttcctatactttcttgttatccatatcattcttttgtgagttttgcagcagtcttgaataatacagattataactactgaaaggggaaccttcgtctttttaaatgtgttatttcacattacaataatatgtgtagtagttgaattgtgttatcaaagcatgtccaacttctgtccagatgacattaaaaccaaagcctaattgttaagcctcttattctaaagtccatagcaatgctatggaatatcaagtataatgatgtagtaaaaagatttctccagaaaacactttgagatacttaaagaaattcagagcatatcgaatgttatgaatgaagagtaaaataattacaggaaaagaatgcatgatttttcattgtcacaccaaataaccagttggacaatattgcattttcaaaatggagagttatttaaagtggatgtgtagccttctggaatctgcacgtgactggcattttaaaacaactcattaaatattggattcattttatcgagatgccaagatgaacacaatgtgaatatcatttccatttctaagcagttgaatgacacagtcagattctttggtgtatgctttgttctttccatctcaagcatttatccaaattctgctcacagacatgaggaagcaggctgtagatttaagggcactcaaggggaaaacaaatgtagtttccacagtgtgaggataaatgtagaatcgtggtaatattggctgttaaattggcctgctccagagactggctcaaaaaagaaagaagcaacgaaaacaaaatgcacagcctgaatggacgtagcactgtcatgtggcatttggaaaatctttaattatcctaatgttatttcacttgcccttatgctttattttagagtcccagggacaactggatgaaacattacgtctgtagtcatcttatttgagatgggggtgggaacgaattaaaatatgatagagaactatatgcagattttaaaatctagtcagtactagcatctataaagggcttttctgaaatttaaacagcttggtgatgcatcctgatattataagcttaaaactatcttgagggggaaatgacttcttttctccttctgtcccttttctcaaaagcatctttcccccaaatgtatgtctctaggacattttatagttttaagaggaagaaaacagaaacgtggcatcatttgggaagaaccaaggtagaatttaattttctggactttaaatctcctggttaaataatgctaatcactgtaccatttgagttacatgttttaacctcttttttttttctaattattccatccaaaatttctggtgaattacacagaaatttttggaaatgggactttgtgcaggtaaccaccctgcacttcaggtaatgttcctgtcacagctgtcgactaccccacgctgcaggaaatccattcagaaatgagctaacagtctccagtgtagcaggagagccagtcacttccctccccaggccccaaagcaccccaaggctggtattccttgagtcataggtattaataataaaagcctcaatgcagcttctccatgtagttcctctcctacaagccaggtggattctggtcctaactaaagagatgggagttcacctgagggcaagaagtacccaggatgcccaaacagccgcacaggtgtcctgtgcttcctgtgagacttcctgggggaaatatacaaactaatatattttttaatgtttacgtcatttacactgctgcttttctcatattctgcttttaattacttgtagtaaatcatttgtttgggcttcaagcactgtcttccatctgcatcttccagatttatcatgagtgatcttgttctactgttaaagatgtcaagcctaaaaagtaataaagtttttatttggctgttgaaccttgatgtagcccctactacatacactacaagttatgccttctggctactacagaatctccgcagaccttttagttatgagtagaagcaataagaaggtgtccttatggtcttaggaataatagttccaatgtattggcataatttgtttgaatgtctttattttgatattaacaccggcataaatctatttttgctaccagatgatagctattttcatttgctctattttcctctgcattgtactaatctgttactcagtgttagtcttcatttttctgtgttggaaacctgcgtcatgtaaatatctgcaaatcatgacagtctaaagtgcaaaccattttcagagactttggggaatgcagtgatcagaagtggctaatttattttatttctgattattttatccagagggtacttttttaatggatatttgtaaatcttccacttaaccactgaaaattattttgttttaatcccacccttccatccatacctctgcctccccaaaaagctcctattaatttgcttatccccctcatgtagctagttgaatgtgaataaataacatggaaaaaaaggc

SEQ ID NO: 782 - DNA, 7756 bp, Homo sapiens
agtggggcagcaaatggacagggtgggtggcggaaaagggcccgggggaagttattacagggtgtcctcttccgccgccagaagccggaagttgtgtcccggacgtgtcaaccggggtctgagtgctcagagtacagctgcaaccgcgaccatgggcgggaagaacaagcagcgaactaaagggaacctgaggccttcaaacagtggccgagctgcagaactccttgccaaagaacagggaacagtgcctggatttattggttttggaacatctcagagtgacctaggctatgttcctgctattcaaggagctgaagaaattgacagtcttgtagattctgatttccgaatggtgctgcggaaactttcaaagaaagatgtcaccacaaaattaaaagctatgcaggaatttggaaccatgtgtacagagagagacacagaaactgtgaaaggagttcttccatattggccaagaattttttgcaaaatttcacttgatcatgaccgtcgcgtccgagaagccacacaacaagcttttgaaaaacttatccttaaagtaaagaaacagttggctccctacttaaaaagtttaatgggatattggctaatggctcagtgtgatacttacacaccagctgcgtttgcagcaaaagatgcatttgaagcggcttttcctccaagcaagcaacctgaagccatagcattttgtaaggatgaaattacaagtgtgctgcaggatcatcttataaaagaaacacctgatacactcagtgacccgcaaactgttccagaggaagaaagagaagctaaattctaccgggttgtaacttgttccttattggcattaaagagattactttgccttttacctgataatgagcttgattctctggaggagaaatttaagtctcttttatcacagaataagttttggaagtatggaaaacacagtgtacctcagattcgctcagcttattttgagttagtctctgcattgtgccagcgcattccacagttgatgaaagaggaagcatccaaagtgagcccatcagttctacttagcattgatgacagtgacccaattgtctgcccagctctctgggaagctgtactctatacacttacaactattgaggactgttggcttcatgtaaatgcaaaaaagagtgtgtttcccaagctatcaactgtgattcgtgaaggtggtcggggtctagctactgtcatatatccttaccttctgccattcatcagcaagctccctcagtccatcacaaatccaaagttggatttcttcaaaaatttcctcacgtctctagttgctgggctgtcaacagagagaactaaaaccagctctttagagtcctcggcagtaatatctgctttttttgaatgcttacgttttataatgcagcaaaacttaggtgaggaagagattgaacagatgctcgtcaatgatcagttgatcccttttattgatgcagttctcaaagacccaggattgcaacatgggcagctatttaaccatttagcagaaactctaagttcctgggaagccaaagcagacacggaaaaagatgaaaaaacagctcacaacttggagaacgtactgatacatttctgggaaagactgtcagagatctgtgttgcgaaaatcagtgagccagaagctgatgttgagtccgttttgggtgtatctaacctattacaggtgcttcagaagccgaagagctcattgaagtcaagtaaaaaaaaaaatggtaaggttagatttgctgatgagatacttgaaagcaataaagagaatgaaaaatgtgtatcttcagaaggagagaagattgaaggctgggaattaacaactgaaccttctctcactcataattcttcaggccttttgtctcctctaaggaaaaaacctttggaagacttagtctgtaaactcgcagatataagtattaattatgtcaatgaacgaaagtcagagcaacatctaaggtttctttctactctgcttgactccttttcttcaagccgagtatttaaaatgctacttggtgatgaaaaacagagtattgtccaagccaaacctcttgaaatagccaagcttgtacaaaaaaatcctgcggtgcagtttttataccagaaactgataggttggctaaatgaagatcaaaggaaggattttggtttcctggtggacattttgtacagtgctctccggtgctgtgacaatgatatggaaagaaaaaaagtcttggatgatctaaccaaggtggacttgaaatggaattctcttcttaagattattgaaaaggcatgtcctagttcagataaacatgctttagtaactccttggctcaaaggcgatatccttggtgagaaattggtcaacttggcagattgtctttgtaatgaggacttggaatccagggtatcttcagaatctcacttctcagaaagatggactcttctaagcttggtattatcccaacatgttaaaaatgattacttgattggagacgtatatgttgaaagaatcattgttagacttcatgaaactttattcaaaacaaagaaattatcagaagctgaaagcagtgactcatcagtgtcttttatctgtgatgtggcctataactatttcagctcagcgaaaggatgcttgctaatgccatcatctgaagatttattattaactctctttcagttatgtgctcagagcaaagaaaaaacacatttgccagattttcttatctgtaaactgaaaaatacttggctctctggtgtaaatttattggttcatcaaactgacagttcatataaagagagtaccttcctacatttgtctgctctgtggctgaagaaccaagttcaggcttcatctttggatatcaacagtctccaagtcctcttgtctgctgttgatgatttgctaaatacacttctagagagtgaagattcttatcttatgggagtttatattggaagtgtaatgccgaacgacagtgaatgggaaaagatgaggcagtctcttcctatgcagtggttacatagacctcttttagagggaagattgagtttgaattatgaatgtttcaaaacagattttaaggaacaggacataaagacacttcccagccatttgtgtacttcagcattattgagcaaaatggtcttaattgcactgagaaaggaaacagtcttagaaaataatgagcttgagaaaataattgcagaactgctttattcactgcagtggtgtgaagaattagataacccacctatttttctaattggattttgtgaaatacttcaaaaaatgaatattacgtatgataacttacgtgtacttggtaatacgtcgggccttttgcagctgttatttaacaggtccagagaacatggcacactgtggtctcttattattgctaagttgatcctttcccgaagcatttcatctgatgaagtaaaaccacattataagagaaaagaaagtttttttccactaactgaaggcaatttgcataccattcaaagtctatgtccatttttgtcaaaagaagaaaagaaagaatttagtgctcaatgtatacctgctcttttgggctggactaagaaagatctttgcagcactaatggaggttttggacatcttgccattttcaattcttgtctgcaaaccaaaagtatagatgatggagagctattacatggaatattaaaaatcataatatcctggaagaaagagcatgaagatatttttcttttcagttgtaatctatcagaagcaagtccagaggtactgggtgtaaatatagaaataatccggtttctttccctatttctgaaatactgctcatcccctttggcagagagtgagtgggacttcatcatgtgctccatgttggcttggttggagacaacaagtgagaatcaggcattgtattctattccacttgtgcaactgtttgcctgtgtcagctgtgatttggcctgtgacctcagtgctttctttgattccacaactctggataccattggcaatcttcctgtaaatctaatcagtgaatggaaagaatttttttcccaaggcatccacagtttgcttttacctattttggtgactgttacaggagaaaacaaagatgtgtctgaaacatcctttcagaatgcaatgctgaaacccatgtgtgaaacattaacgtatatctcaaaggaacagctattgagtcacaaacttcctgcaagattagttgctgaccaaaaaacaaacttaccagaatatctccagactttgttaaatacattggccccattactcctcttcagagctaggcctgtgcaaattgctgtttatcatatgctatacaaattgatgcctgaattaccacagtatgatcaggataatctaaagtcatacggagatgaagaagaagagccagccttgtcaccaccagcagcactgatgtctcttcttagcattcaagaggacttactagaaaatgttttggggtgtattcctgttggacagatagttactattaaaccactgagtgaagacttctgttatgttctgggataccttctcacttggaaattaatactaactttcttcaaagctgcatcatcacagcttcgggctttgtattccatgtatcttcggaaaacaaagagtttgaataaattgctctatcacctgttcaggcttatgccagaaaatccaacctatgcagagacagcagttgaggtcccaaataaggaccctaaaacattctttactgaggagctccagctgagtattagagaaacaacaatgcttccataccacattccacacttggcttgttcagtctatcatatgacattaaaagacttgcctgccatggttaggttgtggtggaatagcagtgagaagcgtgttttcaatattgtggatagatttacaagcaagtatgtcagcagtgttctttcttttcaagaaatatcttctgtacaaacaagtacacaactatttaatggcatgacggttaaagctcgagctactactcgagaggtaatggctacttatactattgaggacatagttattgaacttataatacaactgccttcaaattatccactgggttcaataatagtagaaagtgggaaaagagtaggagtagctgttcagcagtggcggaactggatgctgcagttaagcacttacctcacccatcagaatggaagtattatggaaggcttagctttatggaaaaataacgtagacaaacgttttgagggtgttgaagattgcatgatctgtttctcagtcattcacggtttcaactattcccttcccaaaaaagcctgtagaacatgcaagaaaaaattccattcagcctgcttgtacaaatggtttacatctagcaacaaatccacttgtccactgtgtcgtgagacgtttttctgagatttttttcactggaagggatccctgaagtacatcaaacaaaggcattggatttggatccgtctgaaagtgtggatgtggggaagccagtgagcattacttttaaataggaccttctctggaaaattattttggttaatgtaataatcctaaaatcaggtttacttaactttagattgctttgtaaatgtttggaaactttcttttacaaaagaatattacatatttgagagaaaatatttctattaatggtttaatttctttgtatatttaaaaataaatatgaaaaacccctaaattacagaattggaatttgtgaaaagattgcacaactatattattgataaacccattccgtttgttgatctgtgttttagaatagtccaagtgaagcaaaacgaactgagagagctgatttacatctatagatattttaagccttatttattagttatgacaataaattagtattctgatatttgtagattattttaatgataaaaatgacactaagctattaatacggcttgtcttaagatatctggaggcatgctctgaaatcctatataaaagagtttaaactgaactttaaggtgcctccatttatcaagggttatgaaactcagaaaattaaattcttgatgctgacctttttgcttgtgggagaattatttctatatattagtgaaatttgaattgtaaacttgtcagtgaatttatcactctgagcgagtctctagagggtgagaatttgagagaaatagtaatttgattatttcattcatgaagcggagtggtagttatccttctattgagagggaagaaataaatgagtattactgaaacttaaagatcagtggaaaaaaaaaacatttaaaaatgttgtaggagactttcaattttggaagcaaactgagctattcttaccagccaaagttatactaaataagagacttgggggagcaaatgtttttcagccttcagaaatgaaagttaaggattttagcactaggtaaaattcagtataataggctgaagtggagtaagtgaaaacctgccttttgccactcttaaaaattgtgcccaaaatataaaagtgtggaactttagaacttggaataattttattgcagtcttccattacatggaaatagcatatctaatatctaggttacttgagagaccagctaatcatctctgttgcacatgtttaattggcaaaaagcaattcatgataaataaaattactgctttccatctactgggtaaaatgactattgaaatagtatgaatgtggtcagaggattatagttgagagtgaagtactatgtgtgagttatagatctctcgaattatatttatagatgcagtgtcctgcccagttttgtttgcctcctacattttactgtaaaatatttattgtcttctagccttgagcctctgagggtcagtaagtgaagtacagatagcaaaattttactacctcgttaacccttttcttaaaatattctctatctttctatgtctctttctgacatagtaatcccaaaggattgtgttactccccgtgaaagttattacttttcctttaaaaatggttttataataagactgtttaaaacctttccagtattggtacatcttggcttctggcccaaaccccaagcagaaaagaaaatggaataatggagcattgtttttccacattagtattagggcatcagattcttggtgaaacactataattaagtagttataattaaataactgttcttcatacttaggactcttaatacatttctttaagacttgtaagtataattgtaaagcttgttaactgtttatatactaaagaaaaagctttacaagataagactgaaattcagaataccacatctgtacagcgttgacaactctaactaaaaggattacagcccttaaaattttagcttaaggacattttaaaattgcatgagattagcaaaattattaatttaaaaccccaaagtaaattgcaaattttaaaatttatttttgactcttttatcacatgctccaatgtatgtacataagtgtctgtggcttaaataatatgttgttatttgatacatttttgtggtgcaagtaattaatgttattatttgattgttataccatatgtgcccattaaaattctttttaattaaaaatatttcaaatatgcagaaaaataataatataaatgcccttgtacccttcacatactattttgccatatttgcttctgatttttaaataaataaaatgttactcttttgtacttct

SEQ ID NO: 783 - DNA, 2593 bp, Homo sapiens
cattcattggtcccgccgcaccgggcctgctgggctccgcttccgttccactgctcagctgccgcctggtggggccaccaagggcaggcatcccaggggctttgtctgactggactgggccagtgcagaatgggggttcaggcagggctgtttgggatgctgggcttcctgggggtggccctggggggctcccctgccctccgctggtacaggacctcctgccacttgaccaaggccgtccctggcaacccactggggtacctgagcttcctggccaaggatgctcagggactggccctgatccatgcccgctgggatgcgcataggaggctgcagtcatgtagctgggaggatgagccggagctcaccgcagcctacggtgctctctgtgctcatgagactgcctggggctccttcatccacacccccggacccgagctgcagagagcactggccactcttcagagtcagtgggaggcatgccgagcgcttgaggagagtccagcaggggccaggaagaagcgagcagcagggcagagtggagtccctggtggagggcaccagcgagagaagagaggatggaccatgcctggcacactgtggtgtggagttggagattctgctgggaactcctcggagctgggggtcttccagggacctgatctctgttgccgggaacatgaccgctgcccacagaacatctcacccttgcagtacaactatggcatccgaaactaccgattccacaccatctcccactgtgactgtgacaccaggtttcagcaatgcctacagaatcagcacgactccatctcggacatcgtgggcgtggccttcttcaacgtgctggagatcccctgctttgtgctggaggagcaggaggcgtgtgtggcgtggtactggtggggcgggtgtaggatgtacggcacagtgcccctcgctcgcctgcagcccaggaccttctacaatgcctcctggagctcccgggccacctccccaactcccagctcccggagcccagcccctcccaagcctcgacagaagcagcaccttcggaaggggccaccacatcagaaagggtccaagcgccccagcaaagccaacaccacagccctccaggaccctatggtctctcccaggcttgatgtggcccccacaggcctccagggcccacagggtggcctaaaacctcagggtgcccgctgggtctgccgcagcttccgccgccacctggaccagtgtgagcaccagattgggccccgggaaatcgagttccagctgctcaacagcgcccaagagcccctcttccactgcaactgcacgcgccgtctggcacgcttcctgaggctccacagcccacccgaggttaccaacatgctttgggagctgctgggcacaacctgcttcaagctggcccctccactggactgtgtggaaggcaaaaactgttccagagaccctagggccatcagggtgtcagcccggcacttgcggaggcttcagcagaggcgacaccagctccaggataaaggcacagatgagaggcagccatggccttcagagcccctgagaggccccatgtcattctacaaccagtgcctgcagctaacccaggcagccaggagacccgacaggcagcagaagtcctggagccagtgacctcagtttcagctttcctgggcaccagcctggaccttgcccatggctatgccaagccttgggaatctcagcctcccctccgtaggttagactgaagcatggcagaggctgttgtggacaatcaagaggatgaatggggggatctcaaggcccaaatgctggaccacatctcctgctgttctgggtaaccttgagctatgtatgacacaactcttctatgcctggatgtggtgttcaggaagctcattctgatgccctgggctttggccttgccagggaacttcacatacagatgagaatggggaaagggtaacttattgcagcagccccaggcagtaccaggaggaggtacatgtatgtccgtgttgcaaaaataatacatgcctcaaaaacctgcctaggggagccctagtgcctgggtgctgtggcctgaggtagcaggtgggaagttagggatgtcacagaaatgtctgtgtctgaatccaggattggggtgggtgttggagagggctttcagctcccctcctcccaggggggcctctttttttaacggctgccgtgcccttcctggcccagccctaaacctaaattcaaatctcctccatgcctttgcgcaaaggacctccctcttgcactctaagccttagtttcctcctctaaaaaaagggggtctctaaacaggagctacctcatagggttgttgaggattaagtgaaccaatacatatacagtgcttagcacttaataagtattcccccctgcgacacctagctgaactatggtttggtgtctgatcttgagaggttgatgtaaccttttaaaggcctcagttcgctcacctgtgaaatgggtctaagaatagcactgatctcacagggttgtgatgcagattaaaggagatggcatgtgtaatgtaaaaaaaaaaaaaaaaaaa

SEQ ID NO: 784 - DNA, 3901 bp, Homo sapiens
actcttccctcagtcttctcgagcacatcgtcgcaaacggggccggaaagcgtggcagcgcaggcgcaagcgcagagagcggaggcggtggtggtggcggccgctggccagttccttcagtgaatctacagacctattttctcaggagctcagcctggccttacttcagtgataaaaggaggaaaggctggctacagcaaacatcattcaagatgtccagcaaagggagcagcacagatggcagaacagacttagctaatggaagcctgtctagcagtccagaggagatgtctggagctgaagaggggagggagacatcctcaggcattgaagtggaggcctcagacctgagtttgagcttgactggggatgatggtggccccaaccgcaccagcacagaaagtcgaggcacagacacagagagctcaggtgaagataaggactctgacagcatggaggacactggtcattactccattaatgatgaaaatcgagtccatgaccgctcagaggaagaggaagaggaggaagaagaggaggaagaagagcagcctcggcgccgtgtacagcgcaagcgggctaaccgtgaccaggactcatcagatgatgagcgggccctagaggactgggtgtcctcagaaacatcagctctaccccgacctcgctggcaagccctccctgcccttcgggagcgggagctgggttcaagtgcccgctttgtctatgaggcctgtggggcaagagtctttgtgcagcgtttccgcctgcagcatgggcttgagggccatactggttgtgtcaataccctgcactttaaccagcgcggcacctggctggccagtggcagcgatgacctgaaggtggtggtgtgggattgggtacggcggcagccagtactggactttgagagtggccacaaaagtaatgtgttccaggccaagtttcttcctaacagtggtgattctactctggccatgtgtgcccgtgacgggcaggttcgagtagcagaactgtctgccacacagtgttgcaagaatacaaaacgtgtggcccagcacaagggagcgtcccacaagttggcactggaaccagactctccctgtacgttcttatctgcaggtgaagatgcagttgttttcaccattgacctgagacaagaccgcccagcgtcgaaactggtggtgacaaaagagaaagagaagaaagtggggctgtatacgatctatgtgaatcctgccaatacccaccagtttgcagtgggtggacgagatcagtttgtaaggatttatgaccagaggaaaattgatgagaatgagaacaatggagtactcaagaagttctgtcctcatcacctggtgaacagtgagtccaaagcaaacatcacctgtcttgtgtacagccacgacggcacagagctcctggccagttacaatgatgaagacatttacctcttcaactcctctcacagtgatggggcccagtatgttaagagatacaagggccacagaaataatgccacagtaaaaggcgtcaatttctatggccccaagagtgagtttgtggtgagcggtagtgactgtgggcacatcttcctctgggagaaatcatcctgccagattattcagttcatggagggggacaagggaggcgtggtaaactgtcttgagccccaccctcacctgcctgtgctggcaaccagtggcctagaccatgatgtgaagatctgggcacccacagctgaagcttccactgagctgacagggttaaaagatgtgattaagaagaacaagcgggagcgggatgaagatagcttgcaccaaactgacctgtttgatagtcacatgctgtggttccttatgcatcacctgagacagagacgccatcaccggcgctggcgagaacctggggttggggccacagacgcggactctgatgagtctcccagctcctcagacacatcggacgaggaggagggccctgaccgggtgcagtgcatgccatcttgaggcctcatacctaggtggggcaggctggggctgccaacctgatcctgcctgggcaaccctttcctgtcccaggccctacattcagcagaaacgcactttggactttttgctttagataaaagaaagacatcccaggagaaggacaaaccagaggagtgaaccaacaaagagtacctaggaatgggagttgagccctggaatggggctccatggagaggtgcataggactcggcagaaatggcctctccccaaagcctctttttgagaggagagggaagcctattttgttaactggtttgggatagggaatggggtttctttttctttaatctcccttgtttcttgggctgggggaggggtggggggaacaactggctattcagtaccaaggggccagagtggagggtaggagtgccactctctctttggtttaggtttttgaccttttcttcctttgttttttaaaagtttatgacagttggctccccccccacccccagcaaccccatcccagaatcctattttcctgggaagtccttaaagcccctaaccatcccacactcttcactttcctttccaccttattcattctctgtacttaccacagtattttgcacttgattacatatccttcactctcttctcttcatcccatcaccccctaaataggtcaggtgagggaggctgggaagaggtgggaggaggggcagaagtgaaggaagaataggaaggatattacctcttctgttatttttttaagaaacattgtttggtggcagcaatctccctgtccctatcactgttagaggcctaattttatatctataaatatattaaaaagcaagtcaaacttggatgtatcaaggtaaaattattgtcaaagtttaaatacctatatattctctgaatgcaataaagggacttaagagtgaacaagagtaatggtgtggaagtgacacctggggtcagtttacctctgtgtatggtcactagagattgggacttaccctttaggttttaggaggcttgagaatggaaggatcctcatttctgcccttcctggttccctgctttggtgtaggggttgggaaaaacaggaaattcctctcagctctgcctcagatctcctacctctccttaagtcttgtagggggttccaaggatggctcttctaaccagaggctggcctgtctttaaaacttaactactttagggtggtgccaccactgcagactattgtggtactttgtgacagaagacatgtacacacacaccacacacatacatacacactctctcactctgtctctcttacctttagctgcttgatcattaagccatccaacttcatgccagttcccttctttatagaagagtgaagggaaagacttcctgggtttgacttaaaccttgtccacctcttgatattttaggattgaggaataagtcattaatctaaggactgattacagtggctggagcttgggcacttgtcttatcactggtcactgagtctgaaagtcccagctgaattcttgcccttaagtgcttttgctgctatttttttgcccccagttccacaagatccaaccaagaattctgtatcctgggacagtcagattcttctaaatcaggccaggaaggaggggaaaagagtgagagaatggtattcccagatacttcttcctcctgccccttttcccagcagctctgagaccagatgttggctgctgtacttactccctgaggtagggaatgtgtggtgatcgagtggtctgtgttcctattgctggtggggtgatagggtgggctaaaaaccatgcactctggaatttgttgtattttctcccagtaaagcttttcttctcccgactgctaaaaaaaaaaaaaaaaaa

SEQ ID NO: 785 - DNA, 2806 bp, Homo sapiens
caaacaagacggctccgcccttctcaagatggcgctgcactcaatgcggaaagcgcgtgagcgctggagcttcatccgggcacttcataagggatccgcagctgctcccgctctccagaaagacagcaagaagcgagtattttccggcattcaacctacaggaatcctccacctgggcaattacctgggagccattgagagctgggtgaggttacaggatgaatatgactctgtattatacagcattgttgacctccactccattactgtcccccaagacccagctgtccttcggcagagcatcctggacatgactgctgttcttcttgcctgtggcataaacccggaaaaaagcatccttttccaacaatctcaggtgtctgaacacacacaattaagttggatcctttcctgcatggtcagactacctcgattacaacatttacatcagtggaaggcaaagactaccaagcagaagcacgatggcacggtgggcctgctcacatacccagtactccaggcagccgacattctgttgtacaagtccacacacgttcctgttggggaggatcaagtccagcacatggaactagttcaggatctagcacaaggtttcaacaagaagtatggggagttctttccagtgcccgagtccattctcacatccatgaagaaggtaaaatccctacgtgatccttctgccaaaatgtcgaaatcagaccctgacaaactggccaccgtccgaataacagacagcccagaggagatagtgcagaaattccgcaaggctgtgacagacttcacctcggaggtcacctatgacccggctggccgcgctggcgtgtccaacatagtggcggtgcatgccgcggtgacggggctctccgtggaggaagtggtgcgccgcagcgcgggcatgaacactgctcgctacaagctggccgtggcagatgctgtgattgagaagtttgccccaattaagcgtgaaattgaaaaactgaagctggacaaggaccatttagagaaggttttacaaattggatcagcaaaagccaaagaattagcatacactgtgtgccaggaggtgaagaaattggtgggttttctataggaagtttcaacgaatcacagcaaggcttttgtgccttgcactccatgcattctgataacggcagctttcctaaaaagaaaaagttatagttttgggacatttaatttggtatagctgattattggctttatttgatgaatattgctttgtagctttgaaatacgacagtgttccaaatcccatcaacaaaatgctgtgaacaacaacaacaaaaaataaatcaagaaggcatagctgtctgaatccccaattattgaggcacactccttggcctgcagaaatgtgattgaagtaaggagtaatttgggaaatggagtatcatttgtgcttctctctggagtacttactgtaacagatgcacacgttatctacttcaacccttttataaagcaatatatagaggtcttagatgtataatccttgagatgccatttgatcagatgccaatttgtattcagagctcataaaaacaagtccattcttatagtttgtttgtcactgagacggtgcctgatttaatatatttaagctgcttaacttgttttccaagagataacaccaactgttccagcaataatttgttttttaattcagagatatgggatatgatcttctaaggaggttgcattattttgacctgatttatttattgtacaagagcccaagtccctgaattatattcttaataagtgctttcttgcattcatttcagtttagtctcaccaaccccctatgaattaggagaattattgtcattttacacatgaggaaagtgaggctgagagaatccaattagcttgtacgatatcactccataagagaagcaaatctgagagtaaaacccttaccccttattcttaagaatagtgcttgtttattcagtacaaaaaaaatgctgaaaggcagcgttttttagactctaaacattctgattttgaaggtgggtgttggaacgactgatgatgttttttatatcatcaattcagccaatggatgcgaacttaaaatctggattcacagaaccgtggtcacatttccccatcaaaatccccaaggcgggtcccaagttctctcctctacgctcattgcagaaatactttgaaataggttctgccagtctacaatagcagtgaagactgacaaatcagatattcccaatgactgacagcttctcatcttgcctctacctcagttaagtaatgtcaccctgaaacctagcttttctgcacttccatttctgacacctgaaaatgaaaatgataatcctaacttatacaccaagacctgttagcaagatcgattttgtaacagaaattgcttataagttttttatcagtaaggaccatgatcaccatttgtacatacataactaggttgttgagcaaagcatttttgctcatgtttcttaaggaagtagagtagtccttgtgtcagaacacatgttaatccacaaaacgccccatcccagattccaaattaaaacatcgtttttaggattcttggagctagcctggatcatgggtaaaggaaacattttgccttttgtatcttatactggaatgggatgtctgtaagtcctagaacctctttgagcatatttcttacaagcctctgttttttcccctttaaaggaaactttgaaaggattgtgaatactggaaaatgacaaaactaaaggtagatctatcaagccaa

SEQ ID NO: 786 - DNA, 4541 bp, Homo sapiens
ttccggtactagcaaatcctcctgtatgtccccactggaagagtccggtgggaaaccgtgccaccgcaaggaaggagccggcggtagcttggttcctgagcggatgctggggctgtaaggcgcgcgcggtcagctgttggcggtgcagggaggaggacgccggggctcgccttccctcctctgccgccgctgccgccatgattccggtgtcgctggtggtggtggtggtgggtggctggactgtcgtctacctgaccgacttggtgctgaagtcatctgtctattttaaacattcttatgaagactggctggaaaacaacggactgagcatctcccctttccacataagatggcaaactgctgttttcaatcgtgccttttacagttggggacggcggaaagcaaggatgctttaccaatggttcaattttggaatggtgtttggcgtaattgccatgtttagctcattttttctccttggaaaaacgctgatgcagactttggcacaaatgatggctgactctccctcttcttattcttcctcctcttcttcctcttcctcctcttcttcctcttcctcttcttcatcttcttcctcttcctcgcttcacaatgaacaggtgttacaagttgtggttcctggtataaatttacccgtcaatcaactgacctatttcttcacggcagttctcattagtggtgttgtacatgaaattggacatgggatagcagctattagggaacaagttcgatttaatggctttgggatttttctcttcattatttatcctggagcatttgttgatctgttcaccactcatttgcaacttatatcgccagtccagcagctaaggatattttgtgcaggtatctggcataattttgtccttgcactcttgggtattttagctcttgttctcctcccagtaattctcttgccattttactacactggagttggggtgctcatcactgaagttgctgaggactctcctgccattggacccagaggcctttttgtgggagaccttgtcacccatctacaggattgtcctgttactaatgtgcaagattggaatgaatgtttagataccatcgcctatgagccccaaattggttactgtataagtgcatcaactttacagcagttaagtttcccagttagagcatacaaacgactagatggttcaactgaatgctgtaacaatcacagcctcacagatgtgtgcttttcctacagaaataattttaataagcgtttgcatacatgtcttcctgcccggaaagcagttgaagcaactcaagtttgcagaaccaataaagactgtaaaaaaagctcaagttcaagtttctgtataataccttctttggaaactcacactcgcttaataaaagtaaaacacccacctcagattgatatgttatacgtaggacatcctctgcatcttcactacacagtgagcatcaccagttttatcccacgttttaactttctaagcatagatctgccagtggttgtggagacatttgtcaagtacctgatttccctctcaggagctctggctattgttaatgcagtaccctgctttgctttggatggacaatggattctaaactctttcttggatgccacccttacctcagtgattggagacaatgatgtcaaagatctaatagggtttttcatcttgctgggtggcagtgtacttttggctgccaatgtgaccctgggactctggatggttacagcacggtaatgtttgcactcatctgacagaatccctgagttacagtatacagctatgtggtaatattcattgccattgaaattcttacttggtatgaaatataaagtgtttccttaaaattacatcttagccaacaaccctgagctcctcccatatccagagtacccaaactctgtggtagaagataagcagaagaaatgaaaggcatagtccctgactatattctaatttaggactgaatgtacccagatgcttgtggaataatatctaagcaagtgcaaattcatgtaataccgttttgtctgattacatattgtgttgaaatagtataaaggagaacagaactgggtggaattaattgggaaaaacttcttacaaaagcatcattaatcaaaatttgaaggagaccagactttggccaagtggaaggatgaccattgtcttggcctgtatctcttgtcctttgtcttgtttgaaaagtattttaaaacttaatggtgtattattttgtgctctgaaagctgaggtctgattacaattagtaaaattctatagaagaatctgctgacgtgaaagggaaaaatctttgtcaaatgataccaaataaatgaacaaaacaggaagtagggcctatgatatcgtgagacatgttttgccccacaagagttgcatcttttataaggtgtctctgccccctcataaagcagcactagctttgacatccacggtgagctgcaggaagcatcacacaccagcagcatgtgagcagagggaggcagttggggttgaacttcggaactaggccgggtctcctgacagatcacaagacaccccagaggatcttcagcagtcctacttcccattctctatagagctttgaagcttggaacccttccagggtaaacattttctcttgtgctgctcaggacatctggggcctagctcctgggttcctgtctccaagaagcaatgaccttaaactctgagccatactctgtcctcaccagcggctcccatgtttttctgtgtcaggttattaagtacctagtccttgttttctgtctctctcctaagctacctctctgggtccacagaagacttggtagtatagtgagaatggctatacgtgagtacaaacgtggattttccagggcttgggaactgattcttgagcccagaagagccacgcctgctttgaggtcttttggagtggagatgcagccctgggaaatttggggagtcagcaggccagtgtgaagctattggtcctaggagtatatgagcttgctgtttctttgatggaaaatacatgcttctcttgtatactcagaagtgactaagggcaataactcattaatagccatctatccaacttctttactgagtgatgtattccatggggttacctttttcagattattgagttgctctgtaagcactaaaactttttaatcatttttaagaaactttttagattgtattacaaatttgccttaacagtaattagatgttgaatataattttaacattttattaatgacttgggtcatcagttaataccagtactaaaaccatacgaattattggtttattccagaaaatacagtatttgttctatttttaggtagacaatcatttgggatcagagtacattagcatagtaatgctcagtcagacctgttcaagtagtagagcttggagaatgccatgaaatacttatataattaatttgattgcatgaactaagcaattttactaatgaaaaggttgtatatgtgcaagtcacttttttaaaaaccaagaaaaaactttaatagaggaaatcttattcattaatttatttttctgagtaaaaaaacgaaacccaaatctcattttatttcaactgttaaacattttgatctgttgacccataggatcaggatttgggaaccactttactaggaaagagcagatcagtaccatttgtataaaaccggcctcattatgtaagaaagaaaatgttacgtgttttcttctttagcttggttgtgggcacttctacagcaaggaccatatcatattcatctttgcatccctggcacagtgcatgagacataagtacttaataaatgcagttgaatggataatgattagtgttatttatggattagaaaaagcatgtttctatttaagtaagctgtaaaaagtattattgaatatttactgtaaatatatgttcacataaaaaaataacttggagggtctttgtgtccctggcatattatcatcttcatggaaagaatccactgtggtttctgtagagtgattggaaaaatggattattttgaggattgaagaaagtgttctttctgcgttgtcactttgttcaacagtaaaactttattctcagtgttcctactctgcattgtttacatttttgacagttttttttaatcacctacaatctgtaaagaatgtatatattcttttcagcatctcagtttgaaaagacatgcagttaaacttgaccttttgataatcgctcttacaggtcattgtctgttctaacagcaaattgtaaacatgtgcttcatagatattgtggctctcagtcatcactttgtcctatggtatttattgaatgttcacatactaatggtgcacaggtgtttttttctataaatcttctgactgtcctgtaattcattcttaagctttaacttgaaggtatcgtaattgccggcatttgatgtttagcaataaaagaataaatgtgtaccagcattttatgtttaaaaaaaaaaaaaaaaa

SEQ ID NO: 787 - DNA, 5865 bp, Homo sapiens
gcggggctcaggtgcctggcagcgcggccggggcccaggaaggggagggggcgaacgctggagcgaggcgggggcgggtgaggagggggtgacgccggacgcgtcgacagcgcgagggttcgcgcgtgagctgcgcgggtcgggcctggtaccgagctttcctgggggctagcaggtcgtggacgccggctcctggaggagagccggtaggagggaggtgaaggtgtccgcggcgtcgtcgacggcggcgccggccatggaggagacgcagccgccgccgcagcctaagctgcccctgtgcgacagcctcatgatctggctgcagacattcaatactgcctcaccttgtcaagatgtcaaacagctgactagtggagttgccatggcacaagttcttcatcaaattgatgcagcttggtttaacgaatcttggttaagccgaattaaagaggatgttggggacaactggagaataaaggccagtaatgtaaagaaggtccttcaaggaattatgagttattatcatgagtttttggggcagcagatttcagaagcacttatccctgatttaaaccaaataaccgaatgttcagatccagtggagcttgggaggttgctccagcttattttaggttgtgcgatcaactgtgaaaagaagcaagaacatattcaaaatataatgacactggaagagtctgttcaacatgtggtcatgactgctattcaagagttgatgagtaaagaaatattgagctctcctccaaatgatgctgttggagaattggagcaacagcttaaaagagccttggaagaacttcaggaagcactagcagaaaaagaagagctgaggcaaagatgtgaagaattggatatgcaggtgactacacttcaagatgaaaagaattcactggtttctgaaaatgagatgatgaatgaaaaacttgaccagttggatggctcttttgatgatccaaacacagtggttgcaaaaaagtattttcatgcacaattacaactagaacaattacaggaagaaaacttcaggcttgaagctgcaaaagatgattaccgtgttcactgtgaagaacttgaaaagcagctaatcgaattccagcataggaatgatgaattgactagtcttgcagaagaaacaagagccctgaaagatgaaatagatgttcttagggctacctctgataaagcaaataaactggagtcaacagttgagatatatcgtcagaagctacaagatctgaatgaccttcgcaagcaggtgaaaactttacaggaaaccaacatgatgtatatgcataatacagtcagcttagaagaagaattaaaaaaagcaaatgcagcacgtacacaattagaaacatacaaaaggcaggttcaagatcttcatgttaaactttcctccgaatccaagagggcagacacactagcgtttgaaatgaagcggcttgaagaaaaacatgaagctttacttaaggaaaaagagagactaattgagcagcgtgatactttgaaagaaacaaatgaagagcttcgatgttcacaagtacaacaggaccacctaaaccaaacagatgcatctgctacaaaaagttatgagaatcttgctgctgagattatgccagtggaatatagggaggtgtttattcgactgcaacatgaaaataagatgcttcgcttacagcaagaaggctctgagaatgaacgtattgaggaacttcaggagcagctagaacagaaacaccgtaaaatgaatgaactggaaactgagcagaggctgagcaaagagcgtattagagaattgcagcagcagattgaggacctccagaaatctttacaggaacaaggttccaagtctgaaggcgaaagttccagcaaattaaagcagaagttggaagctcatatggaaaaactcacagaggtccatgaagaattacagaagaaacaagaactcattgaagatcttcagccagatataaatcaaaatgtacaaaagatcaatgaacttgaagctgctcttcagaagaaagatgaagatatgaaagcaatggaggaaagatataaaatgtacttggagaaagccagaaatgtaataaaaactttggatcccaagttaaatccagcatcagctgaaataatgctactaagaaagcagttggcagagaaagagagaagaattgagattctggagagtgaatgcaaagtagcaaaattccgtgattatgaagaaaaactcattgtttctgcgtggtataataagagtctagcattccagaaactggggatggaatctagacttgtgagcggcggtggtgcctgcagtgacactggtgcgtgcactcctgcgcggtctttcttagcgcagcaacggcacatcaccaacaccagaagaaatctctctgttaaagtccctgctacaacatctgattaaactgcaaaaaaaacaaaacaaaacaaaaaaaccacataaaatagaagtgtccttaaaatattttgtacctttcaactaactaccagattgaaaaagagtttatgatgcgggatatcaggtattttaaaatcaacatgcatcaaattaattttgccagttgactttaaaaacaaattatagaattagccatctctctgagggagcacatttgaataattggagatgcagttatacacacatttcaaacaaacatttgtcttttgagagtattataatttcaaattggccttgtatattttagttaaatgttttcagttgtattagtaacttaattaattttcaatagctattcagtaatacttaatcttagaacattaattggatttgtttaatctttttttgttttttgttgatttatatgaaaacagtcttgaggcagggacatggagaactatgcaagggtgatttctttgacttaatatatacaaggctttacttctgtcccctaattcttccattgaatgtgtacctctaccttgtcatgtcatggaagatacaacatttggaagatctgacaattggaatgactttggaataataaaattgactaattggaaattttgcatattctgaaaatctaatctcatagttctaatttgtacctatggcaaataagggcttctggacatcatgtttaaaatgttaagcataagaaataaactgacatttgtaataggtgactttctgatggaaagcaagctatatatatatatatatatatatatatatatatatatatactttttgtgaaatgtctatatactttttaaggtaattaatgaagatttcagttattgcttttaagcataaagttgtatttagcttctgctgaaaaattgtatcatataataattttgcttcattgaaaagggatgttgcagtgatgaaacaaggtgggatcagtttgattttgtttacttattaaggagtttatcttgggctcagtttgtggtattcagttcgtttctgcccaaagctcttattttcagaggtgttacttttgaacttttggggtcatttttaaaagttagcacttttgaattttagttgtgttaaatatgtgctgtcgtatatcatagccatgagccatatatgacaatttaaatttaattaattataaactcagtctcttggttgcaccagccacatttcagatgctcaatagccacatgtggctagtgggtaccatattggacagggcagctatagaatatttccatcattgcagaaagttctattggatagtaccataatctttttatagtaacttggaaatactatttgatattagatgttagaccacaaaaagaagaaaaatgttaggactatttcagatataaaaaggaactgaattgtgacataattagcatcttacattccatacagttgaataccttatgctgtgacaaccatagttaatcatttcagtgctgttcaacatacatacctatcagcagtgtgtttagaccaggggtctgcaaactttctgtgaatggacaaagagtaaatactttagtaaatgtcttaggctttgtggcctacatgatctttgttgcaagtactcaactctgccattatagagttaaagcagccatacacaatatataaacaaaatgggcatagttgtatttcagtaaaactttatttacaaagacaggcggtaggccagatttggcttgcatgctgtagagctgtggtctaaattttattcatagactttctttgcaaatacagtgtgagtattgttccatttacagtattattattttttagatacctggtttttagattcttgcctggtaactttttactgaaaatacaagaatttcgtactgcatttgcatctccgagattagggagcacctgtcaggatatgttgttctatcagggttacttctgttgactacctcttagattttgatacagttatattgttgagtttcattttcatatattcttgtagtgtctgcttgcctgtgacttctggtaaaataaaataagcctttgaaaatattttagcatggtatttaacattttctaaatattatggcattttgacatattttagtcagcgaagacatctgcccctttggtgtttctacttgcttatgattgagattttacaagcccttcaaactccgttttaaaggaatttattgtaaaacattaactttaataaattagtgttttcacagatcagatcattatacttggaacttctaaatcatgcaatttctgaataaggacataaggctagattcatttttcttaatagagaaaaaggaaatttctgatttatcacttttctagttgataagtaggattcaaaacgtttgatatgtaagtatttatataagactaatgtaatttaaagttctgtattattgtgattaatcatacagaaattcaggaactgatcagaagtgagattcttttccacatctggttaatgtagtgagttgacaccctgtgggtggtaaagcattataaacatttcatcttgaaccatgatttatacacatctgtgttataagggaggcttgagtacatataccaatgaagagatattcagcatttgtctatttgataaggaattaaatgtcctagtgattataaagtaaaaccacagaccaatttgcaaatgatcttcaatgttaagcacttgctctaagattaaaattccttttctttttaaggttaagggtgtgtacgtatggcagtgatgtctatgttgagattaacttatgtattgaggaaaatttgaagtttattttttcgatgaataaggctgtcaaatgatttagtatagattaatgacatcttttttagaaatattaaagtgagtattcctcattatgtcatcatttctgataattagagtgctaatttgaatgttagataatgtttccacatctatacctatttctttctagggcacttctgaccctggggcttggggatggcctttaggccacagtagtgtctgtgttaagttcactaaatgtgtatttaatgagaaacattcctatgtaaaaatgtgtgtatgtgaacgtatgcatacatttttattgtgcacctgtacattgtgaagaagtagtttggaaatttgtaaagcacaaaccataaaagagtgtggagttattaaatgatgtagcacaaatgtaatgtttagcttataaaaggtcctttctattttctatggcaaagactttgacacttgaaaaataaaaccaatatttgatttatttttgtaagtatttaggatattattttaaataaatgattgtccattatcaatataatagttgtgaaatgatttaagtaaataaactttatgcttctgtgtctgttgaaaaaaaaaa

SEQ ID NO: 788 - DNA, 2714 bp, Homo sapiens
ggagcctgagcgaggagcccgcgagctctcctctctcctctgtctccgcggatgacgagtggctggataacatggagtcgggcaagatggcgcctcccaagaacgctccgagagatgccttggtgatggcacagatcctgaaggatatgggaatcacagagtatgaaccaagggttataaatcaaatgttggaatttgctttccgttatgtgactacaattctggatgatgcaaaaatttattcgagccatgctaagaaacctaatgttgatgcagatgatgtgagactggcaatccagtgtcgtgctgaccaatcttttacctctcctcccccaagagattttttactggatatcgcaaggcagaaaaatcaaacccctttgccactgattaagccatatgcaggacctagactgccacctgatagatactgcttaacagctccaaactataggctgaagtccttaattaaaaagggacctaaccaagggagactagttccacgattaagtgttggtgctgttagtagcaaacctactactcctactatagcaaccccacaaacggtgtctgtcccaaataaagttgcaactccaatgtcagtgacaagccaaagatttacggtgcagattccaccttctcagtccacacctgtcaaaccagttcctgcaacaactgcagttcaaaatgttctgattaatccttcaatgattgggcccaaaaatattcttattaccaccaacatggtttcgtcacagaacacagccaatgaagcaaacccactgaagagaaaacatgaagatgatgatgacaatgatattatgtaaggaatatagtctagtctagatgcatttcaaaaggaaagttggttttgagcccagtatactgaactagaatattctagatcttgttttaccttaaaagactgaaatgtagctgcagtatttttcgtcagttaaaactgttagatctctttagtaaacatacaaatgtgtttttcagtaggcttcaattacaaacagttaagtacttgtttcttaatagtttcattaatgttgagtcctaatatggcaattctgtttttgagacacttttctgccttctatcactgatagtagcatttaagtttcagattctacagcctagtcagcagatttatctttgacagcataatttctgatctacatttaaatactactttattttataaggtaatatagttacttactgtcactagctaatttttttttttttaccaaatctctcaatataggaaacattttttggaaaggatggatttagaggagagattctaaatccattttggatgtatttgtttctttgacttccttaacttccaaactcaactccctttctagatcccattcattttctgcacctcccccataggcttgtttctctccattgctattaaatgtagaaggccatacctggaattttaaaaatattattcctggtaatacagctcagtgtcattttcctatttttaaaacatgctctacatgcctaatgttttgtgattcactttaacctgatggtttgcatttgctgtttttcactcttatgtcagagcagttgggttttaccccttagtttttatgcctgttaagctttactgtgcttttgacaggtagttttgggtcagttatattcagttttagtattgtattccaagttgataactcttccatgtttcacatttctaaatttaacagagatgctgtagcttaaaacatgttttgataagtaattacactggacctaggcaaaaccactgaagaacaagtgttcctttttaccacatacatattatgttttgatcactgctgcttgagccccgctattggtataattcagatcattttagcttgttgctgaggatgtcacatataagacaggatcaaacctgaaagacactaatggttcatcctctataaggccaacaaagaaaacaaattaatgtgatgtaacttgcatttatgtgcactctgcataggtttcccaataatactgtaatgttgctgaacacctttccctgttttccatttatacacatattaaagtcatattgggaaagatggcaaagcttttgagaatataaacacacctgttttgtttttcttaagttcaacatacttttgtagaatttgtaaaataaatgttcgtatcataattgagaatttatagccaaggatcctcaaaacagaagtttcatcttaggatagtgtttgatatatctaagaaagtccagtaacagagaagaaatgtctcaaatgtctcgtatcagttttagtgtttttcagtattagggaaaggtaatataaaaacaggtaaaatgtataaaaatagacctgatcaacatcataggagataaatattcattatatagcataggatattattacttgaatgttctcagggaggcagcaagtcagaaggcctaggttctagtcctagctccatcatttaccaactgtgtgaccttacttcacctcttagccttgttctcctcactagcagtaggaaagtaacacctaccctgcctacctcacagggctgttgtgagggttcaattggtatatgtgaaaattctttcagaattgtaaaatgctatatgactgtaaggaattattgcatttgttccaaggttaataaaaatttgagcttaaaaaaaaaaaaaaaaaaaaaaaaaa

SEQ ID NO: 789 - DNA, 3272 bp, Homo sapiens
aataggaagcgctcttaaagcggcagtgagggtggctgcgtgtttccggaagacgtggcggctctcgcctgggctgtttcccggcttcatttctcccgactcagcttcccaccctgggctttccgaggtgctgtcgccgctgtccccaccactgcagccatgatctccttaacggacacgcagaaaattggaatgggattaacaggatttggagtgtttttcctgttctttggaatgattctcttttttgacaaagcactactggctattggaaatgttttatttgtagccggcttggcttttgtaattggtttagaaagaacattcagattcttcttccaaaaacataaaatgaaagctacaggtttttttctgggtggtgtatttgtagtccttattggttggcctttgataggcatgatcttcgaaatttatggattttttctcttgttcaggggcttctttcctgtcgttgttggctttattagaagagtgccagtccttggatccctcctaaatttacctggaattagatcatttgtagataaagttggagaaagcaacaatatggtataacaacaagtgaatttgaagactcatttaaaatattgtgttatttataaagtcatttgaagaatattcagcacaaaattaaattacatgaaatagcttgtaatgttctttacaggagtttaaaacgtatagcctacaaagtaccagcagcaaattagcaaagaagcagtgaaaacaggcttctactcaagtgaactaagaagaagtcagcaagcaaactgagagaggtgaaatccatgttaatgatgcttaagaaactcttgaaggctatttgtgttgtttttccacaatgtgcgaaactcagccatccttagagaactgtggtgcctgtttcttttctttttattttgaaggctcaggagcatccataggcatttgctttttagaaatgtccactgcaatggcaaaaatatttccagttgcactgtatctctggaagtgatgcatgaattcgattggattgtgtcattttaaagtattaaaaccaaggaaaccccaattttgatgtatggattacttttttttgtaaacatggttaaaataaaacttttgtggttcttctgaatcttaatatttcaaagccaggtgaaaatctgaactagatattctttgttggaatatgcaaaggtcattctttactaacttttagttactaaattatagctaagttttgtcagcagcatactccggaaagtctcatacttcttgggagtctgccctcctaagtatctgtctatatcattcattacgtgtaagtatttaacaaaaaagcattcttgaccatgaatgaagtagtttgtttcatagcttgtctcattgaatagtattattgaagatactaaatgatgcaaaccaaatggattttttccatgtcatgatgtaatttttctttcttctttcttttttttaaattttagcagtggcttattatttgtttttcataaattaaaataacttttgataatgtttactttaagacatgtaacatgttaaaaggttaaacttatggctatttttaaagggctattcatttaatctgagttttcccttattttcagctttttcctagcatataatagtcattaagcatgacatatccttcatatgatcactcatcttgagttaattagaaaatacctgagttcacgtgctaaagtcatttcactgtaataaactgactgtggtttcttaagaacatgacactaaaaaaaaagtgttttttttccaccgttgctgattattagacagtaggaaatagctgttttctttagttttacaagatgtgacagctttagtggtagatgtagggaaacatttcaacagccatagtactatttgttttaccactgattgcactgttttgtttttttaacagttgcaaagctttttaatgcataaaagtataattgaaatctgtggtatttatttacaaacatgtctacaaaaatagattacagcttattttatttttagttaaatctcttaatacacagagaactcccaatcttgctcatctaaataaggaaagacttggtgtatagtgtgatggtttagtcttaaggattaagacatttttggtacttgcatttgacttacgatgtatctgtgaaaatgggatgatattgacaaatggagactcctacctcaatagttaatggaataataagaggctactgttgtgtctaatgttcttcaaaaaagtaatatcctcacttggagagtgtcaaatacatactttgaggattgactttatataaggtgccctgtagaactctgttacacatatttttgacccatattatttacaatgtcttgataattctacctttttagagcaagaatagtatctgctaatgtaagggacatctgtatttaactcctttgtagacatgaatttctatcaaaatgttctttgcactgtaacagagattccttttttcaataatcttaattcaaaagcattattagacttgaaagggtttgataatctcccagtccttagtaaagattgagagaggctggagcagttttcagttttaaatgagtctgcagttaatatcaaatgtgagtttgggactgcctggcaacatttatatttcttattcagaacccttgatgagactatttttaaacatactagtctgctgatagaaagcactatacatcctattgtttctttctttccaaaatcagccttctgtctgtaacaaaaatgtactttatagagatggaggaaaaggtctaatactacatagccttaagtgtttctgtcattgttcaagtgtattttctgtaacagaaacatatttggaatgtttttcttttccccttataaattgtaattcctgaaatactgctgctttaaaaagtcccactgtcagattatattatctaacaattgaatattgtaaatatacttgtcttacctctcaataaaagggtacttttctattaattggtggtcaagtatatctgtgttatgaagttctaaaagctaatttagcattgcaaaataacctcatttttaaaaaattagccttatatgcagtgttctatttatcaaatgatcttcacatctttcatttccaaattgttgaaatgtactaatgaatacaaatagacttcaagtaagcaaaaatgttcttaattttgaaaactgtaaaataaagtcacttaccttgggcaatatgctatttttt

SEQ ID NO: 790 - DNA, 2714 bp, Homo sapiens
ccggggaatccggattccgggggttcaacgcccaggggttccatgagcccctactgttctcggacgcccggccggccccgacgcactcgtcctagcacccctcccctgtccggtcctccggcccctccgccgtcgcccctccggggtccagccgggcggggctgctccagggtcgcggctggcgcgggtccccgggccctggccctccggtgccccgggccaaggagagaaaacttgagcatccacgcacaggggtggggagcaggatcccactctgagggtgcactgccccgccctctccgggtctgcctcggccccgcccgggccccaggccccgccccctcccctcggccggcccgagagctccgggggccgctgcagccgcccaagcgcccgccatgcgcgctgcccgcgccgcgccgctgctccagctgctgctcctgctggggccgtggctggaggctgcgggcgttgcggagtcgccgctgcccgccgtggtccttgccatcctggcccgcaatgccgaacactcgctgccccactacctgggcgctctggagcggctggactacccccgggccaggatggccctctggtgtgccacggaccacaatgtggacaacaccacagagatgctgcaggagtggctggcggctgtgggcgatgactatgctgctgtggtctggaggcctgagggcgagcccaggttctacccagatgaagagggtcccaagcactggaccaaagaaaggcaccagtttctgatggagctgaagcaggaagccctcacctttgccaggaactggggggccgactatatcctgtttgcagacacagacaacattctgaccaacaatcagactctgcggcttctcatggggcaggggcttccagtggtggccccaatgctggactcccagacctactactccaacttctggtgtgggatcaccccccagggctactaccgccgcacagccgagtacttccccaccaagaaccgccagcgccggggctgcttccgtgtccccatggtccactccaccttccttgcatccctgcgggctgaaggggcagaccagcttgctttctacccgccacatcccaactacacttggcctttcgacgacatcatcgtcttcgcctatgcctgccaggctgctggggtctccgtccacgtgtgcaatgagcaccgttatgggtacatgaatgtgccggtgaaatcccaccaggggctggaagacgagagggtcaacttcatccacctgatcttagaagcactagtggacggcccccgcatgcaggcctcagctcatgtgactcggccctctaagaggcccagcaagatagggtttgacgaggtctttgtcatcagcctggctcgcaggcctgaccgtcgggaacgcatgctcgcctcgctctgggagatggagatctctgggagggtggtggacgctgtggatggctggatgctcaacagcagtgccatcaggaacctcggcgtagacctgctcccgggctaccaggacccttactcgggccgcactctgaccaagggcgaggtgggctgcttcctcagccattactccatctgggaagaggtggttgccaggggcctggcccgggtcctggtgtttgaggatgacgtgcgctttgagagcaacttcagggggcggctggagcggctgatggaggatgtggaggcagagaaactgtcttgggacctgatctacctcggacggaagcaggtgaaccctgagaaggagacggccgtggaggggctgccgggcctggtggtggctgggtactcctactggacgctggcctatgccctgcgtctggcgggtgcccgcaagctgctggcctcacagcctctgcgccgcatgctgcccgtggacgagttcctgcccatcatgttcgaccagcaccccaacgagcagtacaaggcacacttctggccacgggacctggtggccttctccgcccagcccctgctcgctgcccctacccactatgccggggacgccgagtggctcagtgacacggagacatcctctccatgggatgatgacagcggccgcctcatcagctggagcggctcccaaaagaccctgcgcagcccccgcctggacctgactggcagcagcgggcacagcctccaaccccagccccgagatgagctctaggtccaggtgatgactgcaaagcagtgtccaggagcaggccactactgcccagagagcagaggaggaggttgttggcagggactgcagatcctgtcagacctggccaccaccttgggcatggccactctgccctctggacctgtctttcatcgggagaaaccactcagagatggatcccattccctaaaggtctcacagcaaaggagcaggactcccaggcccctgtaccctgcctggcctgattcagggccttgtggcccccagcttctgtttcaagctgggcagaccccaggatcccttccctccctaaggactcagctgaggggcccctctgcccccttctacctccacctcagcaccctcccccagcttgatgtttgggtctccccagcaccctcctccctggccggtgcaaagtacagggaggtaaagcaggacccttgcagacatgttgcccagcacacagtaggccctcaataaaagccatttgcactttaaatataaaaaaaaaaaaaaaaaaaaaaaaaa

SEQ ID NO: 791 - DNA, 10396 bp, Homo sapiens
cgggcctgggctgtggctgtgactggcgctgccgtgggcgccgcagccctcgcgggagccggacgcggtaatgccccagcggcgcagcgggcggctgcgtccctgagccgctatataagcgcggcagggaacatccggaggggctgaagatgaaggtgcccgcgcatgggcccccgctgattgccagtccctcccgaccccgcgccccgcgcggagcccgaggccgccgaggacccgccttcgccgcagtagcagctggagcagcgacagaggcggcagctgcggcggcggcggcgcccgcgcccctcgcgccagcgcgtagagcggcggcggcagctcgggggccgccactgccccggctgccatgagttgtgcggaggtgatgtatcacccccagccttatggagcgtcccagtatctgcccaaccccatggcagcgacaacctgccccacagcctactatcagccggcgccccaacctggccagcagaagaagttagcggtattcagcaagatgcaggactctctggaagtcacccttcccagcaaacaagaggaggaggatgaggaggaggaggaggaggagaaagaccagcctgccgagatggagtaccttaactctcgctgtgtccttttcacttatttccagggagacattgggtcagtagtggatgaacacttctcaagagctttgggccaagccatcaccctccatccagaatctgccatttcaaaaagcaagatggggctaacccccctatggcgagacagctcagctctctcaagccagcggaatagtttcccaacttccttttggaccagctcttaccagcccccacctgcaccttgtttggggggagttcatcctgacttccaggtcactggaccccctggcaccttttctgcagctgatcccagtccttggccgggacacaacctgcatcagactggcccagcccctccccctgctgtgtctgagtcctggccttatcctttgacatctcaggtgagcccatcctacagccatatgcatgacgtgtacatgcggcaccaccaccctcatgcccacatgcaccaccgccaccgccaccatcatcaccatcaccaccctcctgctggctctgccctggatccatcctatgggcctctgctgatgccttcagtgcatgcggccaggattcctgctccccagtgtgacatcacaaagacagaaccaactacagtcacctctgctacctcagcatgggctggagcctttcatggaacagtagacatagtgcccagcgtgggattcgatacaggtctacagcatcaagacaagagtaaggaatcaccgtggtactgaaacacacaatcttagtgagttaagttgcagcataaatccaagggcccactgggaaaagatactgtcgggtttttccattcagcaataggacacgaaaggcatagaaggagaagacaaagtgtcacgcagttgactggttttcggcctttcttgagaaagcaaagtgggtcccagacattgaagaaaagcatttttatttgtttatttcctcatctgagcctttgccaactgtgcaactctctccttttgttatcttgcttttatcaatatatagctaagtttttgtttcattttgatttttttttttagccaaccaccttgtcaggaaaggatgaaccacacattaaaatgttcattctttcaggaatacaagtttgtagctctatgtgcatctatttttgtagaaatacaaaaagtttggtttagcattgatgggctatttttgagggatgtattttttttaaaattgtaaaaattgttgagttctgtttaaagaacttgctctcagagaagcactggcaaaaatgtttaaaatgcttatctctaagatgtctattatatgctctgtctgtgctttctaggttacctcaaatgttttgtttttttccttcttacaaaagtagctataccgtagtcaaaccaatgcagtattgtttttacattgaatctcagtaaagatttaattccatgctagctcaattagttttgaattatatgtatagcttgaaaagtttttttttaatgactgtgctaaagaaatgatattttattgctttgatttctcccaaagaataacttggaggttgactaataagaaagttggcataaactttcaatcaaatgaagagtttgcctagaggagactaattctctttctagcccatccaaatttgataaatggaaccagaggttatatacaactacaaggaaaaaaatgcatttaaccatgccacctatgagtgccagtgacttattttacttgtttttaattattcattcatggcaatttaaaaagtcatattttaagtgggatttgtttttcctgaagggcatttgaaggaacaatatctgggaaggtactagagaaattacaaagcccgagctctttcttataatgccacctatccctgtaagctaaacaaacaaacaaacaaacaaacaaacagttctatatataatagtttcaacacagaacttaacaagtctctttttttgtttgtttaaatctggctttacttgatttaattcctttttagaaagaaatttagggcaaaataaagtgtatattaggatttaaatttatgccacaatttaaaaataaaaccagaggttatatacaatttaaattgggctaaaaattaaaaatttgaggatttaacttgatatagctctcaggatctaaataaagtttaaattatcattaagacactgctaggagaagattaagattatgaaagtaacagttattgatactgctggacttcaaaggcaaagttcatttcttccattaactgcttccagagatgtcatgtaaaaaagttagtgtattagagaagttttttagctttataaagaggttttttcaaatttctcccatttttctctccacccacataaaatagtatgttcagtgaaatgccactttctatctttaattgttcgtatcatatatgcgaactttttagacatgaacatgacatgttcagctaggcagagttctcatagataattttcaaatattttccttggctgtaatttatgtattcatttatatcctatccgtcttttgagcttcagatctatatactcttttgtactctcatcactccgcactttgctgtttcttacctagactctcttttacacaatatgcacatttttaccattgtggggtccaaatttaagataccttccactcactaataatatgaacttatatttcctgggagtagccaggttaaattttctatactttggtccataatttgatttgatatgattgtttcatttataatttgcccaaatacatggagcacaaaatttagtgaatttataaatctggatttgccttgtgtccttctgagttttcaaaggcaagtattcaacagtccctgtgtgatgactgacagggttatttgcctcatccacatccaccttcggaatacattaacttcctttgtaatttatttgaaagtagtgttaaactcattcagatcattcagttggattttcccaatgaagaggaaaaggaaagtagttattcctagctccatttcttattttccaccaaatttaattgaagggcattaattagatgtcttcaccctgaatttagactttgctctgtgttctcccggtaactgtcagacaaaaagtttattggctctgaggaactgagaaatgttgggaacctggtttctgctgtacacaggaaagatttgtaagtgagctctctctttgaaaacaggacccaggctgggcacagcagctcatgcctgtaatcctagtattataggaggcagaggctcgggaggattgcttgagcccaggagttcaagatcagcctaggcaacatagggagaccctatccctacaaaaaatttctgaaaaattacctgggcattgtggggcacacctgttgtcccagctactctggaggctgagtccggaggaacgtttgagcctgggagtttgagtttgcagcttgcagtgagctgtgattgcaccactgtactccagcttgggcaacagagcaagatcctgtctcaaaaggaaaaagaaaacaggacctaggtgtttggggtacactgccacccagggagtggatcaaaaatatacatagaaagagaatgagcatgtctctataattgtcttctaggaccatattgctgttagaagtcctaaaagaggatgggttgtaatttagcataatattctgaattcattccaagtttaaaatcctgtcattctctggctcttcttttttcacatcaaaatgatgctgttggacttagaggcttccgaactgttttattgagggctactatctgcctccacaattttattaaaaccactccacctttagacaaaggtgacttttgtctgattttacaaatcagattttattcaagctttctaaatatctgtgaagtagaccctagaaaattgtctcgtttattttaaatagaatctatgcttccaccaataaaccatcgggagctaagaaacaacataatgttgacaaatcaggaacctaacagattattttgtctctcattattaatttgaaagagcctctaaacttttgagaaatcaatgtgtcttcttaagaaagttaagcaccctctcttaactttcccctctatttgctctcctttttctttcttcttaagagtatttatattattttgttaagcaaaaatggctaagattgctctaaaatttgcaaaatgaggagtggattgcaaataattgagggatttatttctttaactttataagactttaaaaaaaaaacccaaattctaagcactgacatgaaagttgcctttgagaagcttgttattcattatacaaaaagtatttgcccattcctattctaagatttgcagaatatgtcaccctatctagcttttgagtttgctatctggtttaatgttgtatttataatttaaagtggaaatcagaaactgtttcaagaacctgtattctattccttactgagtgtcccttctttaaatagtgtttgctgaattaagccgatgggggcagtggcgttaagtggtggaaaaaggaaagtatatatgttagagttttgaatgagggataaatagaaagcagaatgaattaatggaaaagaactcggctgttaggccattctctaaattctagtttagccaaaagtttatgtgtggtttggggcttcatttatttatctcatgagtaaaatggaataatacctaacaggcaggctctggaagttggaaatcacatacacacacacacacacacagacacacacacacacgatcaatcatgtagctcatattagatgttcaataaataacagctactacagatgcctatcagttgagtaagtagttcattaaattgagctcccaaaggtctcttctcttcacatccatatccgtttctgcagcaatcaaatagatacatgattgtttttctgtaagaaattactgcaaagagaatctttttctcctactaactgttccttctacctggtataggagataaatgtacgtttcttaattagctgactttttagtatgtcatttctgaaggaaaaataaattaaccttaaagtggcatgtaggtccaattcagttttcctacatgttccaaaattttatttaaattactgtgtccaaaattatgaggacagtgtcattcattcaccatagtttatatttttagttatatatcaaacttccttggcacctaggataagaacatttcttttgaagttatccaatttttttttatttttacttgacttgaaggaaagttggaaaatatggtggaaaaaatcttccgcattaaaagggggaaaaacacaaccatttacgatctcagtcagcagatttactctactcaaggaaaaaaagaaacaatcttattggaagcagatgttgacactgtgtcagttattgaagacggaaggagttcacttgagccattgcagttacaaaggggtattgatggcagtttggattcctgattgatcacctttgcagccaagggaaagacagcagaaactgtatgggatcagaaatgaaatcagcctgccagtttaatggagaggctcctagaaactcattttttttctttcctgtaagataaaagacatctttcagaataagaaaggcttgtttgagagagaaattacagtttattctctgaaaatatttaaaggccaaagtgccctttaaatctattattaaagcattgaaactgttattaaaatcattatagaaaaattaggtaaaaattttagcctaactttcaacatccattcaaaaacgaatgttgaaaacaaacatataacctataaaaaagtgaatggctctggcaagtgggggcatgggtggagtccataaggaaacctcagtctcaataacttcaaaatgttacttttcatggtaacttggtcatggagattggtcacagcacagacatttagaattttttagcaggttttttttttcttttgaatcttgtagtgctctctgggaattgcaccatgtacacttttacaacctacagaaatcgtcattattgttaaagtatctcaacttttctatttcttttattgtctattgtgcttttttgtttaaaaatacttttatagttttaaagtattggtcaaagtagtattctcttgaagttctagtcaatttaatttgatccaataagtttttctgaatctcctttttaagttccaagaaattctattataaataagtgtacttttaccaattccattgtataagcaaacagacaccttttagaaaaggataagtaatcatcaatttgtttttttaaaaaaaaaaacaatttctagactactaaatttggcataagaataattcttttaaaatgcaacatactttaattagtttttttggtatatgcataagatgtgaactttcctattgatatcactttatattaatagagatgtacatttctttctatgccgtggctagagcaaaagttaataatgattatttacacaattgatttaatttcttaggatatgtataatattggatattatatctgatttaaaaatactattccatacattttttttttcaggagataaaacatagggaaaggttttcatgtgaattctttgtatcactttgaagtacatatatttaaagggaagatggatacaatttgtttttattatataaatctaggtaaggtgaaatgcttttgtcaacaaaaatacagtgtagtgaattttatatttgtcacttgattaggtaaactgaaaactaacaatagaaatattattttactgcattgaaataccatgaactttcagacttgttagttctacaagaagttgtgctaccttaattttgtgtttccagaaataaaaattaaccttagttatgctgtcatttttaactaataaaaaaagtataattcataaaacttttggctttataagataattataaaattatatatttttttctgtttttgtggggttgggaaaacattttcttatttctattcactcttcaaatgcaggtctcataatatgtgtcaatgatataagatgatggaagactttgtaataaaaacatatgtcattatcttcaatttgttcaataaataatttaatgtgaattgaatgtttgtattttaacatagcatttggatttggtctgcatttcttgagaatttaaagctctttttgtttcctccttattcaattaagcatcttataaatattttggaaattacaacatcttaggtgttattaattaagaagttaatttctagggccaagaagtctatatgttacagcaaggaatagattataaaatacatgtttataatggaaaagaaaatgaaatggggtatattaattacataacagcaagagtcttgagaattttataatacaatgcttctaaggatattggttgaccaaggtgtattttattgtttttacatttgttgacagggactctgccataagtagtatgaaaaaacaaacaaaaacttttctacgattcattaacattgaaaagagaattccaagaccttgtattctgaagaaagctagagtttctctaagtgggccttcaattttcttattacacgtatctttaatgtgaaagtactaaagtctgaaaatcagcatttaaataatagactttccagcattacagatgaaataatttggcgcaggctttttaactgtctaccatatttagaatgtggtgtcaaaatgagatttttagaactgctgtaaaatattactacattactacaacgataacggcctaaaacaacacaaatttattatcttacagctctgtcagtcagacattcagcaaagatcttagtcttggtgggctacagaatgtaggaggcatttcctggatgcttccaagagagaatcttgctgttccctgcttctagagtcctttgcttagtttccttccatcttcaaatccagcaacctggtcaagaccttctcacatgacatcactgacttcctcttcttcctctcccttacatatttaaggactcatgtgattacaatagctgcatctgtgtaatccagaataatctcttcatctcaaggtttttgttctgttttgtttttttgttttgttttgttttgttttgttttgatggagtcttgctctgtcgtcaggctggagtgcagtggcgcgatctcggctcactccaacctccacctcccgggttcaaaggattcccctgcctcagcctctcgagtagctgggactacagatgcgtgctaccacacaaggctaatattttgtattttagtagagacgggatttcaccatgttggccaggatggtctccgtctcctgacctcgtgatctgcctgccttggcctcccaaagtgttgggattacaggcataagccattgcgccatgctcaaggttcttaattacatctttaaaggccctttttccatgtacagtaacatattcaatggttctggggattaggacttggagccattattctacctacaacaattagtattggacttccatcattttctatcactcttgtaatcgagaaggactatttcactgggagtagcaagtcataatgtttgcgttggcatttgtgtgggggtttatcttcattcattaaataattgcatgtaaagaaaattcctgtcactatttcaaatgtttcatgtagttattatagtgcttcagaatccaaagggttatgtgttacttatgtaagatgagcagtctagggggtggagaacaggtcatctagtgcagattcttcctagctgaagtgtgttttctctggggacaaccaagtaggatttaattgttttgcttccttttttgggaacttagacccatcttgcgatgtcctaagtctccaagcatcttatttgacctgcttatacacatttgactaaatagctaaatatgaccacattgacgtggtaaagctttaacacttttgtccagattgaatcactccatctgctatcagttaagcagtggaaaactgttatggaaaagcaaacatgttttgatagatttaatgtgtaaagaaggtatccatactctggaatgctgctgatcaataaatgagctgcaagactttgttcgaaacaacactcaagcacaactgttttactttccataccaagtttggctgtgactgaatgaagaacatcagcattgatctttgctttgcacttgtacaagagactatttgcagagagccaaatatagcaacagaggatttaatatcttgccaaaaaatacaaaatctgttcccctttaagcatgacactctatcctttcttgtggatcttgctaaaaggaaaatatagctttaaactcccctattccttctgttgaaagcttaagaatctttttcaaatgagctatgtatggttttgtggtattttatgtttccaaaagaaaatggctacatgaaaaatctgtccagtgttatcatttttcttacaaaaaatacttctagttatggttgtattaattaatttgattgtgataatgattacacaatgtttacctatatcaaatcatcatatcgtataccttaaatatatataacttttatgtgtcaattataactcagtaagtctgggaaaatatcgttaagtcaaagattagagtcaacagaaataaagaaaaatcatactttgataacttcaggactaatcaaggatcaatgggtgacatgatatcatgctatgtgccattttgtgttaaacaaattacaccaacaataaaaaaaattggcttcaa

SEQ ID NO: 792 - DNA, 3555 bp, Homo sapiens
tttcccttttttttccttttggcaacccacacccttccacacacgctcaccccaaaattaaacaccaagatcctctaacttgtttggattgactgatgaagacataaagctctatgttttttgaggtggagtgagtggtttttcttcatttttaaatggccaaatgacagcttgacccagtttgctttccaatcaaagggcatttattttgaatgtctctttgtggcgcaagagccaacgcaaaaatgatggcggcttacaatggcggtacatctgcagcagcagcaggtcaccaccaccaccatcaccaccaccttccacacctccctcctcctcacctgcaccaccaccaccaccctcaacaccatcttcatccggggtcggctgccgctgtacaccctgtacagcagcacacctcttcggcagctgcggcagccgcagcagcggctgcagctgcagccatgttaaaccctgggcaacaacagccatatttcccatcaccggcaccggggcaggctcctggaccagctgcagcagccccagctcaggtacaggctgccgcagctgctacagttaaggcgcaccatcatcagcactcgcatcatccacagcagcagctggatattgagccggatagacctattggatatggagcctttggtgttgtctggtcagtaacagatccaagagatggaaagagagtagcgctcaaaaagatgcccaacgtcttccagaatctggtctcttgcaaaagggtcttccgggaattgaagatgttgtgtttttttaagcatgataatgtactctctgcccttgacatactccaacctccacacattgactattttgaagaaatatatgttgtcacagaattgatgcagagtgacctacataaaattatcgtctctcctcaaccactcagctcagatcatgtcaaagtttttctttatcagattttgcgaggtttgaaatatctccattcagctggcattttacatcgagacattaagccagggaatctccttgtgaacagcaactgtgttctaaagatttgtgattttggattggccagagtggaagaattagatgaatcccgtcatatgactcaggaagttgttactcagtattatcgggctccagaaatcctgatgggcagccgtcattacagcaatgctattgacatctggtctgtgggatgtatctttgcagaactactaggacgaagaatattgtttcaggcacagagtcccattcagcagttggatttgatcacggatctgttgggcacaccatcactggaagcaatgaggacagcttgtgaaggcgctaaggcacatatactcaggggtcctcataaacagccatctcttcctgtactctataccctgtctagccaggctacacatgaagctgttcatctcctttgcaggatgttggtctttgatccatccaaaagaatatccgctaaggatgccttagcccacccctacctagatgaagggcgactacgatatcacacatgtatgtgtaaatgttgcttttccacctccactggaagagtttataccagtgactttgagcctgtcaccaatcccaaatttgatgacactttcgagaagaacctcagttctgtccgacaggttaaagaaattattcatcagttcattttggaacagcagaaaggaaacagagtgcctctctgcatcaaccctcagtctgctgcttttaagagctttattagttccactgttgctcagccatctgagatgcccccatctcctctggtgtgggagtgatggtggaagataatgtactactgaagatgtaatgtagctttccactggagtctgggatttgcaattctggaggttaatcatgcttgtactgtaattttactaatgaagttttaaattaacaaccactacttgtatgatatgaataatatttagaaatgttactagacttttaatcttgtaaagtggttgtgcttttagaagaaaaatattttacccagagttgcacatgttttatgaatttagtgcagctgttatggctcacctcagaacaaaagagaattgaaccaaatttgggagtttggggttttatgttttgtttttcttttctaaaatgaagtgagattgttcacacacacacacacacacacacacacacacaaacacaaaggacagtcatacattttgatatttgagccattcctaaagatttggggttttctaaaactaaagaatctaggaaccttgcctgcgaccaatcatggagccacgtgagctgatcgtggctgcacctggggggagggtagggaggaggggcatgccacctaatgatcaagccctataattagcttctcattagagccgtgatggtgatgtgtgctgtctaaaatccaatgttgtgggtagagagaatgagtttgtgactaggagagactaaacttttgttttccttacccagtataaatatatatatatatatttaatctatttttattagaagtttttctgctctttcttacataaaagaaccccaagcatgcatctttcatgtgtgtaaataattcatttctgggctaatttcaaaagaatcccaatattgctgtatagaaagagaactagcttgcacattttaggtctgtgaaattttgtgagacttttcctgcactggacagtaaaaaaataataaaagacaaaaacaaatttaaaaaaaaatttaagccacaaaaaaaggcacatagggaattatgtcaaatgtgtttgtgtccttaggcaaagctgtgggagtcttgaaatgtcacagtagtaaataacttattactttttgacaagttctttttttctgttggaacactgaattcttctgtgcatatgtacatatgaatacaaatcgaaggcctctacctcctggagttatacaacttggcttgtttacctccacatgctgatgatgactattttttttttttgagttcagtgtggagacttgaaacttgaatgtcccttccaacttttatattaaaaataaaaagacaagaaaattgaagatcatttttcacctgtacaaggaatactaatggatcgtcttaaaattggtctaggaaaaaaccttggtgtgtgttatggacaattaactgttaaagttattgtaagttatctgtatttagcagagtattttcaacttgagtgatctgagctgaatttgaagactattaataagttatgtttggaagttttaacttcaatgaagtaattatttgctgtgaaagaaacaaacattgaattactaaacaaagatggtgcaatatctttgttttttttttatgaggctcctgagaatcaacccaactgaagcatttcaattcacttgaatgagaaacgtgtttagtatcaaaagagcccaagaagacactggtgtgaaaggtacaatctcagaggttggtcaattaccgtggcacactttctggtcactttgtacaatgtagatttgaagtacagtggtgaaaacattaaatgtgacatttgaaaaaaaaaaaaaaaaaaa

SEQ ID NO: 793 - DNA, 3631 bp, Homo sapiens
tgagtcccggccggagccccacggccgcgggcggcgcctaggacggcgatccgcgccctggaggatccgccggccgcccggctccactacagctccagccgcctgcagcggggccctcctgaggccccagaggaagagaccatgaaagtgaggtcggccggcggcgatggagatgccttgtgcgttacagaagaggacctggcgggtgacgacgaggacatgccgaccttcccatgcacccagaagggccggccagggccccgctgcagccgctgccagaagaacctatctttgcacacatcggtgcggattctttacctcttcctggccctgctcctggtggccgtggctgtgttggcctctctggttttcagaaaagtggactctctctccgaagacatctccttgacccagtctatttatgacaagaagcttgtgttaatgcagaaaaatctccagggcctggatccgaaagccctgaacaactgctctttctgccatgaagctgggcagctggggccagagatccgaaaactgcaggaggagctggagggaattcagaagctgcttctggcccaggaggtgcagctggaccagaccttacaggcccaggaggtgctctccaccaccagcagacaaatctcccaggagatgggcagttgctccttctccatccaccaggttaaccagtctctggggctcttcctggcccaggtgagaggctggcaggccaccacagctggcctggacctctctctgaaggacctcacccaggagtgctacgatgtcaaggctgcagtgcaccagatcaacttcaccgtggggcagacttccgagtggatccacgggatccagcggaagacagacgaggagaccctgaccctccagaagattgtcaccgactggcagaactacacacggctcttcagcggcctgcgcaccacctccaccaagactggagaggcggtcaagaacatccaggccaccctgggggcctcctcacagcgcatcagccagaactcagagagcatgcacgacctggtactccaggtcatgggcttgcagctgcagctggataacatctcgtccttcctggatgaccacgaagagaacatgcatgatcttcagtaccatacccactacgcccagaaccgcactgtggagaggtttgagtctctggaaggacgcatggcttctcacgagattgaaattggcaccatcttcaccaacatcaatgccaccgacaaccacgtgcacagcatgctcaagtacctggatgacgtgcggctctcctgcacgctgggcttccacacccatgccgaggagctctactacctgaacaagtctgtctccatcatgctgggcaccacagacctgctccgggagcgcttcagcctgctcagtgcccggctggacctcaacgtccggaacctctccatgatcgtggaggagatgaaggcagtggacacacagcatggagaaatccttcgcaatgtcaccatcctacgaggtgcccccggccctccaggaccaagaggattcaaaggagatatgggcgtgaaagggcctgttggcggcagaggcccgaaaggagaccccggcagcttgggccccctgggaccccagggtcctcaggggcaacctggagaggccgggcctgtgggagaaaggggccctgttggccctcgagggttcccaggcctcaaaggctcaaagggcagctttggaactggagggccgagaggacagccaggcccaaaaggggacatagggcccccagggccagaagggcccccggggtctccagggccctcagggcctcagggaaaaccgggaattgcagggaagacagggtcaccaggccagcggggggccatggggcctaagggtgaaccagggatccagggtccccctggtctcccggggcctccaggtccaccaggaagccagagcttctactgaggagggctgtggcagagccactgtcacacagaatgccggaggggcgcagagcagatccaggccccagaaagcctcacctacagacagctgtggtcctctgattccaatgagggggctccccagggctgaccctgcagctttgggctcccccatagtgactgtgccataggaaagcagcccctcctcacacatacatgtgcacatgcacacacatgcatgcacacacatgcacacatacacgcacatgcacacatacacatgcatgcacacatacacaggcatacatgcatgcacacacacatgcacgcacacacacatgcacacatacacgtgcacacatacacaggcacacatgcatgcacacatacacatgcacacacacatgcacacatatatgcacaggcacacacatgtacgcacacacacatgcactgcacacatatccatgcacacaaacacatatatacacatgcacatacacagatttttctgctggccaggtgggccaactgggtttccctggctgggcaggaggagagggcagaggaagaccccctctcctgtgactgagcctgccagggaggcagctacctcgggaggaaggtctcacatctgtctctgggcacccatgctggccagcagtttcccagggctccctggggttgaaaagccccaaggaaacctttgcgggtggggcgttactgccaaaactccagaggcaaagtggacctggcaaccacaagaccctccccataagcaggggaccagcatacccgggagctgtccctgtctgtcacagcacagtggggccacgaggctgacattctctggccttgcacacagtgccccctgagaagttcaacatttatttcttcacgtgtccagaaaattcctcaattcatccttgcctctgcccttcaggagcagcctggaaggaatccaagcaggagtttcatctgcatgggggcactctgcaggccctggaacattgggcctgagtggagatgggagacagaggcaggccagaaggttctctctgcacagctgcctcccttgctctccctgaggctggcctgccccattccccaagggggctcctctggagtggtggggaggattaggctgcagaagggccaaccccttgcaacagggcagctctcgcctcccgcacacggctctcctgatcacagctgcatgccgaccttgtcccaccgggacccacaatggcccgagccctctttgcatgggcagccagctggactaggagtgggaagggcctggacactcacagaggccccctctgtcatcactccttggcacccaccaacttcctgcacacactggcagagaggggcgctgggaaatcaccccacagggtggaggtctcctgttggctacactctaaagctgctttgccttcatgttcaaacagattcaggcaccaccccctccaccgcccgcaaggttagggcatagagttgtctccttcccaacacggacccagagagcagcccttccctgctcaaagcctttccgcaccctcctgactgtcctggatgtgcaactggtttgcactgcacaccccacggccatgtaactctcctgtccacatatgataataccattctgcatagtattactgactcagtaaagagctatttccaggagt

SEQ ID NO: 794 - DNA, 8365 bp, Homo sapiens
agaaaagaagtgagagctactttgaaaggacaaccatttttctttccgctaatttataatggttttgaagtggttgttcattctcaaacatagacttttaaatgttaggtctttcctataactctttgttattggaagtttcaaggatttggacactcaattaaggattctgtcctctcctcattcctttggttttggcccaaatgattatgtttcctctttttgggaagatttctctgggtattttgatatttgtcctgatagaaggagactttccatcattaacagcacaaacctacttatctatagaggagatccaagaacccaagagtgcagtttcttttctcctgcctgaagaatcaacagacctttctctagctaccaaaaagaaacagcctctggaccgcagagaaactgaaagacagtggttaatcagaaggcggagatctattctgtttcctaatggagtgaaaatctgcccagatgaaagtgttgcagaggctgtggcaaatcatgtgaagtattttaaagtccgagtgtgtcaggaagctgtctgggaagccttcaggactttttgggatcgacttcctgggcgtgaggaatatcattactggatgaatttgtgtgaggatggagtcacaagtatatttgaaatgggcacaaattttagtgaatctgtggaacatagaagcttaatcatgaagaaactgacttatgcaaaggaaactgtaagcagctctgaactgtcttctccagttcctgttggtgatacttcaacattgggagacactactctcagtgttccacatccagaggtggacgcctatgaaggtgcctcagagagcagcttggaaaggccagaggagagtattagcaatgaaattgagaatgtgatagaagaagccacaaaaccagcaggtgaacagattgcagaattcagtatccaccttttggggaagcagtacagggaagaactacaggattcctccagctttcaccaccagcaccttgaagaagaatttatttcagaggttgaaaatgcatttactgggttaccaggctacaaggaaattcgtgtacttgaatttaggtcccccaaggaaaatgacagtggcgtagatgtttactatgcagttaccttcaatggtgaggccatcagcaataccacctgggacctcattagccttcactccaacaaggtggaaaaccatggccttgtggaactggatgataaacccactgttgtttatacaatcagtaacttcagagattatattgctgagacattgcagcagaattttttgctggggaactcttccttgaatccagatcctgattccctgcagcttatcaatgtgagaggagttttgcgtcaccaaactgaagatctagtttggaacacccaaagttcaagtcttcaggcaacgccgtcatctattctggataatacctttcaagctgcatggccctcagcagatgaatccatcaccagcagtattccaccacttgatttcagctctggtcctccctcagccactggcagggaactctggtcagaaagtcctttgggtgatttagtgtctacacacaaattagcctttccctcgaagatgggcctcagctcttccccagaggttttagaggttagcagcttgactcttcattctgtcaccccggcagtgcttcagactggcttgcctgtggcttctgaggaaaggacttctggatctcacttggtagaagatggattagccaatgttgaagagtcagaagattttctttctattgattcattgccttcaagttcattcactcaacctgtgccaaaagaaacaataccatccatggaagactctgatgtgtccttaacatcttcaccatatctgacctcttctataccttttggcttggactccttgacctccaaagtcaaagaccaattaaaagtgagccctttcctgccagatgcatccatggaaaaagagttaatatttgacggtggtttaggttcagggtctgggcaaaaggtagatctgattacttggccatggagtgagacttcatcagagaagagcgctgaaccactgtccaagccgtggcttgaagatgatgattcacttttgccagctgagattgaagacaagaaactagttttagttgacaaaatggattccacagaccaaattagtaagcactcaaaatatgaacatgatgacagatccacacactttccagaggaagagcctcttagtgggcctgctgtgcccatcttcgcagatactgcagctgaatctgcgtctctaaccctccccaagcacatatcagaagtacctggtgttgatgattactcagttaccaaagcacctcttatactgacatctgtagcaatctctgcctctactgataaatcagatcaggcagatgccatcctaagggaggatatggaacaaattactgagtcatccaactatgaatggtttgacagtgaggtttcaatggtaaagccagatatgcaaactttgtggactatattgccagaatcagagagagtttggacaagaacttcttccctagagaaattgtccagagacatattggcaagtacaccacagagtgctgacaggctctggttatctgtgacacagtctaccaaattgcctccaaccacaatctccaccctgctagaggatgaagtaattatgggtgtacaggatatttcgttagaactggaccggataggcacagattactatcagcctgagcaagtccaagagcaaaatggcaaggttggtagttatgtggaaatgtcaacaagtgttcactccacagagatggttagtgtggcttggcccacagaaggaggagatgacttgagttatacccagacttcaggagctttggtggttttcttcagcctccgagtgactaacatgatgttttcagaagatctgtttaataaaaactccttggagtataaagccctggagcaaagattcttagaattgctggttccctatctccagtcaaatctcacggggttccagaacttagaaatcctcaacttcagaaatggcagcattgtggtgaacagtcgaatgaagtttgccaattctgtccctcctaacgtcaacaatgcggtgtacatgattctggaagacttttgtaccactgcctacaataccatgaacttggctattgataaatactctcttgatgtggaatcaggtgatgaagccaacccttgcaagtttcaggcctgtaatgaattttcagagtgtctggtcaacccctggagtggagaagcaaagtgcagatgcttccctggatacctgagtgtggaagaacggccctgtcagagtctctgtgacctacagcctgacttctgcttgaatgatggaaagtgtgacattatgcctgggcacggggccatttgtaggtgccgggtgggtgagaactggtggtaccgaggcaagcactgtgaggaatttgtgtctgagcccgtgatcataggcatcactattgcctccgtggttggacttcttgtcatcttttctgctatcatctacttcttcatcaggactctccaagcacaccatgacaggagtgaaagagagagtcccttcagtggctccagcaggcagcctgacagcctctcatctattgagaatgctgtgaagtacaaccccgtgtatgaaagtcacagggctggatgtgagaagtatgagggaccctatcctcagcatcccttctacagctctgctagcggagacgtgattggtgggctgagcagagaagaaatcagacagatgtatgagagcagtgagctttccagagaggaaattcaagagagaatgagagttttggaactgtatgccaatgatcctgagtttgcagcttttgtgagagagcaacaagtggaagaggtttaaccaaaactcctgttctgaaactgattagaagcctggagaagatggagattacttgttacttatgtcatataattaacctggattttaaacactgttggaagaagagttttctatgaaaaaattaaatatagggcacactgtttttttttcagcttaagttttcagaatgtagtaagagatgttaccatttttatttctataaagactgaatgctgtgtttaaataaattgaaaactacgtaaactctggaaagtattctataagaaaaagctggacctaggatttagggctgcagttgctgtctgcttctgaatcactgggggtgtctcctaagaactgtgcctcgggtttttcaataggaaaataaggtgagactcttccatggagaagtctggcttagtaagggaatattttggagcatatttgttattgttgggtagaaggggaaacctttgaaatagtcttaatggatagtttataatcaggcattcatctaaataaaattctttcttttttttgatcaaactgctaaagaaaaagcaaacttttttgctgcaggatagaattcgggttgtatttttatgcttctatcagtgtcttgcatttcctgagcatattaatcaagaccatgttattgttatgttaactatgttaatatcctttttttcttagttttcaggatgaatgcatatatatatatatatatatatatatatatatatatatatatatatatatatataaagtttagaagattcccattaatctaaagacaaatttaatcacatgggcagggagggagtgagtgtcgggtcaagaccccagtgctgagaatatattttgtttcttgattgctggactgaggttccctgattgcttctgaaatctaaagatgtcttgggcaaatcctgtctctcctctagttcctggtgtattaatttggaaaacagcacttaactacctcacataatatagatgagctcattttcattgcttctcctttgtgtaatacctcctgtctaaattaactcctgcttatacaaaacagggcaaagcttttattacaattaaaatattttaaaaactgaacagataggaagtccataccttatataaattttgacagaaaatggaaattttcctctttccccctagtgttttttttgaatgggttgctttggagggggagaggaggaggccaaatcatcatcatcatgatattaaattgcatatgcaataggttattattaatgcagatactttatgctagatgtcttcatgcttgccaaaaccaattctgaacattttgatttatttctgaccagatataaataaccagtataaactgaccataagataaaatacttggttcacttttttttttctcaacttgatgactgccaattctgctcattatgaggacaccggaaactaaatatctgggctcagtgcatgccacagtaaagctagtgaaagccttgaagatggccaggtattttgcaaagtatgtatggataacaggttgtgtgtgtgtatgtgtgaatgtgtgtgtgcgtgtatgtgtgtgtgcgtgtgcgcgctaatgcgcatgtgcgcccgcgccaaggtggctcccttatcctagcatttcctttcattccctactcacataatggatcctctaacagttcagtataggtacactttccactattttattgacatgttctagtcttaatattggataattagacactttccactgggcccatttgaaaagtaattgataattacctttaagacattttaagtgttaatgatatttgtcactactaagtgcttagttttatttataaaactttcaaagttttctgtttaagactgtaaactgttttcctatactacgtgttagatgaaagtgtattttatcacaaattaaccttagaatgcaactctttgaatgtgtgcttgctggaagaattccagatggacacaaatccctctagggcaggtcaccatgcagaacacttaggagaagcacgaactgagccagaggagggttgttgttttccacaaactaagcagtgaagtgggaatttgggaattctgacacacgtcaccatctctgatttccttttgcgtgaccttttcatgcaagagcaaaacacttagctcttcatgaatgtctgctccacaccaatgaaatggaagagtaaaggagcccctcaactatcagggaaagaacaggaggcctcagttgaggaatacaacttttgtcctgcctttgctatagctgaaccactgttgaaaggttgaagaacacagtttgcccagcaaagatccatccactcatgtacaaagcaaagcactaaaggagctattagtttgatggaaaaaactacccctaaagagcttctttctaaaagaccttcctcgaaggtgatttaatggcatgtcatcatttaaaagtcttaggctgaactgtcatttacactgcacaattgaggaatgaaattttctgagtattagaacgttcttcttaacctagcaatataatattcaacaagactatcaccttatgtgaaaatactaaaatgcagttagcaataaaatgcatggtaaataaccattttaaaaatgttattataaaaggttgtaagatactgtggtgttttacagatgtagcctttataattgaattatatacactatccttttttatgggttatggataaaggggaatttatttgataaatagggctccattttcaccattgcaatggtttaagggtgtttgttcacgtttatgtggcctgaagtcccatttttatcactattattatttgagatggagtctcgctctgtcacccaggctggagtgcaatggggcgatctcagctcctggcaacctctgcctcctgggttcaagcgattctcgtgcttcagcttcctgagtagctggggttacagacacccaccaccatgcccagctaatttttatatttttagtagagatggggtttcaccgtcaccatgttggccagcctggtctcaaactcctgacctcaggtgatccacctgccttggcctcccaaagtgctgggattacaggcatgagccaccgcacctggccccatttaatttatataataaaacaagtgcaggctttacctgattttattctcaccttctgttttcttcttctgcattatctgtcaccatgggttggctcctccccactttctcttttttattcttttctctcttttttgccacactaaattgtaatgtgtttgaacaactctgacttaatattacctctaacaaaaagctggaaactgcacaaatattctttgtaggctctaaaagtaggttggctgaagtatgatacctgaactaattattcatttgtatgcttgttttataagtttgacttccatttcatgatttttttggtagctttatgttatttctgttttcagcaatgggtactttgacatctttctgtctctgaattgaattttcattttgcaacggaagagaagacaacatatttattccataatgaaagagctaatgaagtagaataactattaaattgagatgttttagcaaaaaaacaaaaacacaaaccccaaacgggttgttttgttttatttttttctaaaacatttctaacaattcccagtaggaatgggtggggccagccttcctcatttacaatccagctgcagtgagtcaagatcctagcttattctcccaattgtgtaataaatgcagaaaaatgatgtgacggtcactattctcaaatccattgcattgtattccacaaaggatatcctggcggaaggtggaaatatgggagggtaccatgatgtaaagaattgcctggaaatttccttgagtcatgcattttgtaaaaccttacattactgctatgagttaataagagacaggttaaaccactcccctcaggatagtaagactggttaaaaacactgctctcagcccacacagttatagctacagcctaggttaaatgattcctcatcctggtgtttttattctcatgtttaattacttctttaaagattaagattatatatagaaaaaataattgtggtatcagagaatacaggtataatttttcatatatcaggactatgtgatgatacttaagcaatagtgtacatacagtaatatatgtttaatatcgagtatggataatgaaggacttttctttttcaccttgtttataatgacattttatccagggtttgaatcaaataaattcatgttaactgtactattttattgaaatgttctagtcttattattggataattagaaataaacattttaaagtctttatgaataaataaggatgttttcctatgtatacaactgtactattttcattagtaataaacatcactttcaagaaaaaaaaaaaaaaa

SEQ ID NO: 795 - DNA, 4575 bp, Homo sapiens
cagggaggggaagacggggagccggacgcacgaccggcgagcacagaagggcacaggagctgctccgcgagataccagcgagctgaggcgcggggctggctgggaagtagtcccggccgggccctggccccgcccctgcagggcggagggacgcatcacgcaggggtggggaagccggatccgtgcgcagggttgctaagggtgaaacttttcattgactttgctcacttcgggccggggcgcgggaaggtgcgggttgttggctgaggcaagccgtggctcgggcgacgcggggccaggagggcaggaccgtctgccggcgacagcccataccgtctgccgttgcgcgacacgaaccaccctccgatccgccatccccgcgtcgtcgccgctagtccgcccgcccgccctcgggccccccgctgccgagcccgacctcctaagagctgaaagaaattattgagagtcatagtccatagccccctgcttcgtcccccaaccctcaacgacgaaaaggacttcggtcccctggcccggcgacgcccgggaaggaaaggagagcgacctccgccccgcgctcaggccaccctggagggagaagccgccccgcggccggtagagcgccccgccgccgcggagacccgaagccgcctggagcccaaggctgtacacgtgccctgtgctgattctctgcctaggaaaggaccatgcagctagagatcaaagtggccctgaacttcatcatctcctacttgtacaacaagctgccccggcgccgggcagacctgtttggggaggagctagagcggcttttgaaaaagaaatatgaaggccactggtaccctgagaagccactgaaaggctctggcttccgctgtgttcacattggggagatggtggaccccgtggtggagctggccgccaagcggagtggcctggcggtggaagatgtgcgggccaatgtgcctgaggagctgagtgtctggattgatccctttgaggtgtcctaccagattggtgagaagggagctgtgaaagtgctgtacctggatgacagtgagggttgcggtgccccagagctggacaaggagatcaagagcagcttcaaccctgacgcccaggtgttcgtgcccattggcagccaggacagctccctgtccaactccccatcgccatcctttggccagtcacccagccctaccttcattccccgctccgctcagcccatcaccttcaccaccgcctccttcgctgccaccaaatttggctccactaagatgaagaaggggggcggggcagcaagtggtgggggtgtagccagcagtggggcgggtggccagcagccaccacagcagcctcgcatggcccgctcacccaccaacagcctgctgaagcacaagagcctctctctgtctatgcattcactgaacttcatcacggccaacccggcccctcagtcccagctctcacccaatgccaaggagttcgtgtacaacggtggtggctcacccagcctcttctttgatgcggccgatggccagggcagcggcaccccaggcccgtttggaggcagtggggctggcacctgcaacagcagcagctttgacatggcccaggtatttggaggtggtgccaacagcctcttcctggagaagacaccctttgtggaaggcctcagctacaacctgaacaccatgcagtatcccagccagcagttccagcccgtggtgctggccaactgaccatctacctgcccgtggggccaggagcacccaagaccacagaaaagagaaaggaaaggccaaaaaaaagaggaaaagaaaaatgtacaaaaagattttcgatcttctcactcttacttctagaaaaaagatccagcccaggcacggaatgggagggccctgcaaagcacccaagtgtgtttcactcaccccttaccgctcgcccaccggcctgtgatttatttggttggtttgggttttatatttctttttcttttttttttttcttacatgtagttttctatataacatctttaatgagtggcttcctgtgctaagaatggtccagatgtgaactgctgctccctgctcctcccttcctccttcacactcctagtttaggattgatgtgtccaagctcatagggaagaaagagctgcagctggagcctgaccctccctggaacagggagaggctggcccgtgtcactgcctctgtcacccagctatcctcgcactcaaagccatccaacctcagcaggccttctcgggccctgccacctgaataggtctgaccccagtccccactccctttcaggctgggccacagggagttgctggctggccacttgacaccctccccctggagctgatgtctgtgactacagggagattagcacttcgtctagtgaaactcctttcatctctgtcctatggccccaccccaccattccctctaggcccagaccatcatcatggccctggccattgatgtgtatgggctttctttccctcatgcagccccttcttccccaggctggatgttgtgggtagggaggggtgtgtgtgtgtgtatttggtttgctgtccttttttaaaggattccaagccatgtgaaacttcccttctggatgtgattctgggtcgcaagtccttatttatatgtgaggctggggaatgggctgggggtattggcagtccttttgcagggcagtgtgtgtggtggggtgacaccgctgtggcttagcccaagacactcccagaggaaaacactgcagaaggaactggtttgcagactgtggaaggatctgcagttttgtttttgaccaaaaaaataataataagttagctctgaagggcagagggaatacccaagcccctgatgcctatgagaagtccctggacttcaaccctcctgttgtttggccttagcccagagggagctgctcacctgagcacccttgggggtgggcagagaggcagggtgggattttagagttagtgtctgtgcgggggcagccctgagcctggagttgagactttggggtctcttagtttggaggtgttgagtgcatttgtgcccctgcctggttgagagcttcttggtacctcttgccaccccttctcactgccctgacccaaccccactggaccttgatgctgcgaggagtggtgtcctgacggactcagcactcccgcctgatgtattggatcataggagagcacttgctctcctgcctctgccaggagagggcttgttcctccaactctaggaggccaggcaagcatggacaggagccaagggagcagggtcattaactttttcttctttgcaaagtgggcacttggcatcagggtcccaatcaccagaaagcaccaaagcccctggcaccccacccactccatcctacccagggaccccaagtaggcaactgttatggcagtgggtccagcccaggccagcactgccagcctcctctccctgcagtaggcaccagctctacctcccccggcaggcaatgtcctggcttctcagcccagcaccatctgttcccctagacttctcaggggccagcccagtctgggccaccctttgtttccctcatcctcggctcccacacaggtgacagacccagcagatagcttctctctgggaaaggttggatgctgccttacatccccttctagccctcctcccatccacacacacaggcacccacccacaccaggtcggcttgtttctcacatgtagggagagaggggagaccaacccctttgtgtcttttgaaatacgaagaaaaatgtgtgttcaggagcatgactccagtgctgcgctcttgggcccagttcagtctgtcttgtctcaaatctaggcatttttgcttcaattttattttttttaagaatacaaaaacagaaatctgcactaatttacctggtttcgtaggaaaacttttttttattttttacattttttggtgtccgtttgtattgaataatttgctacatttgtaaaatgtaagaggtatataatatatgtatatttctaacgtaaaaaacataatttttttcttttcaagattttttcttaaaaagatgagagaaacatattttttcaggaaaaacaaactttaaaaaaaaaagaggagaaataaaaccttttctcccctttccccatcctctatctatccctctttcccaggaacaaatcaaaaggtggattatcttctgaagaatggaaactgttagtccagaatgatgtgtttttctcaatgcagtgagttatagattctctagttttctccctagggatgggaagggggcattgaggcaagcctggagaggagcccggggagcagggtcatgaacttttttctttagtgaaggaggaatacaatcaagggttttgtattcagaatgttgtgcaatattttggaatgggacattggtgtgtttagagattttagtttaaaaacaaaacaaaaagattgatcaaatctgtacagtttctattgttccagatttttttaagtttgtattaaaagcatgatacataatagccttcaaaaaaaaaa

SEQ ID NO: 796 - DNA, 1627 bp, Homo sapiens
ggggacccgggccgcgtgggcgccgggatggagggcgccaaggggcggggagcgggcgtgcgtgtgtgtgcgagtgcgaatgcgagggaggccggccttgagtgaaaccggagctacaaagaaggggagagtccgggagcgggagggcgcgagggaggagcggcggctccggggcagctccgacgccctcccgcggggaaggagcccccgcggtgccgccgaggccccgacgcggggccgcccctcggctcgccgccccgcgcccgcgcccgctgggaatgatgaagaagaacaattccgccaagcggggacctcaggatggaaaccagcagcctgcaccgcccgagaaggtcggctgggtccggaaattctgcgggaaagggattttcagggagatttggaaaaaccgctatgtggtgctgaaaggggaccagctctacatctctgagaaggaggtaaaagatgagaaaaatattcaagaggtatttgacctgagtgactatgagaagtgtgaagagctccggaagtccaagagcaggagcaagaaaaatcatagcaagtttactcttgcccactccaaacagcccggtaacacggcacccaacctgatcttcctggcagtgagtccagaagagaaggaatcgtggatcaatgccctcaactctgccatcacccgagccaagaaccgtatcttggatgaggtcaccgttgaggaggacagctatcttgcccatcccactcgagacagggcaaaaatccagcactcccgccgccccccaacaaggggacacctaatggctgtggcttccacctctacctcggatgggatgctgaccttggacttgatccaagaggaagacccttcccctgaggaaccaacctcttgtgctgagagctttcgggttgacctggacaagtctgtggcccagctggcagggagccggcggagagcggactcagaccgcatccagccctccgcagaccgggcaagcagtctctcccgaccttgggaaaaaacagacaaaggggccacctacaccccccaggcacccaagaagttgacgcccacagagaaaggccgctgcgcctccctggaggagatcctatctcagcgggatgctgcctctgcccgcaccctccagctgcgggctgaggaacccccaacccctgccctccccaacccggggcagctgtcccggatccaggacctggtagcaaggaaactggaggagactcaggagcttctggcagaggttcagggactgggagatgggaagcgaaaggccaaggacccccctcggtctccgccggattctgagtcagagcagctgctgctggagacggaacggctgctgggagaggcatcatcgaattggagccaggcaaagagggtgctgcaggaggtcagggagctgagagacctgtacagacagatggacctgcagaccccggactcccacctcagacagaccaccccgcacagtcagtaccggaagagcctgatgtgagggcagggtggggtctggaacttgtcgggttggacagactcttatctccgtgttgctggataaagcttttttatttacctcaatcaaaaaaagaaaacaaaaatgaaaaaaaaaaaaaa

SEQ ID NO: 797 - DNA, 7959 bp, Homo sapiens
gcacttctcgcgaggttgcaggcagtgccgggccagacatggcggaagaggaggtggccaagttggagaagcacttgatgcttctgcggcaggagtatgtcaagctgcagaagaagctggcggagacagagaagcgctgcgctctcttggctgcgcaggcaaacaaggagagcagcagcgagtccttcatcagccgtctgctggccatcgtggcagacctctacgagcaggagcagtacagcgatctgaagataaaggttggggacaggcacatcagtgctcacaagtttgtcctggcagcccgcagtgacagctggagtctggctaacttgtcttccactaaagagttggacctgtcagatgctaatcctgaggtgacgatgacaatgcttcgctggatctatacagatgagctggagttcagagaggatgatgtgttcctgactgaactgatgaaactagcaaatcggtttcagctacagctcctcagggagagatgtgagaagggtgttatgtctctagtgaatgtcaggaactgtattcgcttctaccagacggcagaggagctgaatgccagcacactgatgaactactgtgcagaaattattgcaagtcattgggacgacctgaggaaggaggatttcagcagcatgagcgctcagttgttatacaaaatgatcaaatccaagacagagtacccgctacataaagccatcaaagtggagagagaagacgtggtcttcctgtatctgattgaaatggattcccagctccctgggaagctgaatgaagcggatcataacggagatctggcattagatctagccctctcacgacgactggagagtattgccaccacgctggttagtcacaaagctgatgtggacatggtggacaagagtggctggagcttgttacacaaaggaatccaaagaggagatctctttgctgccactttcctcattaagaatggggcctttgtcaacgctgctacactgggtgcccaggagacaccactgcaccttgtggccttgtacagttcaaagaaacactcagcagatgtgatgtctgagatggcgcagattgcagaggcccttctgcaggctggtgccaaccccaacatgcaggacagcaaggggaggactcctttacatgtgtccatcatggccgggaatgaatatgtgttcagtcagctgctgcagtgcaaacaactagatttagaactcaaagaccacgagggcagcacggctctgtggctggcagtgcagcatatcacagtgtcttctgaccagtctgtgaaccccttcgaagatgtccccgtggtaaatgggacttcatttgatgagaacagctttgcagccagactcatccagcgcggcagccacacagacgcacctgacacggcgacaggaaactgtttactacagcgggcagctggagcaggaaacgaggcagcagctcttttcctggcaaccaacggtgcccatgtcaaccacagaaacaagtggggagaaaccccgttgcacacagcgtgtcggcatggcctggccaacctcacggcagagctcctgcagcaaggcgccaacccaaacctgcagacggaggaagctctgcctctgccaaaggaggccgcatccctgaccagcttggcggacagcgtccatctgcagacgccactgcacatggcgatcgcctataaccatccggatgtggtgtctgtcatcctggagcagaaagccaatgctcttcatgccaccaacaacttgcagatcattccggacttcagcctcaaagattcccgagaccagactgtgctgggcctggcattatggactggcatgcacacgatcgcagcccagctgctgggctctggagccgccatcaatgacaccatgtcggatgggcagacgctactgcacatggccatacagcggcaggacagcaagagcgcactcttcctgctggagcaccaggcagatataaatgtcagcaggactcaggacggggagacagccctccagctggccatcagaaaccagcttccactcgtagttgatgccatatgcacccgaggagctgacatgtctgtgccagatgagaaggggaaccccccgctgtggcttgcattggcaaacaatctggaggacatcgcatccactctggtcagacatggctgtgatgccacatgctggggtccgggacctggtgggtgccttcagacgctcctgcacagagccattgatgaaaacaacgagcccaccgcctgctttcttattcgcagtggctgtgacgtgaacagtcccagacaaccaggcgccaatggagaaggagaggaagaggctagagatgggcagacccctttgcatttggcagcctcttgggggctggaagagacagtacagtgtcttctggagtttggtgccaacgtgaacgcacaggatgcagaaggaagaacccccatccacgtggccatcagcagccaacacggtgtcatcattcagctgttggtttctcaccccgatatccatttgaatgtacgagacagacaagggctgaccccgtttgcctgtgccatgactttcaagaacaacaagtcagccgaggccattctcaaacgagagtccggggctgctgagcaggtggataacaagggccggaatttccttcatgtggcagttcagaactctgatattgaaagtgtgctgttcctgatcagtgtccacgctaatgtgaattcaagagtccaggatgcctccaagttgacccccctgcacctcgctgtccaagcaggctcagaaattattgtccgcaatttgcttcttgcgggagccaaagtgaacgaattaaccaagcatcgccagactgccctccatcttgctgcccagcaggacctgcccaccatctgctcagtcctcctagagaatggcgtggactttgctgccgtggatgagaatggaaacaatgctcttcatcttgctgtcatgcacggccggctcaacaacatccgggttctcctgacagagtgcacagtggacgccgaagcctttaatctcagaggccagtcaccactgcacattttgggacaatatggcaaggagaatgcagcggccatctttgatctcttcctagaatgcatgccggggtatcctctggacaagccggatgcagacggcagcacggtgctgctcctggcatacatgaaagggaacgccaacttgtgccgcgccatcgtccggtcgggggctcgcctcggggtgaataacaaccagggagtcaacatcttcaactaccaggtcgccaccaagcagctcctgttccgactgctggatatgctgtccaaggagcctccgtggtgtgacggctcctactgctatgagtgcactgccaggttcggagtcaccactcgcaaacaccactgtcgtcactgcggacgtcttctttgccataaatgctcgaccaaggagattcctattataaagtttgatctgaacaagcctgtgcgggtttgcaacatttgttttgatgtactgactctgggtggggtttcttagtgagccccccggagggtccaggccacgtccttggtcacctccccagcagctgctctgctcaccagcctgaccccacccagagcaggagctggcgggtgtcttcctgcggcaatagactggaacgattaaggaccatggtgtgatagatcccatttcaaatgattccatatgattgtcagtgtgtgtgtcagactgtgatcgatttcactagatgtctcactcatcagaccaggccattgggcctaagtggtaaatgtgattaggaattagacctctccccattctgctagcaacatacagggacacttggaaaaccatttccccttccagtagcttggtgtccatcccagagcattcatgaagtcttcccgcctgggctgactgatgaggcagagcctctcagcgtaggaagctggctgcttaatgagctggctttactctagggtaagtggctgtggacttttctgcacagtgttttcataaagataataggatcctcttgccctgaagtctttttttctttttacgctaagctgtatttttagtgagctaccccttttaaaaaggtgaaatctttcttaacagggttcaaagatgagagctgaaaaatcgtggccttaacaactgaaagctttacagtgttcatgctactgaggtgtcaggagtgcagctgggccgcttgacacctcgtagcagccgtctcattctctcgtcttgctgcgtcctgtctgtggagtcctcagtcactctgctgttggagagtgctggaggaaatgcacttttactgtgctgcactttttatagagctgcattgtcggtgattccaatttaaaaatccatattcaaaaataccctcacacatccctgcatcagtgattctaatgatcagctttgactggacctcagctcacacgaatctccaaggaaaaactctacagagcatcttttagagcaagagattcatacaggccaagtgatgagagggggagtcaccaaggcttcagccccaagggcatctccagcctcaggccggcaggtcctatgtccttgacacaaatgcttcttgctgaaatcctccctagtgatgctgcgagtgctgttggtcccagttctgtgtagcttgccctgccccatgaagggccaccagccaagggccctggccacgtgtgcgccaccttactttggaagtctctggcttgtgtgctggatgaggctgccagaacttgttgggcgttcatcgctgttagtacatatattaaccgtgaggtgttaaacttttcttttgaaggtttggccagtttctaaaaaatgcacatttaaagagaagcatctaccacggctttaaaacaaaacaactctgagatgaacaatatgtgttatactcagagattaacaatctcaatcatacatactgattctttcagacatttaataaccactacatttttttgcattaatgaagtttgactatatgtgtaaagggactaaatatttttgcaacagcctgttctttgttcattcttttctggatagtgtgtcctctgtattgcggtagatttatacattctgttgcctaaatatgtgtgtaaaatgagctgataaactggagtactacttaaaaaaaagtctgtgatttataagatgtatatgctttctatgtgaatataagcttgtgcacaatgtttaaaagaaaaacaatgaattagaagagatcccccgtcccccagtctgacatatttcatacagaatgtttaaaagaaaaactctgctagtcttggcaaacatttggccatgtgaggcatgtggtcagtttccattttctattacctggaaagggccataaggaagcaggcagggcttaggtagcttggttacctaagttagaaagtaagagaatcatgattcggatatgaattgaagtggttggtacatggatacctgttctttaaaaggaatgtgggagatgagtcaagggtgaggccgattgttctgcccatgccctaccataccaatttcaataacaatcttgcctgtcattgcactcagaatcttaagatcatgtttcaaatatgttgattcaaacttgcttctaagcctgagtccagggatagcaatggtactgaccagctatggactgggagaacattgagtcctgttttccattggcttcagggcgcatccatgtggatataggaaaagcctctttccacagacttaggaagccccccgaccacgcggacgctcgctgggctgcactcagcaggctgcttgagtgggagctgactccaacatgccctgccctggctgggactaggcatgcttccagcccttcccgtgctctccctgctgtcaacacttgcgtacaaacctgcctagctgttgtaagttttcatcagtagcttaagtactagtagcaaaaacttaaattcattcagaaagttgccacttctgaatgagtagagcaggaaaagtaaactttactgaaacataatttgctgcaacagtcaacattgttatgctgaatgtgctctcaactgccctttgctcatcgccagatttattatccagtgtattcctaacagtcttttgttgtcgttgtttttaaaacaaaggtacggaccatgtgctatatataaatcgaatggcttaaactaatttgctatgatcctctaacaccgaaatttcccataaacttaagtgcctacacttaggacttttgaactttcagtcatctttttcgtggtgtctcactgaacgatgtgttagaacatgtgttccatttggagttttgggcctgtgcacggtcaaccccaattaccaatttagttgaggctggattcgattgctcagttcacctgccacgttctctccaaggagtggggtctacgtgacctttagtcctctacctcagagccccgagtcatttctgaccaccccgttctgtgtcctcactcttgtccctgaatgggtccctgtgtggatctcagtgtgtgtgtggtttctccactcctccccgctcatgtcccacacctgccatattgaaccgtttctgcactaatcttctccacgggcacggagtggagggaacgtcttgggaaaggggagagcttgacctccatctaggtttcttttatctggagaaaaagaacacttttgaactatgtaatgcttcaccctgaaaggcaagctaacgctaacttcccaggtgacagtagcaggaacaaggaagggtaatgtttccatgacagacacttgcttcccttgggacaagtcccagaagaactacctgaagcaccaaagctccccaccccagcctggtggcagaggaagcaggtggcaccaactcaccaaagggacttgggagccaccttctcactctgtggaagtactttagtgagagctgactggcaagataaaaaccctgaaattcccagaagttacagatgccttaaagactttctttggaagatcattgcctgtactattccttttttgtgtggcataaataatatattaacctgttacaactgacaacattggttttctgcagctagggagtcttgagtcgagactgctcgccttgatgacttgctcttttttggcagatgtgtggagttggctgttacgacatccctgtgtgatcccagaggaggggcagtagctgggcagaaactgcaggcacacatttgggtggatcacctggcttccagccccttcggggtggtgctcagtgtggggtgatggtatcatagaggaccacggcgcttatcagcattgtttctttggagtctgtgtaatggaatgtatttttcaaatactgatatttgcattttctgtaacaattccttataataaaatgaagtaaaattgtgcatttaaagtggaaactttaataagacatttgtagttacttctaatgcagaagtaccaataagcattaaaaacaaattttagaaaactcctgacgtgaataagtttcttgaccagctgccctccagaaagtttgaattccaacatttttcaggaacatgctgttgacagcagtaaaagtagctattttatgtatgtatttttaatttttaaaagtttcagtaggtttttggggttcaggtggtgtttggttacgtgaggttctttagcggtgatttccaggattttggggcacccatcacccaagcagtgtacactggacccttttatccctcaccccaaccctttcccctgagcccccaaagtccactgtatcattcttaatgcctttacgtcctcatggcttagctcccgaaaagtagttattttaaacatactagctgcctgaacttactgtgcccttggcccagatttcagctcatagcaccgagcgtgatcactgaggcagtctcagtcaccgtcacctgacccctctgaa

SEQ ID NO: 798 - DNA, 3525 bp, Homo sapiens
acggcatgctgggaaggcgtccgcgcggcggccattttgtcttgtcggctcctgtgtgtaggagggatttcggcctgagagcgggccgaggagattggcgacggtgtcgcccgtgttttcgttggcgggtgcctgggctggtgggaacagccgcccgaaggaagcaccatgatttcggccgcgcagttgttggatgagttaatgggccgggaccgaaacctagccccggacgagaagcgcagcaacgtgcggtgggaccacgagagcgtttgtaaatattatctctgtggtttttgtcctgcggaattgttcacaaatacacgttctgatcttggtccgtgtgaaaaaattcatgatgaaaatctacgaaaacagtatgagaagagctctcgtttcatgaaagttggctatgagagagattttttgcgatacttacagagcttacttgcagaagtagaacgtaggatcagacgaggccatgctcgtttggcattatctcaaaaccagcagtcttctggggccgctggcccaacaggcaaaaatgaagaaaaaattcaggttctaacagacaaaattgatgtacttctgcaacagattgaagaattagggtctgaaggaaaagtagaagaagcccaggggatgatgaaattagttgagcaattaaaagaagagagagaactgctaaggtccacaacgtcgacaattgaaagctttgctgcacaagaaaaacaaatggaagtttgtgaagtatgtggagcctttttaatagtaggagatgcccagtcccgggtagatgaccatttgatgggaaaacaacacatgggctatgccaaaattaaagctactgtagaagaattaaaagaaaagttaaggaaaagaaccgaagaacctgatcgtgatgagcgtctaaaaaaggagaagcaagaaagagaagaaagagaaaaagaacgggagagagaaagggaagaaagagaaaggaaaagacgaagggaagaggaagaaagagaaaaagaaagggctcgtgacagagaaagaagaaagagaagtcgttcacgaagtagacactcaagccgaacatcagacagaagatgcagcaggtctcgggaccacaaaaggtcacgaagtagagaaagaaggcggagcagaagtagagatcgacgaagaagcagaagccatgatcgatcagaaagaaaacacagatctcgaagtcgggatcgaagaagatcaaaaagccgggatcgaaagtcatataagcacaggagcaaaagtcgggacagagaacaagatagaaaatccaaggagaaagaaaagaggggatctgatgataaaaaaagtagtgtgaagtccggtagtcgagaaaagcagagtgaagacacaaacactgaatcgaaggaaagtgatactaagaatgaggtcaatgggaccagtgaagacattaaatctgaaggtgacactcagtccaattaaaactgatctgataagacctcagatcagacagaggtaagtgtattgtttctcactttgattagggctttttgttactgtttgacagtgcagcgtaagtatgcacagatgaagatggaactaagccgagtaagaagacatacaaaagcctcttctgaaggaaaagacagtgtagtcctgcaaaacattttgaggtacattgttttgtctcagctattttgtagcagactcgtgcccccattagtgtgcctctttggaaattatcgcccacatttgtaatatagtcgccattgaaaagttaattatcctttttttagggattttgatgtcatttcttttttttttttaataaaaaggttgaactgtttttttttttctttttggtattaagtccatcttgtgttggtacattggcagagacatatgctttaaaaacttaaatatttcggaggcacatgttggactactttgttttaattaaactgctagtatttctttgtcaaggatgtttctagttttttgctttattgccttgcattctaatgcagtttgttctgtaactcgagagccagtagcattggattgatggaagtgtagggtttatgaattattgcagctgactaccatacctcacacagcgttggtgttgtgagcggcccatgaaaagccaaattaaaaatcaaggattcagtcaaactaagcaggtactcatgccaggtactcctttctctacccacatccatgtttgaatgctattgcctgtgatctttacgcttaactgttgtgtatcttttttgttctttacaagaagtgcagaggggttttttgtgtattgcgtgaaaacttataaaacaaatgttaacagaatggaattttttttcaactgtatgtagggctgcagtggtggccagaattagatatctttaaagaattttaaatacaataaacacttcatattattcgccttgttacactcaatgcaattctcaagtctataagaggtatgtgcttaatatttcctactgtgtaggagaatttgcagtcagccataggtatgtaggaatagtcactcactggctgatacatttaaagcagcagtgtgaatagcaaggacagacaccttcaatttgtgaaatcaaagaactgatgcactatatagaacgaatttgggtttttaaagaaatattaaaagttaggtactgtaagtgttcttaaaacctgtaaacttcattctgtgggctagtggtgtgggacaaaatattcctaatgaaaggaagtaccaattagttgatttgttggtggcattccccttttgggaaagcaatgtaaggttatgtctgtgtatgtcattcacacttaggcaagcatacacaggcacatggctttaagaaccacactgatgccttgataattaaaaagaatacaagcattccatgtacacatgttaattagcagttagtgactgggccaacactttctcataaaaattggccttttacatgttgtctaattatcatttttccccaaattttgcgttgtaggactactgttcgaagatttttggaagaatactgagaacggcataaagtgaagatcgacatttaaaaaatgaggtgaaagaaagctatagtggcatagaaaaagtataaagctcagttagtttttttattattattattattaaaagttaattcaggactgatgtgacctaccagatttcagaacatgtgttaatagtatatatgccactgaaaacttaggtcctgtatcatacttttttctttaagactttttaagaaatattacttaaacatgtggcttgctcagtgtttaattgcaagttttcaatcttggactttgaaaacaggattaaacgttagtattcgtgtgaatcagactaagtgggatttcatttttacaactctgctctacttagcctttggatttagaagtaaaaataaagtatctctgactttctgttacaaagttgattgtctctgtcattgaaaagttttagtattaatctttttctaataaagttattgactctgaaaaaaaaaa

SEQ ID NO: 799 - DNA, 4877 bp, Homo sapiens
ggcggattggcgggcacgccccctcgcccgcggccccctccccgcctctctccaccgcctcctctggctccccggtcagagggccggagcgagaagatggcgaagacgtacgattatctcttcaagctcctgctgatcggcgactcgggggtaggcaagacctgcctcctgttccgcttctcagaggacgccttcaacaccaccttcatctccaccatcggaattgattttaaaattagaacgatagaactagatggaaagaaaattaagcttcagatatgggacacagcgggtcaggaaagattccgaacaatcacgacagcgtactacagaggagccatgggcattatgctggtctatgacatcacaaatgaaaaatcctttgacaatattaaaaattggatcagaaacattgaagagcatgcctcttccgatgtcgaaagaatgatcctgggtaacaaatgtgatatgaatgacaaaagacaagtgtcaaaagaaagaggggagaagctagcaattgactatgggattaaattcttggagacaagcgcaaaatccagtgcaaatgtagaagaggcattttttacacttgcacgagatataatgacaaaactcaacagaaaaatgaatgacagcaattcagcaggagcaggtggaccagtgaaaataacagaaaaccgatcaaagaagaccagtttctttcgttgctcgctactttgatgaactctttctgagagactgcagcacacctagagggccctttcctgcttctctgaaagcacaggtcacccagcctcagaatcacacctcccggctgctgctgagagcaccactgaacttagacctctcaacacagtatgccaagtggattccagcctcatggcctagcaaaagaacagactccctttttcaaacatggaagcaatgaagtggagacacatgcaggacctaactcgttttttccttgttttattacctgttgcagaagcggttatctttcttttttactttgcacatcagtgttagcctttccctatttcagcacaatcttagactcatatttgcacacttttgtgtcgtgaagttctagacaaatttgtacatgtggcaatgttaaaagagcatttacagcagaggttaatatactaaaattaaagggtatttggtctggttcatatggtcaaatattactgccttggtagcatttatttaagggctttttcttaaataagaatcattaaagtcattaaaaaaatttactgaaatgcccatcttgtcatcaaaggccacaatttctttatttcttcagattaagagctttgcctcatccccgacctgttttccagagtctgggtagctgaatgaatcactttaaaatgattacctctgcctaatctatagaaactgcatttggaaatcaccataatctcatttttccctggggtttgtatttgctattctttcccatgtttgacttaagtgtaatcactcttaagtaatatttgaacattattatctgtttctatttgtgaacttcttgagctgaaattttacgtgggctgagagatataccatttagggttttagtgcagcatctaactgtgattctgtcaataaggatatgtaatatattttttcttaggttcactccttagctggctggtttagttgtaataccaaattcctaccataatccctgtctacaaaagttaggtttagattttagtttgcggaaaccttccctatatagagacagattaacttgttgatataaatttaatagagctagctcttggtaatggtgaaaataatgagttttggttggttttatttggcagatgtttttagaaataaaagtacttagacctagtgcagcctctaggaaaagtcttgccttttcattagagaaaacaggaccaaggtttcagttttcaaacagctgttgttgattgtgtagaacccagttccatctgttttggttcattgttacagaacttagtccagtcatttgggctaaagccaaccaaaagcttagttgcctttctcaacaaacactggtactggtatacttttgtagatgaaaccatcacaaggtatttagtgttaacttgtgtgccaaattcagatcactatgtcgttgttgctctagccttcagtgtcataacacaggggggataaaacagaggggatgagggaaatgaattctgttaataattattcttcctggtatgcctgttttgcttcacaaaggctactatcatgctggatagataagaacaggagatggcagtggaaagggattgcttgttaccacagagaattctcttcaaattaagatatgtcattagaatgcttggaccagtcaatcttttgtacttatttgaaaatataggaacaatttagcagctgcaaatatgcccaagctatttttaatagatatactaaacttattgttgacaaatttcagcctccttaatttttttttttttggtaattacctataggcttaaaagtcattcgttgctgttctagtataattagtagttccgtgattgaaagtttattgtaattctactatcttcaaattagatacattttcaaaaggaaaagataattttttagaaacatcttaatattcactatttcctgaaaaaatccaagcagttaacgctttctggatggtaacaaagtaccttctaaaagataagtgctatgacaccatgtatgaatgtaattctcttagtaatttacctctgactatttggtgtcttaacgctttggtttatataatctcaggggttgtctgcaaaccaaaactgacatattctgtggttagcttttattacttttttttttaacagaatgctttgctttggttatatttcttctttcttcttttgtcttatatggattaataactagtctccatgaacttcacttgaaagagcctgtaaaagttagatgagtctaaaagtgctctttgaagtagcagcaaattgggagtatatgctctgttatatagaaataaattgtccttgctattttcttacatttagctttgctagattgtatatacattgagctaagaccttaggaaattcactttctgcatgataaaatgacccaataaatattccactttgcttaataatgtacatacagtgcattattttttctatttgtagatgaatttaatgacagataattgtctgttccccgctgaaactgaagaaatctagtttttttgtgaacatttttgtggtcttatggataaggtacatgaagatttttgcagcagtattagtggttcagtggctgcactttattaatcagtgtgttaatttttgacagtgattggactagaccttttcaaatagagtctgagggtatcagacagtgaaaatgtgctgtaactaagtagcatgtaaatcagttgattgtaaaacgtttcgctgggaacttattttagctatattttacttcagacagattatgatacaataatctacctgtgcatcagttagtaggtgctgcagggtttcttactatttacagaaacattttgtgcagtctttgttataaattttcagaagactatactctttactttgaaggtctattttttaattatacctcatttagctaactagtattctaatacctggtagaaaaacagtgagccagcctttaagcatctaacaaaatttagactctttgttttgttttgaactgaagacatcattgggaaaggtaggaaatattagtttaggatagagcatacatgtcatatccagtagcataaaaaaagtattatctccctgtctccattaataaatttagctgtgcaatataggtgcgtttttgcagaagtttctagtaagagattataactccattttacaggttctgaatgctcagagtctatattaaggcttataaagtttttcctgtgatcagtaagtgacacatttaagcagacattcttttcaagttcatgacttagattcctttacaaatttagttctcaatctttaaaaaccacatttcattatgttggttaattattataaattttaagcactcatttctgcaatcaggtttctcagaattttttttttttaaacagaagagacattcctttttccttgttacatccaaggggggcacaggggtgggtggaaaggaatgtctaaaaatgaaatcccttgatatagagggacctagacggacaggatatgctaaaataatttcaaattctagcacaattttagagtagaataagtcatttttttagactaataaaattaatggctgtcatgttcactctgaaaaaaatctaaatgactgaaatgtacagaaataaaaattagcaaacaattattctagggatattttcagattttacttcatttcttgaaatgcgtgtgccatatgcaattgcatttcttgtgccaagaaactaatagaacttatttcactttacctttttttaaaatgtgaatttagttattatagttcaattttatggccttacagatggcttttattttgtttgcagctgacactgcagttcctttcatgcaaaataccataaactgtttgatgaaaatcatgcccctaatggaaactctctagtttttccatataactatcctactgtacatgtttaaacatattttatttttgctccaatggcttaatgtgaaaagctcctgcagataagtggacctgtcatgtggttaatcttgtttaagccaattcattaactgtgtactgatactgatgctatgttttttttaaatggattttattccaggtgaactttttttttataataatgttcgtctaaaataaaaactacataatgaaaatgaaaa

SEQ ID NO: 800 - DNA, 3436 bp, Homo sapiens
tcaatgcactgttcaaggatgtttgagagattttctgtcttgcctgaatacaaaacactgtagggaacctctttgtgcttgactttgcacacacacgggatcttcagggtgggtacatttaaaactgacaagtattgccaaattgccccccaacgtagtttttacaccccacctactactctcagtgaaaaatcaggccctttttattttaagggctaaattgctaatccctgtgtgaaaatgggtgttaacaaaataaaaaataaggaaaatatgcaggcttacccaattttgttatctatacattttacagtctctaatacttagcatagctcctttgggtgtctgcccaccacccttctttctgaacgtggggttccctgggctttccttgtttgacttcagacctggatctaatagggatctggaggtagaatcaagacgaatgttccctttggccttaggtgagtcctttgcatctctgaggccctgttgatgacatccagttctctagacctctgcccaaaccagagcaatccctcctcaaatatgctaagcagaaatgcagacaatataagacacactatatttatattttaggagtttacattaccttcccttctgtttggaaaccaacatctctcaaaattaggtatagttaacacagaataccccaaaataccaccattcttcataattccatttccttatttctggattctttcaagggtaaaaaccttgtttcattcatctttggggcagcatttgcctagtatgtggtaggcgcccagtagattttggataaactgacctgattttctgttaatattccaactggattatttctttctcctcttacagaatgaagatattcaaatgttattttaaacataccctacagcagaaagttttcatcctgtttttaaccctatggctgctctctttgttaaagcttctaaatgtgagacgactctttccgcaaaaagacatttacttggttgagtactccctaagtacctcgccttttgtaagaaacagatacactcatgttaaggatgaagtcaggtatgaagttaactgttcgggtatctatgaacaggagcctttggaaattggaaagagtctggaaataagaagaagggacatcattgacttggaggatgatgatgttgtggcaatgaccagtgattgtgacatttatcagactctaagaggttatgctcaaaagcttgtctcaaaggaggagaaaagcttcccaatagcctattctttggttgtccacaaagatgcaattatggttgaaaggcttatccatgctatatacaaccagcacaatatttactgcatccattatgatcgtaaggcacctgataccttcaaagttgccatgaacaatttagctaagtgcttctccaatattttcattgcttccaaattagaggctgtggaatatgcccacatttccagactccaggctgatttaaattgcttgtcggaccttctgaagtcttcaatccagtggaaatatgttatcaacttgtgtgggcaagattttcccctgaagtcaaattttgaattggtgtcagagttgaaaaaactcaatggagcaaatatgttggagacggtgaaacccccaaacagtaaattggaaagattcacttaccatcatgaacttagacgggtgccttatgaatatgtgaagctaccaataaggacaaacatctccaaggaagcacccccccataacattcagatatttgttggcagtgcttattttgttttaagtcaagcatttgttaaatatattttcaacaactccatcgttcaagacttttttgcctggtctaaagacacatactctcctgatgagcacttttgggctaccttgattcgggttccaggaatacctggggagatttccagatcagcccaggatgtgtctgatctgcagagtaagactcgccttgtcaagtggaattactatgaaggctttttctatcccagttgtactggatctcaccttcgaagcgtgtgtatttatggagctgcagaattaaggtggcttatcaaagatggacattggtttgctaataaatttgattctaaggtggaccctatcttgattaaatgcttggcagaaaagcttgaagaacagcagagagactggatcactttgccctcagaaaagttatttatggatagaaatctcactaccacatcatgatagtaaaatcaggatggaaataagagggtgcctgataaatggagtcagtgtggaattgaataccatactatgcccaatactgtttaaactcagtcctcccatattttaaaaggtgtccaaaattccatacacaagggaaagtgatctagcctttgatgttattagcctgcagttggctaggtttttttaatatttgtttttgcttgtaatctcactgagccaaatcagagatcttaaacattcagtcagtcatcaaacattattgagcacctaactatatgacaggcacttttttagagactgcggcttatcctcatcatagcaacctcggtatctttaagttctccacataacagtcaggattctactgaagaagcttttgaagtttgtggtaatcgtctgatcatataaaccacccatttcagagtagtgtttaagtactgtgaccaacactccacttgtctcttaactcagctttcaagacatttcttaaccatcagagcagaggaggaaagactcactacctcagaaaaatctcaaagaatagtccaatttcctgcttgccaaagcataatctgccttttggtgcattacttggtcaattcagggttgaggagactgttggggggcatttataatgtatgaaagttaaggaagggggtgaggatgtgggttgggacaggtagtacctaaagaggagcgaagggatttatacaacatttttatcatgttacaaaacagtatcatgaatggcctcctttttagttcaactgtttctttaaaatgcatttactgattaaaaataagaactgaccaatagctccaagtgtcacacaccagaacattaagcctaagtcctcaattcataagttatcattctagataagtttctttacaatggaatactttctgtggaatcattataattctgttgtatggaactatcaagctaagagtcactaaactttcttcaaaaggttgtgtgaaatatgacagctttctaaattaatttgtatagtcatttaaaattttttcttctctggcaactgtccaactggaatccagatttaaagtgataaaagctctaagtttcttgcagtctttttctcagcttagttccagagagaaaaaagctaattttcctaaggacacagcaagaatattcattaaggatattttctaaaacccacacttgagaaaaccacccaatga

SEQ ID NO: 801 - DNA, 2618 bp, Homo sapiens
agattgcagagggagacgtggacgtgagtggagcggggcggtccccagcacactagaggaagtcgtgctacccccgcggagttgtcgtgtgttctggattcattccggcaccaccatgtcgaaggtttcctttaagatcacgctgacgtcggacccacggctgccgtacaaagtactcagtgttcctgaaagtacacctttcacagcagtcttaaagtttgcagcagaagaatttaaagttcctgctgcaacaagtgcaattattaccaatgatggaataggaataaatcctgcacagactgctggaaatgtttttctaaaacatggttcagaactgcggattattcctagagatcgtgttggaagttgttaatatctgctacttggaacatacgattgcctttcagaataaatattggtattttttgttgttgtaaaattgaaatcaggcatttaacatactatgaaaacaccaggagtcaatgattaatgaaaggtgactcatctgtccctttttgttgtccatactcttcctatgaagagggaatgcgtatgaattaaggctactactgtcacagaagatcatagtctttgatgctacctcacaacacaaacaggtagttcgttgggggcaaatgaattagccaactgttaactggaagcttttgataatttttttttttagaacaatttggaacattaaaatttactgaatcgtatatattcatctgagataaaaatataaaaagaattatggaccctggatggcaatttgcttgatagcatctgatttgcagactcataatttgatttttaattaaatatataggttatgatgaagtgaatagacatatcagtgaacagttaactatattaaatttttatcatttactttttttaagattcagacctcagttatataaatttcagtttaatatcaaccaaaaaattaaaattttaatctaacccttatgtgtataaattggtgtcccataccagcttttaatggtggacctatagaatccagtacttttaatggtgggaatttacagtagaagcatcctttgctgagttatacattcctttatcaatctcttttgatacaacatttaaaacaagtagcttcaagaaaccactggtgttttgaggatagtatttctaaatagcattcaggaacagagtattattgcacagatctgaagatcaaaaaaaagctcaaggaaatacagatcggaagtgctgatgagttatatttattgaaaacccaacttttaaggaagtgctaagatcagtcacccatgtgaataagaagccaggaaaggaaagatggggaagcccagatcaccaggcttctattaaggaggaaagcaacagaggaaacagtgaaggggaacagaagggggtagcaaagtgttacagaaaagcggactggatagacaaaactgcagaaggtgtatgttggggagaactgaaagggaaaacaaaatacttgacatagtcttaagtagaagaaggcagttagagaaaacaaagtatctactggccttgtcaacatacagacttcaaaataccccttatgagaatccaaagaatgatgtgtgtaagggaagattttatttgcccttccggaagaaatcagtatctatgcaaatcttgaaagacgaaatcaaagcccattaatgattcagaatcagtgcttgacctcctgtattctgaatggtgaactctggaagcagggattgtgtctggctctttttagagctggaaatgtagtggctttcattaaatacttgctgtaaagtctttctaagaccaattattatcttagcatgtttcagtatcttctctatcataggccctaagttcattgggggaaaaaaaataagaagattcaacagaatcagcatttgaagtgtaccattggtagttgtttatgaaattaccagatattcataaatgtgacaaatgaacagcaggattatgaattatcaaaggaaaaagtatttgctgaggtgaaaaaatctgatgtttgaggaagtttttatttttatttatttgttttgtttttttttttttgaggcagactctctgtcgccaggcttctcctgcctcagcctcacgagtagctgggactacaggcatgcaccaccacgcccagctaatttttgtatttttagcagagacagggaggaagtttttatttttataaacaaaatctgatgttcagaggccccgtttcttacaataaatgttgagtcttagttaagcaggaatttatgaacacccatttcctgactttttgctttaatttagatttttctccatcctgtttctagcacaaaaatttgcctgctgtgttacaaaaataaatttatgttgtcctgtgccataaagtgatatatttaatatttttattctttggttttgaacattgtaagttcctaaaaacattttattaaacaagtagacattttgttattaaaaaaatgtgatctgtaatttctttgtgcagaatgatttgaagtattgtattcagtttacatgcgttattggtttataattaatatctaatgaaaatacatgttgttatattgtaaaccaaaaaaaaaaaaaaaaaa

SEQ ID NO: 802 - DNA, 2102 bp, Homo sapiens
gatcaggcggcttggggagcctggcggtcgccattgcaatgcactgagtaacggggcgggccgagagcagtcaccaacccctctcgttgaggctgctcggttgtggccagaaacgctggctctggcattaactgtctacacccctccccttacttgggacaggaccgcatagccctcccctccccccgtcctgcaagatcttatgcggctaggtgcctgggaagtaacagcaagaggtttgatttaattttggatgagatcgttcttgcagcaagatgttaataagacaaaatctagccttagattgtaagcaaaagaaatcaaggtcaagatctggaagcaagaagaaaatgctaacattacctcatggtgctgacgaggtttacattctccgatgcaggttttgtggcctagtctttcgaggacccttgtctgttcaggaagactggattaagcacttacaacgacatattgtaaacgctaatcttccacggactggagctggcatggtggaagtcacgtcactacttaaaaagcctgcctccattacagaaacttcattttctctactaatggccgaagcagcttcatagaaccaggaaaccttttaaatagccagtttgaattggatgtaaatttgaaattctttttttttaagccacattaaattatctgtttataaatactaaagcaggaaaatggggggaaagtgaattacagtgacatcagagcaaattgaatacttaaaacagtaagtagtctatatattttatatagggtggaagatgtgtttttaaggtttatgaagttttgttggttaactgtgttcactcagtaaaagagcagtacatgtaagcagccattaataaactgttgcacatggatacttatagacagacttattggacaattatgttttttgcagtgttaccagaatcaaggctctgtttattccccacaagacttgcatagaaaaataagatattatattttgtttgtatgtatttagtgttttgtataataccaagaaccgctgactaaatttactcaaattagggcattaaatatcatgtacttcatagtttgagactgttcactcaaatagggcagagtactattctatctagatgtgtaagtgttttttttaaaatcacatggaacggttttttttatactaaaaagtggagggagatttgtttaaacaagtatttctaaaagaaatatgtacatagttctggaaattatttgtggtaaggaaatattctttactccagttgcatttctcagacaataaagtggtgcatccatgctacctcctactttgtcaacaaagatgctatttaccctttacatttttgtatcataatagattttaaaaatctaatgttctttattgcaagacattcttttgttaacaggtttgtttctttttaatgttttacctaaaatttgacatgcttacaggacaggtttgcctcttactttatttaacattgtagaaatgtaattaataaacaatgctcactacacagtttagaatagacgttctcatttatattatcttccaaatttgatcagttagcaaaacttaatacaccaattaaaatatttctacatatgagaatgtttacaatttaaattttagaacttgttttggatgtgattatatgtacgaaaatcgtgtaacactatgctcatgctaagaaccgacataacagaattactgaaataaatgtgctgtgaggaatggaaaatatggtgcaggtgtcttggtcatgataaattgtgattctttttaaaaattttttccaaaaacaattaggtattttaatctgaaatcagattcctttacaaacaacaagtttttgtatgcaagcaccattttatttcatgtagtatggctaatactatagttgaaccaaggatatgcattgattctttgcttcgtatgtaaataaagttaaaaacagttaaaataaggagtattttggtagagtatatacatacctcactgccagtgaaattgctttcctatggtatatctccttaccagaaaaatctctaaataaaaaaaggtttaaagaaaattaaaaaaaaaaaaa

SEQ ID NO: 803 - DNA, 13804 bp, Homo sapiens
ggtgctcgcgaaagctcgctgtcgctgggaggcgcgcgccggcgttcctcggccgctccgggtacctgagggacgcgcggccgcccgcggcaggcggtgcagcccccccaccccttggagccaggcgccggggtctgaggatagcatttctcaagacctgacttatggagcacttgtaacctgagatatttcagttgaaggaagaaatagctcttctcctaagatggaatctgtggtttgggaatgtggttgatcaacttgatatgttggccaaatgtgccccatgtaataaaatgaaaagaagagacaagatgatgtcattttcccatattgtgaaaccaaaaacaaacgccttttgtgagaccaagctaacaaacctctgacggtgcgaagagtatttaactgtttgaagaatttaacagtaagatacagaagaagtaccttcgagctgagacctgcaggtgtataaatatctaaaatacatattgaataggcctgatcatctgaatctccttcagacccaggaaggatggctatgacttggattgtcttctctctttggcccttgactgtgttcatggggcatataggtgggcacagtttgttttcttgtgaacctattaccttgaggatgtgccaagatttgccttataatactaccttcatgcctaatcttctgaatcattatgaccaacagacagcagctttggcaatggagccattccaccctatggtgaatctggattgttctcgggatttccggccttttctttgtgcactctacgctcctatttgtatggaatatggacgtgtcacacttccctgtcgtaggctgtgtcagcgggcttacagtgagtgttcgaagctcatggagatgtttggtgttccttggcctgaagatatggaatgcagtaggttcccagattgtgatgagccatatcctcgacttgtggatctgaatttagctggagaaccaactgaaggagccccagtggcagtgcagagagactatggtttttggtgtccccgagagttaaaaattgatcctgatctgggttattcttttctgcatgtgcgtgattgttcacctccttgtccaaatatgtacttcagaagagaagaactgtcatttgctcgctatttcataggattgatttcaatcatttgcctctcggccacattgtttacttttttaacttttttgattgatgtcacaagattccgttatcctgaaaggcctattatattttatgcagtctgctacatgatggtatccttaattttcttcattggatttttgcttgaagatcgagtagcctgcaatgcatccatccctgcacaatataaggcttccacagtgacacaaggatctcataataaagcctgtaccatgctttttatgatactctatttttttactatggctggcagtgtatggtgggtaattcttaccatcacatggtttttagcagctgtgccaaagtggggtagtgaagctattgagaagaaagcattgctgtttcacgccagtgcatggggcatccccggaactctaaccatcatccttttagcgatgaataaaattgaaggtgacaatattagtggcgtgtgttttgttggcctctacgatgttgatgcattgagatattttgttcttgctcccctctgcctgtatgtggtagttggggtttctctcctcttagctggcattatatccctaaacagagttcgaattgagattccattagaaaaggagaaccaagataaattagtgaagtttatgatccggatcggtgttttcagcattctttatctcgtaccactcttggttgtaattggatgctacttttatgagcaagcttaccggggcatctgggaaacaacgtggatacaagaacgctgcagagaatatcacattccatgtccatatcaggttactcaaatgagtcgtccagacttgattctctttctgatgaaatacctgatggctctcatagttggcattccctctgtattttgggttggaagcaaaaagacatgctttgaatgggccagtttttttcatggtcgtaggaaaaaagagatagtgaatgagagccgacaggtactccaggaacctgattttgctcagtctctcctgagggatccaaatactcctatcataagaaagtcaaggggaacttccactcaaggaacatccacccatgcttcttcaactcagctggctatggtggatgatcaaagaagcaaagcaggaagcatccacagcaaagtgagcagctaccacggcagcctccacagatcacgtgatggcaggtacacgccctgcagttacagaggaatggaggagagactacctcatggcagcatgtcacgactaacagatcactccaggcatagtagttctcatcggctcaatgaacagtcacgacatagcagcatcagagatctcagtaataatcccatgactcatatcacacatggcaccagcatgaatcgggttattgaagaagatggaaccagtgcttaatttgtcttgtctaaggtggaaatcttgtgctgtttaaaaagcagattttattctttgccttttgcatgactgatagctgtaactcacagttaacatgctttcagtcaagtacagattgtgtccactggaaaggtaaatgattgcttttttatattgcatcaaacttggaacatcaaggcatccaaaacactaagaattctatcatcacaaaaataattcgtctttctaggttatgaagagataattatttgtctggtaagcatttttataaacccactcattttatatttagaaaaatcctaaatgtgtggtgactgctttgtagtgaactttcatatactataaactagttgtgagataacattctggtagctcagttaataaaacaatttcagaattaaagaaattttctatgcaaggtttacttctcagatgaacagtaggactttgtagttttatttccactaagtgaaaaaagaactgtgtttttaaactgtaggagaatttaataaatcagcaagggtattttagctaatagaataaaagtgcaacagaagaatttgattagtctatgaaaggttctcttaaaattctatcgaaataatcttcatgcagagatattcagggtttggattagcagtggaataaagagatgggcattgtttcccctataattgtgctgtttttataacttttgtaaatattactttttctggctgtgtttttataacttatccatatgcatgatggaaaaattttaatttgtagccatcttttcccatgtaatagtattgattcatagagaacttaatgttcaaaatttgctttgtggaggcatgtaataagataaacatcatacattataaggtaaccacaattacaaaatggcaaaacattttctctgtattcattgttgtatttttctacagtgagatgtgatcttgccaaagccaccagaccttggcttccaggccctcctgtagtgagttgattgtctgcacttgccttgcccaatagccagtaggctacagcttttgccccacacccttattttcagattctggatcattcttgtttacaactgaaatatatataacctcagtccaaagtggtgattgatttgagtatttgaaaattgttgtagctaaatgaagcatgattagtcttagtatgaatatcatttaatctttaaaaaatcaagtaaaaatgtttatctgataatgtttaaataatttacaatataaactgtaaaacttattaggcatgaaatcaatcagaagagaaagaaaaatgctggaacatgcttgatgtattatgtaaaaagcatatttaaacaagggtcctcaaccctgactgcagataagaatcacttgggttacttcagatgcctaacaccttcctctcatacaaataagaattggtagctttcttaaaaaaaaaaaaaaaaaaaaaaagcgctccaggtgattctaatctgcagcctggcttgaaactcactactttaacttgcccctgatgatctgtcggcatcatatatcacatgaacatccacatggattctgtctttcgcttttatatcattatctaatattcagttgttctgcacctgatgccaaattctgggctgtactcctagagagacttactcagtaaggccaaagtgataggactttaaaatctgtagttataaaaataccgcaggtgattcttacggaggtaatccaagaatcatactttgaagaattattctagactctgaagaggcctggctctgccttatgctattatagtttatgacctttaacaatttaactctccgagcctcagttcccttgtttgtaaatgaagatagaagataaatacgtactctacctacctcacaaagctgtcagattaagatcaagtgaaaaaaattatgtgaaagctctttgaaaactgtaaagcattatgaatgataagggattaggttattgtggatttaagaggtgtgaggactgctatagtacattccttgacgtgtgttgaattcatgtatactttctttcttaccctttaaaacaaactgccaagaaattaggtgttgaaaaagaatattctcatcaggcagcaaagtcagttttctgatagtaataatttgtctattatgttatatatttcaaagtacatgtatgataatatgacttattcttcatgagagatatttgaatatttggcccaaaatgtttttcatttttctctgtgttcattgcctttctccttggagctggagttaatgctcaaagcaggcaggtctgaattccctcataaccgacaattagtaaacattttctctgaaagccaaacatataacaacttatttatcaataattcatgaagcttttgtctgagaatctctcctgcaaacagcatgagagaactaaaacaaacattcacaaacaaaaataagttaaaatagaaggtaccagtttgggctcgaagatgttgtcatccattgccatctgcattatattatcaactgccaaaatgttaattggttttcttttacaagtgggccaagtatagacagttaagtgaacatcactatgaaaatcttaactttgtgcttctagatttttagataatcatttgtattttctctattaaattgtgggtatgtatgggaatactatattgacttttcagttactttcagtaagtatcttaattttgtcccacaaaatttatgtaatattaatccatggttttaaacaacagtattcagtttgggcagcagttttaagtctaactagcttaaaccaatctgaataagtctggacagttttcctaccatatgtttaactttgattggcatatgataatgtttagtgttttcttttttcagttgacaactgagaaaataatagttctctctaacatgttaatatattatcaaaaggttttcaaaaagtactttgatttcagcaactttttttattcaataactagacaaaagatctaagataatattaaactcaaaacagtttgtttcaaagaacaattggttaataactcagctggcacagggattcatacacagtttttcaataaatatttaaatgaacaattcatgtcacacaacttgcttttaccctagtactgagtctcacatcaaagaaatttgaaagatctataacctatgtgaaatgaagtctctgctttaccagaataatatgtggcaggtaataaatatgtaaagtacaccaaatgaaacatattttgcatagataacagtccatatcactattataattaaagaaatatatgtacagacatgtaccaatccttttaattaattttagaagatgaacagtgattcttagaagtgagtaattagactccttttagtcttatgctgttagatctttgtggaccagctgagtaaatgaatcttcaaatcaacctttctttttctgctgctcttagagcagatttataaaaatcctaagaatgtcttcaaattagaaaaatttactacattttaacctacctcatcagtttctttgtgataatagctgaaaataactcaaactgtacccatcttagttaggctatatctctgtgaaatgaaaggaaccacttaattttttttatataaattagtgaatcatttgctggagcttagaaaatattaacataccaaaatttcattatgatgatatttatattgctttttgacatgccaaaggtacatttacatattaccatatttggatgacttacatagtctggtgtaatgaaaattcccctgggattggaattttaagactcatgatgtcaactgggctggtcattttatttctctgagtctttgtttcttcaatgtaaaatgtggataaggtaatttttggttttagcctccctcactggatattgtaaggatcaaatgaaatagtatttattataatgctctgtaacccataaattattctacttaaaaaaattttttatagagacagggtcttgctctgtcacacaggctggagagcagtggcataatcatagttcattataaccttgaactcctaggctcaagcagtcctccagcttcagcctcccaagtagctaagactgtaggcatgcaccactacacctggctaattttaatttttttttctttttttgagacggagtctggctttgttgcccaggctggagtgcagtggcacaatctcagctcactgcaacctccacctcccaggttcaagtgattcttctgtctcagcctcccgagtaactgggactacaggtgcgtgccaccacatccagctagtttttgtatttttagtggagatggagttttgccatgttggtctcaaactcctgacctcaagtgatctgcccacctcagcctcccaaagtgctaggattacaggcatgagtcactgcacctggcttaattttaatttttttaattttttgtagagatgagtctcactatgttgaccaggctggtcttgaactcctggcctcctaaagcactgggattacaagcatgagccaccatgcctgatccataaattgttctactgataccatttggttttgttagaatttgggggggctatagaaaacaaggttacagtcttcattagtatttctttttagcaataacaacaaaataggcaattagaccagtgttcatttggtacagtctttaaatcggtcatccaattaacctttaaaaagtaggttatgctcttaaattgtattggttctttaatatgtgttataccagagtatgcctcaaattttatgtagttgaatttgtagaacaaatttggggatattcattttatttttccttttatatgaaattgtataagtacattagcttgacttaaattataaaaaaaaatatatatgaagaagaatgtagaccctataatgttttttgtctttgactttttggcttttatgtacctcattttttctgattgagaaaaagttttgaaaaagtgattcacttgttggttttcattgtggcaaaactttaaattttaagtcatcacactatgagaattgtttgtacacatttataatttttttaaagtatgtaaagtaaggattttttctccattcttcactcacaaaggatagcatttttatggaacctagatttacaaaggaacttgtgattcttttcaatgcttttgtgtcgttttacagctgattaagaaaaaatgtttacatttaattcagctgtatttcctagtagctgtataatcttacacattattcttatataattttgacctattttatatgaaaataattgtattggcatctcttcataatttaattctcttctctccttcttttgttccgattagatgaatttgggaaaggagtaggaagactaggtatcgcatgccttccgtctgattgtaatcagtctcctgggttttttactaatttaatcttaatcctgtgcttctttagtcatcaaattgatataggattacaattttctctcaggatccaagtcttctaagaatgaaaatgttgaagtctacccagaaccagccatccttgtagacatttctatttggttgatttataaagatttaatatataaagatttaatatgagttaaacatgtttcttattctgtgatctctaattagaaagtaaaattctgttgccataaatataaaagaaagttttcacttatattttagtcaaacaccaaaccactgcattacttacttcctataagacacagtagttcaatctgttgaaaggcattgaaggataatttccttcagattactttttaaatcatcatctgcctcaggaaattctttcttgaatttttttgttggtgtgaaagcgttgcttatactttatgctcattttattggtcactgtcaccagtttttcccgataaagattaaaaatgttttttaccttgaaataattcagattttgaagattcactgtttcattattttgctaattaccattaactagtaaagttagtttttaaagtttttttaaggttgatattttatcatattcctggagtaggatggattactttattattattgtagctttaaggttttttgttgtataagtcagcttgtttgtatatgctaaattgcagatatttctttgtgttgtgcttattggtttttttttttaacttagagcttaataatttctattttctatcctggagtctaaaattaaacaaaaaaatctattttctaaattggcaggatttttttaatgattagtaaaactgtattattttatttttaaaaatacaataggattttgagtcaggaaacttgacttctactcttgcctctcttttgcagttagctgtgtaactttggataaggcattttatctcgtggtgcctccatttttctcattctctagggaacaagagaattagtttaggtagcgtctaaaattccgcccagctctcatttggttctcatttgaccattttataatcattattttggtctcatttttattcttcttattcatcccatgaactagatcaacttgtattattttactagatcaacctgtattattaacgtcatttacatgtaaattgatgggattcagatattttatcaactgtttttccattagtgattttaagtaattttaaagaaggaaaattatattacagataataaaaatgaaagaaagttataaatattggacatggcttttttaaatgggaaagtcttcttaagcaccaatataagcaccttaaattgatacatagaaaagaatgacataacgttttgtggtctttgttctcttaaatatgaatatagctagttagcctaaaatttacacaaaatgtattcaagatcaaattagtgaacaaagcaatggttcgtatggctaatttaaaagcaattcaatttaccaatattaaaataattataaaatgtaaaagaaatttcagaggagttgattgaaaattttttgttcagtaattattcttaaactgcattcttaggtttattacataaatatagttgccagattgccatgggcaagtgaatgtcttcatttgaaatattattagagatcaatgtggcttgttatttttaatttttttctggctatacagaaaatgtttctggaaaaattccttaattgtcatctgatataatgtagagattgaggccagacgcagtggctcacgcctgtaatcccagcactttgggaggccaaggtgggcagatcacctgaggtcaggagttcgagaccagcctgatgaacatggcaaatccccttctgtactaaaaatacaaaaattagccaggcgcagtggctcacgcctgtaatcccaacactttgggaggccgaggcgggcggatcacgaggtcaggagatcaagaccgtcctggctaacatggtgagaccctgtctctactaaaaacaaaaaaattagttgggcatggtggcgggcacctgtagtcccagccactcgggaggctgaggcaggagaatggcgtgaacccgggaggcggagcttgcagtgagctgagatcgcaccgctgcactccagcctgggcaacggagcgagactctatctcaaaaaaaaaaaaagaaaaaaaaaaaagtagagattgcattagttccatatctccgcagagttctctggtagattaaatgttctctgtgcactaggccaaggaagttcctgttacctttgaaaatcattgtgtttgctctgattgtctacattagctcatatcagtcttttgaacactggttcaaatctgggtgttgggttaggatctgatgagtagagaatagtggaaagttgatataggaaggtatactggtttctggtgtgattctttagctacatttattccttgtcttatgtcatttcactggatcatgtaactgtcctggctttcagaaattatattagatgcccagcctttctcattcagagatgcctgtattattatgttatttcgattgcctaccaaaaaaaaaaaaaaaagaaaaggtttgtttttagttctctgcctctgcaagtctttgtgatcacatttgttaaattgaatctgagattcaaatatttcatttaatattttctgggttttgataatgggatattctgtaagataaagcaagtaatcctagagtgatttactttatgtttagccatccaccattttcctatttctctactcctcccattctccatttttaaaaggaaattaacaaatgtcttcctttatccctgcctcagataatttttccctgaactcatcttgtcagcagaaacatttaatgtgaaataattctgtatttctgagacaagatcaacacagtagttctttacattgagctgaggtgaatgtatacttaaaaatactctattttctttttatatgaacttaaaatttttaaaatcatatatgggactccccaatgtgaaaatattagtctggacattctcttgccatcaggtgctatttctaccttagctgtgagttagactaaatccaaatttcgtatcattcatctttttataatatttaacttccctagaatcaccccatttcatgtctttaaccccaacttccaacaacttttctgcttttattttcaaatgtcaaattgtatttttgtgttttattttctcattgaagtgtaaaagtatcacatatatgaaggaatggctggtttagacatttactttggcatagtaaagattgatattgataccacccaccatcctttcctctagccccagaaagaaaagtttgacaactcaaaaacgattaaattatcttatcttgttatttaatagaacaatggaagctgtttcgtcaaaattaaaatactttaccaaaaaaatacttttttgtattttaatctgatagtgaatttggggattatttatgtaaatgtatcataattaatagtaattatgagttatttcactctctgtaatttgtgatacccaagattcatatttatttaatgtgaggtgttttttgaggcttttttgttttatcttgttttcttaactttttacagtgttgttagattatcgcggtcatctcggcatgtggatcgctcctcctgtagatcagctgttctctcttagagtcaggacaaggaggtttttgctacatggtcgtagttggataatacagcattattctgaactatctgaaattgctggttttattggtcaaaaatgatcagatgctagcaatttcataatagatatattcaagaaggaaccaaactttaaaagatcttttagaataggtatgttaacttctcatcctaaccctatcaatatatcagaggctttatgaaggagactctacagataaccacaaatcttatcaagaaaattctccttaaaaaaagttatcctttattttgttgttaaatttcccagtttttaaaagtgttttatcaaaatgacttcataattgaagcaaataccttttggaagtatatatgttacataagactttcactaaatctgtgcgtaaagcttttataatctgagatattgttatgtattaggtttgtgcaaacctaatataaaagggttcatctgtaagtatcatttagaggcaaaataatttccccctcacatctaatgtggactcaaattttggcaactggaatgttatcctcttggtaggcattctaaattaatgaatactgctatgtggtgtagtaaacaaatttgccataaaatgccatttaaggattttctttttacctttatttcattataaaagtatatgagttgaagatcatataaaaaatatgaaactcctacacaggaaatccccaattttgtgatttaataggttgtaaaaagagttgttccaaattcagactacatctcatcatataaataatattatgaataataagggtaaaagattagccaacaaaagctaatctagtacaccccatagaggtactccaggtgtcttggttttggataaatttttatagtggagaaaggttactttgatctctcaataattgcttggtacacttcttcctaggcaatatgctcatgataccctcttcatgtgacctattcctcaaatgctgcattctccaaaacttccttacctgccttctatcccctagtcattcttatcaatacttccaaaatataacctatctcaagtgttagaaatttgctttaactaatttatattaaagtgttagtgactatagcccttttatctctcttaaagagaaatctgcattaaaagcaaacacattgctgttagctcaaattaatgtcagtgagtagaatcttaagctttaaaacaaaagtggaaataatttaaattagtgttgatgggactattttgaggcaagagataccattaagtgacctagcttggaaatctgccccctttgcccaaacccatgtgatgtctgaaactactgtatattttcaatgaccttgagaaagggagctagtcatttgtatttatgggccttatgaagtcagggcctgctgatcctgttttttaagttcaagcgcaatgcctgaagcatcctagatctccttcaccctcattctacctgacagacagctaggtctgtcttccagctctttctcattgatactacctttacatatgaatactatccatgcttgttaaaaaaaaaaaaagtctttccccattttactgttacaatttttcaagagctataaaggtagaaaaagtattccttttcattattctaaaaaatatgtcatttttaaatagctggcacttagcagtttagttttccaaactttattctgaatcaaattgctgaggtgattctaaatgtctaatgttgatttatcatataaacatctaattagaaagtgtttatgctaaagacttgtattttgtggcattagttcttcatgtttcttttttatatgtttattaaaattgttcacttccaaatgagtggaaaagttgctgttgttgggatgtacagggcaagtgcacttggttagagcatgaactgggaatttcacattctctgatgtgctttgcactctgctcttgtagatttattttgtttacagtagactgatgtcagtttttgtaaatgttttttcttagcactttaactgtgagtgtacaaactgattttaaatgtagtggttgtatattttggttataaattggagatttttaataaaattaaataattctcttttctgtcaaaaaaaaaaaaaaaaaa

SEQ ID NO: 804 - DNA, 2410 bp, Homo sapiens
agagtccccgcagcgccggtcgggagcgcagcgcggcgcagctcggcgcgcacggcgggagcggcgcgcgagtggtcgggcctggcggctggacgggcgcccctcgctgccccgcgcgctccccgccgccccccatgagcgcagccccgcgcggcccgggtccgtaggcggcggggcgccccccatgctgctgcagcccgcgccgtgcgccccgagcgcgggcttcccgcggcccctggccgcccccggcgccatgcacggctcgcagaaggacaccacgttcaccaagatcttcgtgggcggcctgccgtaccacactaccgacgcctcgctcaggaagtacttcgagggcttcggcgacatcgaggaggccgtggtcatcaccgaccgccagacgggcaagtcccgcggctacggcttcgtgaccatggccgaccgggcggcagctgagagggcttgcaaagacccgaaccccatcatcgacggccgcaaggccaacgtgaacctggcatatctgggcgccaagccgcggagcctccagacgggctttgccattggggtgcagcagctgcaccccaccttgatccagcggacttacgggctgaccccgcactacatctacccaccagccatcgtgcagcccagcgtggtgatcccagccgcccctgtcccgtcgctgtcctcgccctacattgagtacacgccggccagcccggcctacgcccagtacccaccggccacctatgaccagtacccatacgccgcctcgcctgccacggctgccagcttcgtgggctacagctaccctgccgccgtgccccaggccctctcagccgcagcacccgcgggcaccactttcgtgcagtaccaggcgccgcagctgcagcctgacaggatgcagtgaggggcgttcctgccccgaggactgtggcattgtcaccttcacagcagacagagctgccaggccatgatgggctggcgacagcccggctgagcttcagtgaggtgccaccagcacccgtgcctccgaagaccgctcgggcattccgcctgcgccctgggacagcggagagacggcttctctttaatctaggtcccattgtgtcttgagggaggactttaagaatgactgagaactatttaaagacgcaatcccaggttccttgcacaccatggcagcctctccttgcaccttctcctgcctctccacactccaggttccctcaggcttgtgtccccactgctgcatcgtggcggggtgtcacagaccctctgcagcccctggctgccctggactgtgcagagatgcctgactccagggaaacctgaaagcaagaagttaatggactgtttattgtaacttgatcctcccgagctgtgagcgcagtctgaggtgtgaggacacggcctcctgttggagtcccattttctccatcagggcacgtgggcggcttcctcaagcccggaggagctcccaggcgcacaggggccgccggtaacaggggccgccggccaaaggcccctttccagtcatagcactgaagttgcaacttttttcttgtaattgttttgctactaagataatttcagaagttcagtctattttttcagcggatactgccgccaccaagaatccaaaacctatttttgacttggagagacttgcttttgttggttccgcccgtggagacgacgatagtgtttctgtataataaagtgtctgccggctcgcgggccaggatcctctcggtgggatgggcaccacagacaggaggcccctcaggcccgtgcgggccactgtctgctgccgcctgccggggtggcagagtgagttgtctcaggaccccgtcactgcgacgttgacactcctctcccttcccttcctccccaactccccaaacactgtggaaggggagaaggaagtgatccacagcattcaggccacttggggtctagaccatggtggtgccagcctggggggggcagtggccctcagctctgcccgctggagcggttgagtgcagaagggtgcgcctcttccctctacccccgcaccacctgctgtgtgccagcctgagacggttcctgcctgtcttgggggttggtggagggtggaggcagttctgccagccgtggcagggctgctatggggcatccagggctgtgggggtctggaggaggggacatgaggtgagaggtatcctggccgagggcggggggcagcggggggtctccctccggacctacctcagggagctgagcgtgcaggcgctccagggcaggcctgggacagagtcaaggctcagagaataaaggtagctaatctcatcataatatttttattagaatgttctgatgataaaaataaaacttgttttctttaaagaaaaaaaaaaaaaaaaaaaaaaaa

SEQ ID NO: 805 - DNA, 8266 bp, Homo sapiens
gccatttttcctttctgaaggcaggtctcacctatctcctggttcgatctaggaaaaaggaaaggaagggatttaaaagtaaacagtgaaatgagaaagaattcactgggagtttatcaaactaagttaaaatagctaagtcagcctgacaggtgcttggcacagagaaggagcaaatatttcctcatgatgctacaacatttagtaattttttgtcttggattggttgtacaaaatttctgctccccagctgaaaccacagggcaggcaagaagatgtgataggaagtctcttcttacaattaggaccgagtgccgatcctgcgctctcaaccttggagtcaagtgcccggatggttacaccatgattaccagtggctctgtaggggttcgagattgcaggtacacctttgaggtcagaacatactctctgtctctccccggatgccgccatatttgtaggaaggactatctccaacctcggtgttgtcctggccgctggggcccagactgtatagagtgcccaggtggagcggggtcaccctgcaatggcagaggcagttgtgctgaaggcatggaaggaaatggaacctgctcctgccaagaagggtttggtggaacagcctgtgaaacctgtgctgacgacaacttatttggacccagctgttcatcagtgtgcaactgtgtgcatggggtgtgcaacagtggactagatggcgatggaacctgtgagtgctactctgcgtacactggccccaagtgtgacaagcccatccctgaatgtgcagccttgctctgcccagaaaattccagatgttcgccttccactgaagatgaaaacaaactggaatgcaaatgccttcccaattaccgaggcgatggcaaatactgcgaccccatcaatccatgtttacgaaaaatctgccaccctcatgctcattgtacgtacctgggaccaaatcggcacagttgtacatgccaagaaggctaccgtggggatggccaagtgtgcttgcctgtggacccctgccaaattaactttggaaactgccctacaaagtctacagtgtgcaaatatgatgggcctggacagtctcactgcgagtgtaaggagcattaccagaatttcgtacctggagtggggtgcagtatgactgatatatgtaaatcagataacccgtgtcataggaatgcaaattgcaccaccgtcgcaccaggccgaactgaatgcatttgccagaaaggttacgtgggtgatggcttaacgtgttatggaaacattatggagcgactcagagaattaaatactgaacccagaggaaaatggcaaggaaggctgacctctttcatctcactcctagacaaagcttatgcctggccactgagtaagctgggacccttcacggtgctgttacctacagacaagggactgaaaggattcaatgtaaatgagcttttggtggataataaagctgctcaatactttgtgaaactccacataattgctggtcagatgaacatcgaatatatgaataacacagacatgttctacaccttgactggaaagtcgggggaaatcttcaacagcgataaggacaatcaaataaagcttaaactccatggaggcaaaaagaaggtaaaaattatacaaggggacatcattgcttccaatgggcttctgcacatccttgacagagccatggacaagttagaacccacatttgagagcaacaatgagcaaaccataatgacaatgctacaaccaaggtacagcaagttcagatctttgttagaggaaaccaatttgggacatgccttagatgaggatggagttggtggaccatacaccatttttgttccaaataatgaagcattgaataacatgaaggacggcactctcgattacctcctttctccagagggatctcggaagcttctggaactcgtcagataccacattgtcccatttacccagcttgaagtggccactctcatctccacccctcacatcaggagcatggccaaccagctcatacagttcaacaccaccgacaatggacagattctggcaaatgatgtggcaatggaagaaattgagatcactgccaaaaatggccgaatttacacactgacaggagttctcattcctccctccattgtcccgattctgccccatcgatgtgatgaaacaaagagagagatgaaactgggcacttgtgtgagctgttctctggtgtactggagcagatgtcctgctaactctgagcccacagcactcttcacacacagatgtgtctacagtggcaggtttgggagcctgaagagcggctgtgcccggtactgcaatgccactgtgaagattccaaagtgctgcaaaggcttctatggacctgactgcaaccagtgtccaggaggcttctcaaatccatgctcaggaaatggacagtgtgcagatagcctcggcggcaacgggacatgcatttgtgaggagggcttccaaggctcccagtgtcagttctgctctgatcccaataaatacggacctcggtgtaacaaaaaatgcctgtgcgttcacggaacatgcaataacaggatagacagcgatggggcctgcctcactggcacatgcagagacggctctgccgggagactctgtgataagcagacctcagcctgtgggccctacgtgcagttctgtcacatccacgccacctgtgaatacagcaatgggacagccagttgtatttgcaaagcaggatatgaaggagatggaactctgtgttctgagatggacccttgcacaggactaactccaggaggctgtagccgcaatgcagaatgcatcaaaactggcacgggcacccacacctgcgtgtgtcagcagggttggacagggaatgggagagactgctcggagatcaacaactgcctgctgcccagtgcaggcggctgccacgacaacgcatcctgtttgtatgtgggtcccgggcagaatgagtgtgagtgcaagaaaggatttcgaggaaatgggattgactgtgaaccaataacttcatgcttggaacaaaccgggaaatgtcatccattggcaagctgtcaatctacttcgtctggtgtctggagctgtgtttgtcaagagggctatgaaggagatggctttctgtgctatggaaacgcagcagtggaattgtcatttctctccgaagcagctatatttaaccgatggataaataatgcttctctacaacccacactgtcagccacctcaaacctcactgtcctcgtgccttcccaacaagctactgaggacatggaccaggatgagaaaagcttctggttgtcacagagcaatattccagccctaataaagtaccatatgctactaggcacatacagagtggcagatctgcagaccctgtcttcttctgacatgttggcaacatctttgcagggcaacttccttcacttggcaaaggtggatgggaatatcacaattgaaggggcctccattgtcgatggggacaacgcagccacaaatggagtgatacacatcatcaacaaggtgctggtcccacaaagacgtctaactggctccttaccaaacctgctcatgcggctggaacagatgcctgactattccatcttccggggctacatcattcaatataatctggcgaatgcaattgaggctgccgatgcctacacagtgtttgctccaaacaacaatgccatcgagaattacatcagggagaagaaagtcttgtctctagaggaggacgtcctccggtatcatgtggtcctggaggagaaactcctgaagaatgacctgcacaatggcatgcatcgtgagaccatgctgggtttctcctatttccttagcttctttctccataatgaccagctctatgtaaatgaggctccaataaactacaccaatgtagccactgataagggagtgatccatggcttgggaaaagttctggaaattcagaagaacagatgtgataataatgacactactattatacgaggaagatgtaggacatgctcctcagagctgacctgcccattcggaactaaatctctaggtaatgagaagaggagatgcatctatacctcctatttcatgggaagacgaaccctgtttattgggtgccagccaaaatgtgtgagaaccgtcattacgagagaatgctgtgccggcttctttggcccccaatgccagccctgcccagggaatgcccagaatgtctgctttggtaatggcatctgtttggatggagtgaatggcacaggtgtgtgtgagtgtggggagggcttcagcggcacagcctgcgagacctgcaccgagggcaagtacggcatccactgtgaccaagcatgttcttgtgtccatgggagatgcaaccaaggacccttgggagatggctcctgtgactgtgatgttggctggcgaggagtgcattgtgacaatgcaaccacagaagacaactgcaatgggacatgccataccagcgccaactgcctcaccaactcagatggtacagcttcatgcaagtgtgcagcaggattccaaggaaacgggaccatctgcacagcaatcaatgcctgtgagatcagcaatggaggttgctctgccaaggctgactgtaagagaaccaccccaggaaggcgagtgtgcacgtgcaaagcaggctacacgggtgatggcattgtgtgcctggaaatcaacccgtgtttggagaaccatggtggctgtgacaagaatgcggagtgcacacagacaggacccaaccaggctgcctgtaactgtttgccagcatacactggagatggaaaggtctgcacactcatcaatgtctgcttaactaaaaatggcggctgtagtgaatttgccatctgcaaccacactgggcaagtagaaaggacttgtacttgcaagccaaactacattggagatggatttacctgccgcggcagcatttatcaggagcttcccaagaacccgaaaacttcccagtatttcttccagttgcaggagcatttcgtgaaagatctggtcggcccaggccccttcactgtttttgcacctttatctgcagcctttgatgaggaagctcgggttaaagactgggacaaatacggtttaatgccccaggttcttcggtaccatgtggtcgcctgccaccagctgcttctggaaaacctgaaattgatctcaaatgctacttccctccaaggagagccaatagtcatctccgtctctcagagcacggtgtatataaacaataaggctaagatcatatccagtgatatcatcagtactaatgggattgttcatatcatagacaaattgctatctcccaaaaatttgcttatcactcccaaagacaactctggaagaattctgcaaaatcttacgactttggcaacaaacaatggctacatcaaatttagcaacttaatacaggactcaggtttgctgagtgtcatcaccgatcccatccacaccccagtcactctcttctggcccaccgaccaagccctccatgccctacctgctgaacaacaggacttcctgttcaaccaagacaacaaggacaagctgaaggagtatttgaagtttcatgtgatacgagatgccaaggttttagctgtggatcttcccacatccactgcctggaagaccctgcaaggttcagagctgagtgtgaaatgtggagctggcagggacatcggtgacctctttctgaatggccaaacctgcagaattgtgcagcgggagctcttgtttgacctgggtgtggcctacggcattgactgtctgctgattgatcccaccctggggggccgctgtgacacctttactactttcgatgcctcgggggagtgtgggagctgtgtcaatactcccagctgcccaaggtggagtaaaccaaagggtgtgaagcagaagtgtctctacaacctgcccttcaagaggaacctggaaggctgccgggagcggtgcagcctggtgatacagatccccaggtgctgcaagggctacttcgggcgagactgtcaggcctgccctggaggaccagatgccccgtgtaataaccggggtgtctgccttgatcagtactcggccaccggagagtgtaaatgcaacaccggcttcaatgggacggcgtgtgagatgtgctggccggggagattcgggcctgattgtctgccctgtggctgctcagaccacggacagtgcgatgatggcatcacgggctccgggcagtgcctctgtgaaacggggtggacaggcccctcgtgtgacactcaggcagttttgcctgcagtgtgtacgcctccttgttctgctcatgccacctgtaaggagaacaacacgtgtgagtgtaacctggattatgaaggtgacggaatcacatgcacagttgtggatttctgcaaacaggacaacgggggctgtgcaaaggtggccagatgctcccagaagggcacgaaggtctcctgcagctgccagaagggatacaaaggggacgggcacagctgcacagagatagacccctgtgcagacggccttaacggagggtgtcacgagcacgccacctgtaagatgacaggcccgggcaagcacaagtgtgagtgtaaaagtcactatgtcggagatgggctgaactgtgagccggagcagctgcccattgaccgctgcttacaggacaatgggcagtgccatgcagacgccaaatgtgtcgacctccacttccaggataccactgttggggtgttccatctacgctccccactgggccagtataagctgacctttgacaaagccagagaggcctgtgccaacgaagctgcgaccatggcaacctacaaccagctctcctatgcccagaaggccaagtaccacctgtgctcagcaggctggctggagaccgggcgggttgcctaccccacagccttcgcctcccagaactgtggctctggtgtggttgggatagtggactatggacctagacccaacaagagtgaaatgtgggatgtcttctgctatcggatgaaagatgtgaactgcacctgcaaggtgggctatgtgggagatggcttctcatgcagtgggaacctgctgcaggtcctgatgtccttcccctcactcacaaacttcctgacggaagtgctggcctattccaacagctcagctcgaggccgtgcatttctagaacacctgactgacctgtccatccgcggcaccctctttgtgccacagaacagtgggctgggggagaatgagaccttgtctgggcgggacatcgagcaccacctcgccaatgtcagcatgtttttctacaatgaccttgtcaatggcaccaccctgcaaacgaggctgggaagcaagctgctcatcactgccagccaggacccactccaaccgacggagaccaggtttgttgatggaagagccattctgcagtgggacatctttgcctccaatgggatcattcatgtcatttccaggcctttaaaagcaccccctgcccccgtgaccttgacccacactggcttgggagcagggatcttctttgccatcatcctggtgactggggctgttgccttggctgcttactcctactttcggataaaccggagaacaatcggcttccagcattttgagtcggaagaggacattaatgttgcagctcttggcaagcagcagcctgagaatatctcgaaccccttgtatgagagcacaacctcagctcccccagaaccttcctacgaccccttcacggactctgaagaacggcagcttgagggcaatgaccccttgaggacactgtgagggcctggacgggagatgccagccatcactcactgccacctgggccatcaactgtgaattctcagcaccagttgccttttaggaacgtaaagtcctttaagcactcagaagccatacctcatctctctggctgatctgggggttgtttctgtgggtgagagatgtgttgctgtgcccacccagtacagcttcctcctctgaccctttggctcttcttcctttgtactcttcagctggcacctgctccattctgccctacatgatgggtaactgtgatctttcttccctgttagattgtaagcctccgtctttgtatcccagcccctagcccagtgcctgacacaggaactgtgcacaataaaggtttatggaacagaaacaaagtcaaaaaaaaaaaaaaaaaaaaaaaaaaaaaaaaaaaaaa

SEQ ID NO: 806 - DNA, 9916 bp, Homo sapiens
gggaggtggctgccgggtgggaggtgtgtgcgcgtgtgccgcgccgtagggagcggcgggtcgcgccgccggctgtcagctagctccgcgccgccgcccgatggcgcgaggaggcgcgcgggcccagccccggggggccggccgcgggtgagcccctcggcctgccgcccgcgagcatgtcacctccagccgccgccgccgcagcctccgccagccgcgcccgcgcccccgcctcccgcagccgcagccgctgcctcgggcattggcccccagacccccgcctctgatccacgcccagaccctagctccagagggccatggccggccagggggactgctgcgtcaaggtggccgtcaggatccggccccagctgtcgaaggagaagattgagggctgtcacatctgtacctctgttaccccgggagagccccaggtcctgctggggaaggacaaggccttcacctatgactttgtcttcgacctggacacctggcaagaacagatctattccacctgtgtgagcaagctcatcgagggctgcttcgagggctataatgccacggtgctggcctatgggcagacgggggccgggaagacgtacaccatgggcactggctttgacatggcaacgtcggaggaggagcagggcatcatcccgagggccatcgcacacctctttgggggcattgccgagcgcaagcgccgggcacaggagcagggcgtggctggacctgagttcaaagtcagcgcccagtttctggagctctacaacgaggagatccttgacctgtttgacagcacccgtgaccctgacacccgccaccgcaggtccaacatcaagatccacgaggacgcaaacggtggcatctacaccactggcgtcacttctcgcctcatccactcccaggaggagctgatccagtgcctgaagcagggggccctgtcccgcaccacagccagcacccagatgaacgtgcagagctcacgctcccacgccatcttcaccatccacctgtgccagatgcgcatgtgcacccagcccgacctggtgaatgaggcggtgactgggcttcctgatggtacacctccctcgagtgagtatgagacactcactgctaagtttcactttgtggacctggccggctcagagcggctgaagcggacaggggctactggcgagcgggccaaggagggcatctccatcaactgtggcctgctggccttgggcaatgtgatcagcgccttaggggaccagagcaagaaggtggtgcacgttccctacagggactccaagctcactcggctcctccaggattcgctggggggcaacagccagaccatcatgatcgcctgtgtgagcccctcagaccgagatttcatggagaccctcaacacactcaaatatgccaatcgggcccgcaacatcaagaacaaggtggtagtgaaccaggacaagaccagccagcaaatcagtgcactgcgggctgagattgctcggctgcagatggagctgatggagtataaggcgggcaagcgagtgataggagaggatggcgctgagggctatagtgatctgttccgagagaatgccatgctacagaaggagaatggggccctgcggctgcgggtgaaagccatgcaggaggccatcgatgccatcaacaaccgcgtcacccagctcatgagccaggaggccaacctgctgctagccaaggccggcgatggcaatgaggccattggtgcgctgatccagaactacatccgggagatcgaggagctacggactaagcttctagagagtgaagccatgaacgagtccctgcgccgcagcctctcacgggcctcggctaggagcccctactccctgggtgcttctccagccgccccggccttcgggggcagccctgccagctccatggaggatgcctcggaggtgatccgcagggccaagcaggacctggagcggctaaagaagaaggaggtcaggcagcggaggaagagccccgagaaggaagccttcaaaaagagggcaaaactccaacaggagaacagcgaggagacggatgagaacgaggcggaggaggaggaggaagagcgagacgagagtggctgtgaggaggaggaagggcgcgaggatgaagatgaggactcgggcagtgaagagagcctggtggactcagactcagaccccgaggagaaggaggtgaacttccaggcggacctggccgacctgacttgtgagatcgaaatcaagcagaagctgatcgacgagctggagaacagccagcggcggttgcagacgctcaagcaccagtatgaggaaaagctgattctgctgcagaacaagatccgagacacacagctggagcgcgaccgtgtgctgcagaacctcagcaccatggagtgctatactgaggagaaggccaacaagatcaaggcagactatgagaagaggctgcgggagatgaaccgggacctgcagaagctgcaggccgcccagaaagagcacgcccggctgcttaagaaccagtcgcgctacgagagggagctgaagaagctacaggccgaggtggctgagatgaagaaggccaaggtggccctgatgaagcagatgcgtgaggagcaacagcggcggcggctagtggagaccaagaggaaccgggagatcgcacagctcaagaaggagcagcggcgacaggagtttcagatccgagctctggagtcccagaagcggcagcaggagatggtcctgaggaggaagacccaggaggtttctgcactgaggcgcctggccaagcccatgtctgagcgggtggcagggcgtgcaggactaaagccacccatgctggactctggggctgaggtgtcggccagcactacctcatctgaggctgaatcaggggcccgctctgtctccagcatcgtgcgccagtggaaccgcaaaatcaaccacttcttgggggaccatcctgcgcccactgtcaatggcacccgtcctgcccgaaagaagttccagaagaagggggccagccagagcttcagtaaggcggcaaggctcaagtggcagtccctggagcgacggatcattgacatcgtcatgcagagaatgaccattgtcaacctggaggctgacatggagcggctcatcaagaaaagggaggagctgttcctcctgcaggaggcactgcggaggaagcgggagcggctgcaggctgagagccccgaggaagagaaggggctgcaggagctggctgaggagatcgaggtgctggcagccaacattgactacatcaatgacggcatcaccgactgccaggccaccatcgtgcagctggaggagaccaaggaggagctggactccacagacacatccgtggtcatcagctcctgctccctggctgaagcccgcctcctgctagacaacttcctcaaggcatccattgacaaggggctgcaagtggcacaaaaggaagcccagatccggctgttggagggccgactgaggcagacggatatggcaggctcctcccagaaccatctgctcctggacgccctgcgtgagaaggctgaagctcaccccgagctgcaggccctcatctacaatgtgcagcaggagaatggctacgccagcacagatgaggagatctcagagttctctgagggcagcttctcccagtcattcaccatgaaaggctccaccagccatgacgatttcaagttcaagagcgagcccaaactgtctgcccaaatgaaagctgtgtcggctgagtgcctgggccccccactggatatctccaccaagaacatcaccaagtccctggcctccctcgttgagatcaaagaggacggagtgggcttctctgtccgagacccctattaccgggacagggtctcgcgcaccgtcagtctgcctacccggggcagcactttccctaggcaatctcgagccacagagacgtccccgctgacgagaaggaagtcctacgaccgagggcagcccattaggtccacagatgtgggattcacacccccatcatcccctcccactcggccccgcaatgaccgcaatgtcttctctcgtctcaccagtaatcagagccaggggtcagcgctggacaagggcatcatctccccggttggaggagccaagggtgcacggacggccccactgcagtgtgtctccatggccgaaggccacaccaagcccatcctctgcctggatgccacagatgagttgctattcacagggtccaaagaccgaagctgcaagatgtggaacttggttacgggacaggagatcgcagctctaaagggccaccccaacaacgtggtctccatcaagtactgcagccactcggggcttgtgttctccgtgtccacctcctacatcaaggtgtgggacatccgggactcagccaagtgcattcggactctcacgtcctcgggccaggtgatctcaggggatgcctgtgccgccacatccacccgtgccatcaccagtgctcagggcgagcatcagatcaaccagatcgccctcagcccttcgggcaccatgctgtacgccgcctcgggcaatgccgtccgcatctgggagcttagcaggttccagcctgtcggcaagctgactggccacatcggccctgtgatgtgcctgacggtcacccagacggccagccagcatgacctcgtggtgactggctccaaggaccactacgttaagatgttcgagctgggcgagtgtgtgacgggcaccatcggccccactcacaacttcgagcccccgcactacgatggcatcgagtgtctcgccatccagggagacatcctgttcagtggctcccgagataacggcatcaagaagtgggacctagaccagcaggagctcatccagcaaatccccaatgcgcacaaggactgggtgtgcgccctggccttcatcccgggccgccccatgctgctcagcgcctgccgtgcgggtgtcatcaaggtctggaacgtggacaacttcacacccatcggtgagatcaagggccacgacagtcccatcaatgccatctgcaccaatgccaagcatatcttcacagcctccagtgactgccgggtaaagttgtggaattacgtccctggactcaccccctgccttcctcgccgagtcctggccataaagggccgcgccaccaccctgccctgaccctccccaactctccctgtctcctctttcattcttcccctctttccttttccctctctttccccacttcgatctgagctgcttcttaacggtatgagattattttactccttcttcttcctttcccttcctgtcctgcctggcctagagaggtgccctgcctgtccctcctgcacccaccgtccttttccaagcatgaacagtgggacaggccccaggagatgggtgccagggagcagaagggggagccttcaggcctggacaaaacgaaacacccccccaaaaaaagaaaacccatgacaaagctcccctgggggcctctgagtgcacaggcctctccatctgcccagcaccccaccacctgcagtccacctccccgtaagccatgcttgcctcccagccccaaccacatttggggagtttggggaatccagttcatcctctacttttgggggcagccagccaagcccactgcaagagctgaccggcacccctccactttgtcctccaccccagtgacctgacggtgaagttctggagtgtccggcggttaccccacagcggcccaccctaggagtgaggtcagagggatgcccccggaccctcgaccccagcagcctggacaccatggaagggaagctgtgacccggccgatggggccagctgctctggggacagagggcgtggccccctctcctgccctcctccctctcccttggccttcccacaggacactgttccctcatccctcccctgcctctcaggagcctctgggtgagagagaggctggggaggaaattaagctgtgaagccaaagggcattatcccttcttgttcccctcctggcagtcgtggccacattgtctcctgctgaaccggctctgcccctttctcaggcctttggcccagtggtggagccctgtggggaggtgcagcagcctggccccatcccacccttccgaggagctggcctccccgcttctcccagcccagcctctagagccactgcacctgcctctgagcccaaaaagataagtcctcaggtagctaaggaaaccaggtgtgggcggctgggccttgcagctaacccttaaccctctggcaacccgcagatagccccaactggccccaacagttccctggggtcccttttggatggggccaaggtggagctgctagaaagattcctttggggagatggtcagaaatacttcagttatttattattttgttatttttattttttgctgttgcctcctggaaacggacttgaagtttcttcccctatattctttccctcagctcttgggggccagaaatcccaaagggagtccgctgccccggccctccagggccgcctcctctgtttgctttgcagaggagggaactgctccttcgactctgcagctcaggcctgtccccgacacagcccccagggagtcttctagctacccctggcctctaggccgcctgacgctcagtgccttcctccgttccggggcctggcacccgtgccgggcagccttacaccagccatgcccgcggcaccacatgtgtcttctcactcgcgaggtcttgtgcccagcgcccccgggaaggcgggggcgctcaccccacagcccaggccccggggttctgccccacagtcctgcgtgggccacgtaggaagcagcatgggggctgtgtctgctgggaggtggcttggatggggaggacagcccggcaccctgacccccgcccctccccagccctgcagtcccccactgggccggggagtctctccagcttctctctctctggttattcaggagacacattttcggccttaaaactggcatggagcgcaggccctcccttgcagaaaattatcaaggaagagggagttggcagagtttctctgccccggggctggggacgcggagctccggggaaattgttaaatcagtgttctggcgccccctgttgggggaactctggaattacaggagtgggccttgggggggactgagctccatccctctcccccgccccacccccacccaaagttgcccaccctgtttttccgttgcatcgctggtcttgtgcttcccgcttcagtctgggagccaagagccagccccacctcccttcagaggacgcagtgacttttggactttccagaggtggttctgtgtttctgcccttggctcctctccgtcttgggctggggcacttggagccctctccatgtggcgcccagtgttggggggaggcaggctccagtggaggctgagtgaggcctggtcccttccccgtgccctcctcggagctgccacagaggctaagacggctgtcctgctggtgctggccctgctggatgtggtattgaagtctggggcagctgatagcaggaaggagacccccttggatgctggtctcctgggacctgaacagtctgtcagcaatggctggaaatccttcttcctctggccaccccgggggtgccgggcaacccccttagctctaagatgtggccacaaatctcttcccactcctccccgccaacctgaacagaaagttttgaccttgcaacctgtaagaaagaatccgtccgcatgactgtttacaagcgatagaaacacgtaagactctgtccccttgagctcccacccccgggccggggatgccccacctggggtgactgcactgtagctgcaaggcgtgttcttgcacgaagtgtgatcttatggccctgcgagaggtgctcatcatcatgcccattttctgctgtttctgatgggtcagctacctcacggcggggccagctctgctgtcctggcaagtgtcattgactctctaaacttgaagtccttcaggagccctgagcccaacatccatgagacaccccgagttgtgcttcatgagagttggattctctgcccactctttcagggatgtccaaggtccatgttagggggcaggcccccagctccactcactgcacaagcaccctaaatgttggaagcacaaaatggttgtgatttgagcacaatggcagggtcccgcaggcagacttgacaggcccaggcccgggaggatccccccacgttggctctgtccaaagtgagattgggggtgcctgtgtctgggacagggggctgcccttgctcagaccaggccttggctcatggcttgtcctaattctgggactcgtcatcttacttcttgcccttctgtgcccatcttaagactggaggctgagccttgtcaggcccagccacatctttacgccatgggaccaggagtaaagcgctctctaaaccccgcaccccaaatctctaaacgcctgagttcaggctgagtcctagccctagtgagcctgaagagcttggactgattcccagtctcctgggtcaagccccactttgtgctttcgaagcttatgagcgggttccctggatagaaggagtcttccatccccactgcccttgggcctcttcagcatagtcctgtgccagggccctgtcctcactatcagtcagttcagtatttgctttcacgtgagtggcggactcttctgaagcagccagaactctcaaaggcagcgcatggagttgccttgcgagatttccaaggaaggaggaaagattaacaggcggagcctggcacacccaagcctttgaggtggtcagagtgccaccttcagccccttgggaagggacagcggtgggtctgggagtggcctcaccctggattcagcctaggaatctcttcaccctcagctgtccagccctgctgcctgtctggggatgtgtggcctgggcagagggcagtttaaagcacaaaaccacatggggaaaacacaaggttgcggggactttctcatgtgcctgatgtggtggagggagacaccagcaggtggctgcagtgacgttagggaacataacacttctttgccctgctagctctcagctctggggggcatcccccgatgtggtctgggctgggagcaggcatatcccctggttgttgcctgtgcctggtctgttcaccatcgtgtttgtgtgggcagagcctgccctgcaggagcagtgactttcttcccactgtgtgtcccggacctgtggtatgtgtccctttgccatcccaaacaggcaactgcttgctgctctccttgcttggcatagcctcctggtcagtggccaatgccccacaggccttcctgggcctggccctcctctcctgactcccagatccttccctgccctcttgtgtgcaaggacagattttgcagggaaagttctgtttcttctttgatacctttgttctgtcccctgccccatccccagcactcatgatcttgaagcccctatcacactctagttcagtcctgtgaaccatgtcctgagggccttgcagggaagtaggaaatagaaactcctccacaaagagccgaggatcagagaagacccctgagatgaatcagggccctgccctgcccaccaactcttttctagcaatcatgtcctgcccaggctgcaggcttcattaggctcctgctgtcctccatgatgtgactagcacaaggtgtatatatgttttgtacctctgccgatggctgtacatagtgtatgaaagttatttaagccccatgttgtacatttctgttcctagattggatgtgtgtgttctaagaagttgtcataaataaaacctgaatgaccaatgtcaaaaaaaaaaaaaaa

SEQ ID NO: 807 - DNA, 7069 bp, Homo sapiens
gagccggagccgggtccctgtccccgggccgggcgccgccgccgccccctgcccagcgcccgcgtctccgcggcgccaccccagcgccaatattccggagatcaagcgttacgcggcggcggcggcggcggcggcggggcccggagcgggaggcgccggggaccggggcgaggcggcccccgccgccgccatggaggcgctgggacccggacctccggctagcctgtttcagccacctcgtcgtcctggccttggaactgttggaaaaccaattcgactgttagccaatcattttcaggttcagattcctaaaatagatgtgtatcactatgatgtggatattaagcctgaaaaacggcctcgtagagtcaacagggaggtagtagatacaatggtgcggcacttcaagatgcaaatatttggtgatcggcagcctgggtatgatggcaaaagaaacatgtacacagcacatccactaccaattggacgggatagggttgatatggaggtgactcttccaggcgagggtaaagaccaaacatttaaagtgtctgttcagtgggtgtcagttgtgagccttcagttgcttttagaagctttggctgggcacttgaatgaagtcccagatgactcagtacaagcacttgatgttatcacaagacaccttccctccatgaggtacaccccagtgggccgttcctttttctcacccccggaaggttactaccaccctctgggagggggcagggaggtctggtttggttttcatcagtctgtgagacctgccatgtggaatatgatgctcaacattgatgtatctgcaactgctttctaccgggctcagcctatcattgagttcatgtgtgaggttttagacattcagaacatcaatgaacagaccaaacctctaacagactcccagcgtgtcaaatttaccaaagaaatcagaggtctcaaagttgaggtgacccactgtggacagatgaaacgaaaataccgagtttgtaatgtgactagacggccagccagtcatcaaacttttcctttgcagctagaaaacggtcaagctatggaatgtacagtagctcaatattttaagcaaaagtatagtctgcaactgaaatacccccatcttccctgtctccaagtgggacaagaacaaaagcatacatacttgccactcgaggtctgtaatatagtggcaggacagcgatgtatcaagaagctcacagacaatcagacttccacaatgatcaaagctacagcaagatctgctcctgacagacaggaagagatcagtagactggtgaagagcaacagtatggtgggtggacctgatccataccttaaagaatttggtattgttgtccacaatgaaatgacagagctcacaggcagggtacttccagcaccaatgctgcaatatggaggccggaataaaacagtagccacacccaaccagggtgtctgggacatgcgaggaaagcagttttatgctggcattgaaattaaagtttgggcagttgcttgttttgcacctcagaaacaatgtagggaagatttactaaagagtttcactgaccagctgcgtaaaatctctaaggatgcaggaatgcccatccagggtcagccatgtttctgcaagtatgcacaaggtgcagacagtgtggagcctatgtttaaacatctgaaaatgacttatgtgggcctacagctaatagtggttatcctgcctggaaagacaccagtatatgcggaggtgaaacgtgttggagatacccttctaggtatggccacacagtgtgtccaggtaaaaaatgtagtgaagacctcacctcaaaccctttccaatctttgcctgaagataaatgcaaaacttggaggaattaacaatgtgcttgtgcctcatcaaaggccctcggtgttccagcagcctgtcatcttcctgggagcggatgtcacacaccccccagcaggggatgggaagaaaccttccattgctgctgtggttggcagtatggatggccaccccagccggtactgtgccaccgttcgggtgcagacttcccggcaggagatctcccaagagctcctctacagtcaagaggtcatccaggacctgactaacatggttcgagagctgctgattcagttctacaaatccacacgcttcaaacccactcggatcatctattaccgtggaggggtatctgagggacaaatgaaacaggtagcttggccagaactaatagcaattcgaaaggcatgtattagcttggaagaagattaccggccaggaataacttatattgtggtgcaaaaaagacatcacacacgactcttctgtgcagataaaacagaaagggtagggaaaagtggcaatgtaccagcaggcactacagtggatagtaccatcacacatccatctgagtttgacttttacctctgtagtcatgcaggaattcagggaaccagccgtccctcacattaccaggtcttgtgggatgacaactgcttcactgcagatgaactccagctactgacttaccagctgtgtcacacctatgtgaggtgcactcgctcagtctctattccagcccctgcatattatgcccggcttgtagcatttagggcaaggtatcatctggtggataaagatcatgacagtgcggaaggcagtcatgtgtcaggacagagcaacggccgggatcctcaggccttggctaaggctgtgcaaatccaccatgatacccagcacacgatgtattttgcctgagagtctcagaaaaagaactcaaccaatttggcaccccatgcagcctcaaaatgtttcaaatgcctaccgcctctagatcgagccacgttgacttcaggtggtcttctaccagcagctcggaatagttgcactgaatctatactttgcagcactgtctgatgcgtcaacaaaattgagccatttttttaaagtaatagatactaatagattatcttttctgatgcactggactgaatttttacctcaatgtgcaaaggctgatcagcctgaactttctaaaggactttacaagaagggtttctatggaatattttgctagctgtggtgttcaccgcatccctctagtcttagaagagaagattattccttttttctgtagtcattgagtggggtatatgcataagtgggagagaaaaaccaaacaatctacttcagttcagtgtaactatttaattgtgtgggtccatagactttttaatgaagatttctgactttgccactgtaaatgcctttaatgagcattaatttttgaaagttttacagagttttattagttttactactttatcttattgatctctgcagacttgtgctggtgcaagtacatgctgacaggcaatttgcactatatttggctgcagattcaaataggcagttctcttatttggtcgacttttgtgaatgtgtgacataaacagatgtaatgcatgtcacagtgacggagataacactgccatgataaaagtactcatgtttcccctatttggaaaaaaaaattgcttttagtatttttccaagttttcaaaagtgcccattttatgctgctgtgtggtttgttaaatctaaatgatttttaaacttttctcatagaaacttaactttggcaataaacattttttaaggtctctcctcttccttccccaacaatgtagttttctagatgagatttcagtatgattttatcagctatttcttatatatcataatctggcaatttctgaaaccagtcagaaaagacatatatttccatgcctttttaaagaattatttttacctgttttatattcacagttggtgtcctgtcactttgttttaaaataagctagaaccaggatgcttccttattggaaaggctttgccagtccttaaggtacaatgagtgatgctgcaacttgcaaatgtaccagcatttaaaatttcttttcctgggaatcaaggtaactcacacgactacttgcagtacaaattttttgcttctctttcgacatgaaatgtacttggtgggttttccttccttttattaaactaaaactgtgtggaaaaggttgatttttcttaatagattctggattccactcacagggagatgggattcctttcttgtccaaacaaagggagttgctctaaagcgagcatcagttaaaatgtaggggaaaatgtattctgtatgtagtgtagataatactttgtgaatggacaacagttacatagtgtcttggtagcaccagccagtgtttcccagcccagagtttactgacttgtaattctctatccaggacatcaggagtgagggatggaaaaggggataaaaggcctggagccacactctatatggctgaggaaggagctagggaaagagatagacacaatggggtgaaaacaattttgccgcccctgcctggaaactgctggtggggaaatgatggtgaagggtgtttgcttgaactcatgagacggtccaaatctcataaactagccttctcaaaatcccagcaatataaagcactgtttttcttcagtcgtttaaataaacttgtaaatacattgaagtttacatttccatgtgctgttgatcaacggcgccacctgtgtttgctgagactggtctctgagagagttttatgtcgatcgaggcctgttgctcattaagctgagtgcagacgtccttaatccctgcagatagtgggatgaaagcaagttctgtaaaatgaagcacaacatagccaggagtgaagagatggcagatgttaatttcttaaaattttccttttttttttttttttttgcaaatacctcacttggataatacaaatcaggacatgttggtgaggggctggctgcttggctgctgcttttattcacacttgttcagggagagcacagagaatacccttcagcatggccactctggacccaagaggaggaaaaaacggaagcttttttaggagaaggaggacttgctggaatccaagatgtgaagaactcttggtgactggctggctggccagcgggcaccacacctgcacttgagtgcctcgggcttgcttattaataacgcacagaagaagcatcacttctcaccatctcctggcatgtatggagcagggagcaaggctatgttcccgaaagccctgattagcttgtcttgctctacgctcgacctcgaacaatacagcttgtaagacctcagtcagtcctggtacactggggtaaatcagtgtggtggtggaagaaaagccgggaggcctatttttataggaaaatagtaccattaaaggtgcaatgctgtcattttggacaaaaggaaagaaatttggaagagctgggattattggcaaaaacttgctgaggggtgaatctttagagctaatcactgcagaatcagagttgcagcaatatgattgcaagcaagtctgaatgcatagttttactttaattcggcttgacaatttgaataggtaaccccctcgggactgactgaatcgttatgcatgtgtcaatcaatgggaggtgtgcattctctagaagtagttttaggctgtttggtttggttttggttttgttttttaaatgcagcctgttgaggcactgtcatgtggtgtgaaagatttaaatgtagcaacgctaaagagtaataatttggggataagaagtggggacattggccgggcgcggtggctcacgcctgtaattccagcactttgggaggcctaggtgggcggatcagctgaggtcgagagttcgaggccagtctgaccaacatggtgaaaccccatctctactaaaaatacagaaaattagctgggtctggtggtggatgcctgtaatcccagctactcgggaggctgaggcaggagaattgcttgaacccaggaggtggacggtgcagtgagctattactccagcctgggcaacaagagcgaaactctgtctcaaaaaaaaaaaggggggggggggacattaagagagtggtgatgacccaaatgttgaaccaattatgttttggtggtggtgttcttagctgttgaatcctgaatggtttataaagtgaactagctggcttaatgcagccagcgttctgggcagcagaacatattcattcttactgtaaattctatttgctgcttccaaaggtgatgattttcaagcagacatgttctatatggtctgtgttttaggatctggtgcccagcctctatcagagcttgcctacctggcaaagctgcctacccttcaagtgggaaaatataatccactgtttaacaaggctcaccctctccaccctgtcctaacgaccttttgtgaatgtgctgtgatattttcttgctcaatagcaaggtggtagctctgctttcattttaagaaagtggaggctgagggcattgtatcaatactgttgcaactccaagaagttttccttgtaaaattaaaggaaagatcttgttattgattaaccattttcttatgccttgctattgacatattcatgctctttctacgtctagtggctgaaaatgtttgcatttgttcatttgactaatggtgtgatttttgtttctatattattagacctgtaatgttttaaaatgtattttattaaatttggactggatgtatgtctctagcaatacgaggtactttctaaactattaagggaggggttgtatcctcatgttgagataagatgatggtcgtttaaattttgcaattttttttggcctgcagggatattttgtgtttatgtgtccaaaaaaggaataaattggcattcttgtgccaaaagttgtttttcctgtcaattgtctaataagtatgcagtacactgtaatggcaacatacatggttgctttataaaaacagtttcctcagtatgagaaattttacaaagaacagtggaaaaactttgtgtttttaactcttgggtctccctatttttaaaaattgctatttggtatacaattattatgtgtcaattaaaactaaaataaaacttttaaaaaagaaaaaaaaaaa

SEQ ID NO: 808 - DNA, 12926 bp, Homo sapiens
gaggcccggaggaactcggagggggagggagagaaaggccgagacggagggagccagcggcggccgaggggctggtccaggcgcggccgctaagaggagaccaagaggcgggggctgcacttgacaaccagcatgccgagatggcacaccttgggcccaccccacctccacatagccttaattacaaatcagaggacaggcttagtgagcaagactggccagcatatttcaaggtcccatgttgtggggttgatacatctcaaattgagtcagaagaggcagaagtggatgtgagagaaagagagacacagagagacagagagccaaagagggcaagagacttgactttaagagactcctgtactgacaactccatgcagttcggaaccagaacgactacggctgaaccagggttcatggggacatggcaaaacgctgatactaacctcttattcagaatgtcccaacaggccatccgttgcacactggtaaactgcacatgtgaatgttttcagccagggaagattaacctgaggacttgtgatcagtgtaaacatggctgggtggcacatgccttggataagctcagcacgcagcacctgtaccaccccacccaagtggagattgtgcagtccaacgtcgtgtttgacatcagcagcctgatgctctatgggacacaagcagtgcctgtgcggctaaagatcctgctggaccgtctcttcagcgtcctgaagcaagaggaggtactgcacatactgcacggccttggctggactctgcgggactatgtccgaggatacatccttcaggatgctgctggcaaggtgctggaccgctgggccatcatgtctcgagaagaggaaatcatcacccttcagcagtttctgcggtttggagaaaccaaatccattgtggagctgatggcaattcaggagaaagaagggcaggccgtggctgtaccatcttcaaagacagactcagatataaggactttcattgagagcaataatcgcaccaggagtcccagcctccttgctcacttagagaacagcaatccttccagcattcatcacttcgaaaacatcccaaacagccttgcatttctgcttccattccagtacataaaccctgtctcagcaccactgctagggttgcctccaaatgggctactgttagagcaaccagggttgaggctgcgggaacccagcctttcaactcagaatgaatataatgagagcagcgaatccgaagtttctcccacaccttataagaatgatcaaacacccaatagaaatgccctgaccagcattactaatgtggagcccaaaaccgagccagcctgtgtctctcccattcagaattctgccccagtcagtgatctaaccaaaactgaacacccaaaaagctcattccggattcatcggatgagaaggatggggtcagcctctaggaaaggaagagtgttctgtaatgcatgtgggaagacattctatgacaaaggtactctcaaaattcattacaatgctgttcacctgaagatcaaacatcgatgcaccattgaaggttgcaacatggtctttagctccctccgaagtcgtaatcgccacagtgcaaaccccaatcctcgccttcacatgcctatgctaaggaataaccgagataaagatttaattcgggccacctcaggagctgccacccctgtcatagcaagtacaaaatcaaatctggcactcacaagccctggccgacccccaatgggttttaccactccccctctagaccctgtcttgcaaaatcctctccctagccagctagtattttctgggctaaagactgtacaaccagttcctccattttatagaagtttactcactccaggggaaatggtgagtcctccaacctccctcccaaccagtcccatcattccaaccagtggtaccatagagcagcaccccccgccaccctctgagccagtagtgccagcagtgatgatggccacccatgagcccagtgctgacctggcacccaagaaaaagcccaggaagtcaagcatgcctgtgaagattgagaaggaaattattgataccgccgatgagtttgatgatgaagatgatgaccccaatgatggtggagctgtggtcaatgacatgagccatgacaatcattgtcactcccaagaggagatgagcccaggcatgtctgtgaaggacttttctaagcataacaggacccggtgcatttcaaggactgaaataaggagggccgacagcatgacttctgaagaccaagaacctgagcgggactatgagaacgagtctgagtcttcggagcccaaactgggcgaggaatccatggaaggggatgagcacattcacagcgaagtgagtgaaaaagtcctgatgaatagtgagaggcctgatgagaaccacagtgagccctctcaccaggacgtcatcaaggtgaaggaagaatttacagaccccacttacgacatgttttacatgagccagtatggactgtacaatggtgggggtgccagcatggccgccttgcatgagagctttacatcgtctctgaattatggcagccctcaaaagttctccccagaaggtgacctatgttctagcccagaccccaaaatctgttatgtgtgcaagaagagtttcaaaagctcctacagtgtgaaacttcactacaggaacgttcacttgaaagagatgcacgtctgcacagtggctggttgcaatgctgcattcccctctcgccgaagccgagacagacacagtgccaacataaacctacatcgtaaactgttgaccaaagaactcgatgacatgggcctggactcgtcgcagccctcccttagcaaggacctccgcgatgaatttttggtgaagatatatggtgcccagcaccccatggggctcgatgtcagggaagacgcctcctctcccgcagggactgaagactcccacctgaacgggtatgggagaggcatggcagaggactacatggtccttgacttgagcaccacctccagcctccagtccagcagcagtatccattcctccagagaatccgacgcaggcagcgatgaggggattcttctcgatgacattgacggggcgagtgacagtggggagtcggcacacaaggccgaggcccctgccctccctggcagcctaggggctgaagtttcaggatctcttatgttcagcagcttgtctgggagcaatggtgggatcatgtgcaacatttgccacaaaatgtacagcaacaaggggaccctgagagtgcactacaaaactgtgcatttgagagaaatgcacaagtgcaaagtcccaggttgcaatatgatgttttcctctgtacgaagccgaaatcggcacagtcagaaccctaatctccacaaaaacattcccttcacttcagtagattagtctcagaatggacactacaaatgccagctctcaccagatggcctacgtgtttgaactgccatagtcagtgtgcgcttatgtacttggggtgtgtgtgtgtgtgtgtgtgtgtgtgcatttatgtatgctctgtggctacatatacacacacgtatttccttgagataaacaagataaacactaggtgcttttgaatttttttcacttccctttatagttttgggaaaggagtgggatctttgatttcagggtgaaaacagagtacccctttaaacacacacacacacacatgcacatacacacacacacacacacacacacacagtgtgcaactagccccagttttgacagaataattcttggtcttccccaaagagacaatttgttgtacccatgactgttgcctgcaaaaataaaagggaaaaaaaagaaaaaagaaacaaaaaggaacttcttatagttgtcttttgtgaactttaaggttttgaaagaatcttcaattaaagcatggcagattcacctgtaaatatttagccttgaggggccattgatgtaaaacaattgtattgatggttgtttaacttttttgtttaatttttacagttacatccagctgttagatatgcaggaaaagatagtttgctggctagctctattcatttatgttagcattaatgcacatttttaaaaaaagaaaaaaacatggtcttgtttttactacctgttagatatagtgctaaagaggtgctggcatgctttacagcacagatctgattttttaaaatgtcctgtactagtacataaatcccgtcatgcactttttttcatacactacaaggggatgtgtaataaccatgcttcttttttatccttaaactattgccatacttcagtaagtgtcttttttaaaaaaaattcacttgtataaaaatggtctggtcagtatagggcacaaatgccaaacaaagtattagtgttaacacaaaactgccaactttgcacaagtttccagaaaagaaaatacaattagtcactcaacataaccacaggccaatttgttggccaccagaaaaccgctttttaaaaaaacacttggtgattctttcaagtgccgaatgttattagaatcaacattgcatccttcttgcttatacgttaagttacataaaaggaaaacaaaattatgtggtgtgaaacagccaaggcatttattcttcagaggcaggataatatttcaggatacaaaagcccaaattacccgctacggaacaaagatgaatacagtaaaagagtcgaacactcatttccaaggccctaacccttatcctttaaaaagaaatcctctgaactgggtcggtctgttgtatggctgtctaatttgttgcaaattctgcagtcgtactataattcaggcctgtttggtagacaaaatcaaaaggcatttaacagcagcagtacttggaagctttgaaaacatgtgctaaacttgaatggagcaacactcctttctgaaaagccagaagaagggggttttaaagcaggatctctcaatgttcagtgttttgtgtttccccacacgatttgtcagagagaaatgaaagcaagcctgaaaccaagcaattgagagtgagaaagaggagagagactattctccaaaccttttttgttttgttttgtttccgatgtttacacatgttgcctgagctggttaaccacatcggcagcctcagctaccacaacatactgactaaatgatgatatttactcaagttcagtctgcagccaaaaccattagggtgtgcattgcagactgttttgttgtcttttttttttcttttttcctttttttttaagtggaggggaaaagaagagataaacaaggaatattttgtcaaacagtacacaataatttaaagagaatgtatttcttttttgcatttaatggcctcagacatttctttcatcagtctaaaagttagaaatatccctttattttaacttttatgtcgtttccatttttcatgtttttgtaattattttttctatgttcacatcagcattcacttccgttaaatttgccaaaggaaactgttaatatgtttctgttgttattattcctgtaggatttattgtacctcacagtatttattgtttcccaaaataagcatcattagttggggattcagtatttttgttgtgaaaatttcagaaacaatagattcttaaagataagctagctatgtctaggagctttatcttttcacctccttcagaggatgctatggggtccattttaattcttcatttgttctacggggaggaaagaccaaaagtatttgcagtacaaaagaaactatatcaaacactatgttaaatgacaagtgtttatggtaaaaagctgaggaattagtaataatcgtttttgttttcttgtactttgaattccccaaagtcttaattgctttattttggtgttgtgttaaattgaacagacagatgttttcctttgttttataccatataagactctgtacagtatgtttgtgaaagattgaactagaataatgaaagtttgtttgcaaacattttggtcctctcagcgttctctgtgttgtgctgttgccccattaccaaatggttagattcaaaaagggtgggaaaagatttttaatatcccaacaaaacattatagaaactctggcttttgcagtgtgcatagactacatgtagttttatgaaaataaatacacatttttatttcagcaactttgaaaagttacactcagttgagttactagaactcatcttgtacaacagcaatgtttagtctgtttaatttaatgtcaaataaaaggtcagatagccctcgtgagtgaattacatagctgtcggcagtcacatcagcaaatgcaccaggcttagaacaaatgtttgttacttgctgcaaaccaagctaatgtgtatagccagttagaaaaagtccagaagtaatgagattctagaagtagagtttcccttgcttggaaacatgaatgtgttcacctgtgttttgtcagagaagtggcaataagtcctggacagctgacactttttaagtatctcccctatttgctactacttttgtgcctcaagtgcccagtcgttacggtggccttctaaatgagtaaataacattttccaatataaagcctatttgcttaaaagggacaggggagtggatggatgtagtacatgcaatggaaaatcataaaatgtacaattcttctgtttccaaagtattgctcgttcttgagtgtgtgcctgagtgtcttgttttgacttaactagaattctagttaagatggtgatcccatggcttatttgcaaacaggaaggataaagagatcagcgttttagtcatggagctcatctttgcccattcctactcatttgctttttcataggagttttttgttgttaaacagtttctctcaagccacatgcattctatgctggctgaaaattaatagtgatgtagatgttcatccgacaagcttttccccatgtgattggttttagccagagtttatcacaggtacaaaattaggcggtatgactgtgcatgttctctagctgatgttgaaacttgtactgtcttgatcatttaaaactatgtttttgtaaatatcaggtttagtccgctttcgggaatatctgcatgctatggaaagagagaaaaaaaggatagataatgaggaatttggtttaaaagtgtgataaaaatccttggcattctttgttctgatattaattgtatttaaataagtcaacccaatgtaactcattccagatcttagtccagctgccctgttcagcctgatgccttttaaaggtttaaaggtgttaatgttttccttttcaacatggcaaacattttttaaaacctttttggcacaatggtgccactgtcctcatagtgttatttctttggtcatgaattttcaggcccttccagtaagaggagaaaggcacttaactggttaacagccccattattatacattgctctaaggaaaaaaaaaaaaaaaaaactttgaatatatcaagaatgggctattccagaggcttctcctcaggagaaactatgcactaggttcccaccaaatacaatgtgacctttttttcccctttctctgtacacaccccagatatgtgccaagcaaatgagaatgagggccgttgacaattaaagcataaagaagctagtcaccagattgagatggacatgctgctaactgctgacagcttgacctgagcagtcctaacttgtatctggtctgttagcattgggttagattgactaacagagtaaataaaattcacctgtcataagacacgctacatctgctatcatcaagaaacaaatcatccagaagaaactttttttcatcctgtggtcacacccttttcttaagagcttcttttttaaaattatgacaaacgaatttcattctttaaaatcacttatcttctcccaaacttgaagtatttaaattaggtggttttgcttttccctctcattgtttattttttggggatggatctaaatgagtaagatgagcaataaaagataccagaaagactggagggatcacagtgttttcatcagaactaagtagagggtcggttcctgccctggttttggggtagctagaaaaggaaatcatgaatgcactggaaatgttggctcgagagaaaagactggcatagctctgcctcgcagtgggtgagagcgtattgatcgtagggacctgcagagttcctatgaccaggtgagtcggctctgaggaaggggttaggaaagcaagtacagctgcatgaaatagctgaagttcctttggggtcaggaagagccgacaattgtggggttttggttgcttttgctttgtttttgagtgggaagtgttgctggaatcccctgagaaccgaaagatgccaggggtcagcaaggctatagaaaaggccagtggtaacacctcgttttcatcctaacagaggagtaggtgcgaatggcaccagcatggatcgttcctttcttgatcattactcatgcttgccactgtagcaacacaacaaagccatgattgtaattaatactaggctaaagaccttgatcaaaatgggagctcatttactgttctatgaggtatgtaagtaacttctcttcacattttccctcagagataaaccacacgtggtagtcttgtttgcgttagtactaaggtcatgtttgatctgtcccagacgagtcgcatatttcctgtagctggagtgttgctcaccataaatggtcattttcaaaaagtattgtgtaattccagctgtacaactgaccagtgagttatctgtcatcactgttgcccacatacccgtccttccttgtgtagtttcatcatcctcatccttcccacatcttgcgcaaaatgattttctgtgctcattcggcaataactatgttattcggcatactgtctttttggcatttgttgaaaaatccaaatgcttttaatccaaaagattaatccaaatcttttttaatccaaatgattttaatccaaatccaaataacaggaggttaaaaaaaaaaaaaaaactaagcatttttacatgtacactgaattggatcagcattattgttcattataatgctatatatatttttggagcaacatactatagttgtcataaaactatctttattcttctcctctaaagtgctgttgtaaattcatttgacctttactgcaggaaaaaaaaaaatcttttttatataggatatgaagaccaaggctcagtctgtaacaaatagtggaccattacaaaagaggaaagaaaaaagccagggctgagcagcaagaagcttcagttcaatttcacctcgtatctttctaataacatacttgtcactttattaccttccagtaatgtgaacgctgctgacaagactgtcacactaacagcagacaacaccctctctgcttcagcccagctctcctggctacttattgccctggccctgaagggacacaaactaatagtgtgctttccagttcagcacttggccatcaaatataaaaggatgcgtaattgcctgtttatccccttgtgaaggagaaattgactacaagggctaggctttcccatcgagttccctgatgtacacacacatccacaatcagtcagtctctctctctctctctctctctctctctctctctctctctctctcccctctctctctccttccctcttattctcccctcctaacatacaagcacatacacacacctactgtatctgtgggaagcccaaggctgcctctcgatgccctctccagctattaagtggacagtaacaagatgacttcttaaataaagggtcagtagagagatgctgtctgtgacggcatcctttgcttctttgaaaacttaagtgttaacaattccatcttgagagtaatgggtgtggccctataattagagcaaattttcctgcaagtcagtggcataagtaagattatattgccccctaatctgtagggaaaagattaaaatatttttcttccccttcaaaaagtgcacatgttgtaaactggttacgcacagtggtcatttttttttcttatccttggcatcaaaccatggacgtaggtgtacaaatgcatctttcaatgacccctccaaatccatagtgtaacatgatagattaacttttgtcaaactggactgacaatctaaaaaagatggcgtcaggcttttgactttaatcgttaaaacaaggaccaccctatgagtaaaaggtaaattctccactttgaagaactttggtaagtacaagtacagggagctttagaaaatcgagtgatggggaccaaaggtacaaaggaagaatacatgaaaatgttatattccaaaatgccctgagcccaaagattggctgctatttttgtatattgaaatactcaaatgatggttggaaagtgactagttagtgactaaatgaagtgcaagatctatcaagcgtcttctttctgggactaggggatgccatgcttccttccaaccttcccgcagcgcatctcagagaagatagttggccccattacaaacagtcacatttcagtaagatattagtcagccaggtaagacacgtgcaggtatcggtatcatcttccatatgaactttagcaaggagagaacagcagcagatttagggatagacaatgtaacaggtctatgttgacaaatctgtgctaaataatttcatgaaccagtgtggggactgggaagaaaagcactttgagcaaggactcttgggttcgagcaaaggcaattagttgacatgatacttcttaagttcctcagtatgtatatgttacaatcgtttatcagacatcttaatagaatcctaattgaaaaaccagttgccaaaattgcacaagttctgctcgctgatactagctttctccccttaactctaaaataccagggatgcttaaggacgtttgtaatagtttttttaatgctttgtttcacttttttaaaaaagaatctttgaagggaaggaagagcagaaagaagtattttaagaaaaatggagagaagtagatagtattgaaagtatatttcttgaagagagagtatctaagtgctataccaagattttatagggcttcctgttgccaaatgtgatgttgagataatgcacagctaagatggcaaatccatcaattattaactggctctgcccacttctgtcatggaatgcaaggattgagaggtgactctggggagaccctgggtgtgtgagagagctccattcatctggccctggatatgtttttcaaaagagagggagaaagcgccagtccctgcaaggtgaactgacctggcactgtttcagtgggagcctcactgcctgccttttccatgctaggagacaaagcatcctctaccccatctgtgaatcggtgctgtggccactgcgagaagcatgattcatgaggtatgatgctcttgagctcccagacaatgtgctgagttaataggttcacttgagatgtatacaccaaggctgtttctttttttaaatctagtccccaatttggagtatttttgcatgtttttgtacagagtaatccattcctctcattgtgtatcttaatctcctctgacttttccattgtctttctcaatcccaccctttgctcttcggatctcaccaaccccccttaaaaaataaatcatgtttgagcaagaaggtagaacacgccctccctcatcttggttttaattgctttggaaacgtgttctaccctgtccagggtttgcataacgtgaattaagtgaatgagatgttctagtattatatcttaacctgataagactatctaagatttctagtatatggtgcatttgctttcctgtgcaaactttggttcagctgccctgcagagaatctcaccattttcctgccagtgccagtataaagaatgcaggagagctaaacctgggtacatgaaggtcagaggggtgaggacggtcgagaaatggggagaagacttgggcttgagacgacctgggcttttcatgtgtagctcactcagcagtatgaggatgactgacacaccagtgggtggtttccaagtgaggcaaatgcccatttcccctctcccctcacaccttgcctggcttcttccatgaagtccttgctgcttttctgcctccccaaaggtgaggggaaggggctggttggggatctgggaaagccagttctctgttctctcctgctggtgatggactaggccttttagaactagcaagatccctcacacagctgggagaacacacacctttcttactccagacccattggtgtgtctccagtaacaaaattattggactcagcctccatatttgacagcaaaagtggccagagggagttgaaatatcttgaagaaaaggaattttcactaagatatgtcctctccctctcccagagtttagctgtttattccttttttttgtttatattgttctcatctgcataaaaccagtctcttgcaataagcctgccgcagaatcaaagtctgtacttcaaaaggtaactgcaccaagggatgggacagtgtgcatcaccctgatctaatcattgtgacgttggtagcttcctaaatactgtatgtaccttgaacaagggttttatttttgttttgttctgttttgctttttgtttttattggtaggctaaggtaattaaattttttaatttgctgttactttggttgtattttctgtactataactgcctacagtatgtcttttgcataaaatgcataagggtttggggatgtaaatggaattttattcatattttgtccaaatacctcttgtaatttgtatcaaaattcttgtacaatttttatattaaagatttatcagtcactga

SEQ ID NO: 809 - DNA, 7331 bp, Homo sapiens
gttgtgagctgcggcagagactggtggctggaggagacgccggcgctggagagtgcgctgcgccgcccgccgctgagggaccgcggggttagccactgctggctgcttccagtgttcgccgagaggtaccgggggtgacagctccgggaccggccgaaaggcgaggaaccggtgtggaaattaaaagaacacacatattttgactggggctttgatcaaccaaatgctaaaaagccacataaagaagatccctaatagtcatttctcaacaattatatagtcaactgatgtaacaatggtactaatattgggacgcagactaaacagagaggatcttggggtgcgtgattccccagcaactaagcgaaaagtttttgaaatggaccccaaatctctgacaggtcatgagttttttgacttctcttcaggatcatcccatgccgaaaacatactccagatatttaatgaatttcgtgatagccgcttattcacagatgttatcatttgtgtggaaggaaaagaatttccttgccatagagctgtgctctcagcctgtagcagctacttcagagctatgttttgtaatgaccacagggaaagccgagaaatgttggttgagatcaatggtattttagctgaagctatggaatgttttttgcagtatgtttatactggaaaggtgaagatcactacagagaatgtacagtatctctttgagacatcaagcctctttcagattagtgttctccgtgatgcatgtgccaagttcttggaggagcaacttgatccttgtaattgcttaggaatccagcgctttgctgatacccattcactcaaaacactcttcacaaaatgcaaaaattttgcgttacagacttttgaggatgtatcccagcacgaagaatttcttgagcttgacaaagatgaacttattgattatatttgtagtgatgaacttgttattggtaaagaggagatggtttttgaagccgtcatgcgttgggtctatcgtgccgttgatctgagaagaccactgttacacgagctcctgacacatgtgagactccctctgttgcatcccaactactttgttcaaacagttgaagtggaccaattgatccagaattctcctgagtgttatcagttgttgcatgaagcaagacggtaccacatacttgggaatgaaatgatgtccccaaggactaggccacgcaggtccactggctattctgaggtgatagttgtcgttggaggatgtgagcgagttggaggatttaatcttccatacactgagtgctacgatcctgtaacaggagaatggaagtctttggctaagcttccagaatttaccaaatcagagtatgcagtctgtgctctaaggaatgacattcttgtttcaggtggaagaatcaacagccgtgatgtctggatttataactcacagttaaatatttggatcagagttgcctctctcaataaaggcagatggcgtcacaaaatggctgtcctccttggtaaagtatatgttgtcggtggctatgatgggcaaaacagacttagcagcgtagaatgttatgattccttttcaaatcgatggactgaagttgctccccttaaggaagccgtgagttctcctgcagtgactagctgtgtaggcaaactgtttgtgattggtggaggacctgatgataatacttgttctgataaggttcaatcttatgatccagaaaccaattcttggctacttcgtgcagctatcccaattgccaaaaggtgtataacagctgtatccctaaacaacctgatctatgttgccggtggactgaccaaggcaatatactgttacgatccagttgaagattactggatgcacgtacagaatacattcagccgtcaggaaaactgtggtatgtctgtgtgtaatggtaaaatatatatcctgggcggaagacgggaaaatggagaagccacagacactattctctgttatgatcctgcaacaagtatcatcacaggggtagctgcaatgcccaggccagtgtcctatcatggctgtgtgactattcatagatacaatgagaaatgctttaaactctgaagacaggatacctcaccgaagaagccacactgatccaagatgggaggttttaaaaactctacagtgggaacttcacatatctcctttgtgccatatgcaaaaaatagtaaaaataataatttggtgcctttctcctcaaaatatcaatctttcaaactataataaagcctttcctataattgaaaaaaaaaacttttttgttaaaggtaatggtggttgttacttggcctttgaagagtgtacctttgtaagtatttgtaagaagtctatgtgaattaggaaatgtctgtctgcataccttttaggagcgtgtgaatggtgtcttcacttattatgtatgtttatctgtatgtatattccttattttgtcatatatgtagagaaaattgcatgacttgaggcatcatttaggttgaagaagttaatgcttaggatgcattctaggagaaaaaatcagttttaaaaacctttgttgttaacaaagtatatccagattggttaattttattgaagggtttttttctgtaattgataaaaatgtaatgacaacaattcaggcatcataaaatactgaactattgtgactttattcttagaattgctgtcttacattaaacatgtttttagggggaagttaggtaggagatagaaaaataagtgcccctacaagggggattaaaattacaagttaattcctaagagaaaaatggaatggcctttgaaggaaaaatgacccactatggctctcaaagtttttatgcatcatctcttcaatcctctaagaaagcctcttttcttaacttgataaagcagtggaaacccattttgcaatattgttttgtgaaaaacagggacagacagccaggtacagagactcacacctgtactcccaactactcagcaggctggggcaggaggattgcttgagcccaggagtctgaggctacagtgagctatgaacgcacacggcaccctagcctgggcaacaggttgcgacactgtctcaagagaaaagaaaaagaaaaatagggataggttttccttcctagcccagtagagtttgacctcattagtatggtgctttgggtgaggacctcttccttgattatcccactttctagtgaacagctaaaattcctgagagtctctactgttaaggtacctttaataggataaagcagggaccacctatctcagtgggtccatttttcttttaaaattagttatctgaaaaaacttagcagtagttcccatctttaaggtaagtctttcatttggtccccattgtgtaaaatactaatcaacattttcaagcttctgtacaacagactgcttttgtctagatttctcaactccactttataaagcttatcagttttcagagaggaatgtgaattttttttctaatgcaaataaatggatatggcaggaactacagcataagtgattattgtgattctgggtggacggatataatttacaacatttagggatgttctaggtagcctgctgtagtttgacttccagtcactgttgtctttcacattataatttgtatatttcttgtgatagaagggatgatgcaaatatgtaattaaagtgtcaccagatttctgttaaaaccaaggttgaaataaaaagcctaacattggtaagctacattgttttctcattttagaatgattcagagatttcagatagacattttttaaactttaatgcttagctagaatctacattctgaggaaaactctaaaaaacttaaaaatttttagggaatttttatttttcaaatcataattttaaaatgatagataccattttgtgataacaacaattcagaaaacaattttctatcctcttagttgaaagaatgtaggtacagtttggatacttgtactttaattttagagtaaacatctgcattatactcttatagataatagaattatttagttaagaaattctttacagtaaatgagataatgtgtgaaaaagtattttgtaaatgctgaggattctacaaatgatagttgttattttcatgtgtatttgtaagatcatgtccatttcatgaatataggacttcacataaaaaaagactttctcaagacaactttatattctagtatttttctgttgtaaaaagtattaactatttacttttattttgttatacatttattttaatatccatgtgtttattatagtaaatttgaaatgaaatcctgaaaaacagaatttttttaaacacagacctcacaccaatattaattttttctctacataatttaaaactacataaattaagtacttaaaatttatattgaaggccaccaagaacttaggttgaatcttagaaaatttaaataactatttttaaagttacccaacttaatattttaattttttaatatttatcttcctttactaattcttgataaataatagcattagacttgataaaataaaaaagaattttagagtagaattaatatatcaaaaggggtatatcaaccaaattggtgtcagattgtattcattctctcatcacataaagatttttcttttgataggtgatgctcatatgaacctttggtttagaatctatatatgtacatgtgtatgtatgtagatagtatggttgtatacacacatatataccaaacaccatgaattttagcagtctgtgatgatcagcaaaaaagcacataaagtaaaaattagttgaccatgctaaattcaattctggaatttttttttatttgggcatttctagaactttttacatttgaaagtacatgatgagtattagtaacgatgacttatgtataatcagaatctttatgacaatttagttttacaaggtcagaagagatgagtttgctaaacccagctgtgatacctcagttggaaagggaattcaaaggtatgctttgtagaacagaaaagtatagtttttttttcatgaactttaatcattttctgtttttcctctatgtgagtcagctacaaaagtggtctaatttttacaacagtagaacttcctccttttctactgtaatcttcccactgactttactgcacaggtatgaaatactagtgtattggatcttcagtaacctttttatttcctagatgattgaaatataggtatttactccatttaaaccaggtgataagatgatgtaaatactcagggagggtattaacttgttacttttgctcgtttggggtgtaaagtgccatgactgaataatcttcaattcatgattctagagtaagtttaatttggaaaaaggggcttcacacatggtggtggttgaacattgattcttttatacttaaaaagatgaaaatgttttgtggactgatacattttatcttactgaatatgaattgtttatgtatctctactgtcaaatagcctttttgaaactcaggaaagacaaaggttcaattacaccacttttgtcaataagcaaaccaggtattttttttttctcctgttgtctggatatggcaatagattttttaaattgctgtgagaacccatatatgaaaagagaggagttgaattgtgtgtgccttttatgtcttgagatttatatgtggaaaagacgacatctacttcaaactgtatttttttcgtttttttttttttttggggaaggggggagaacggggtcttgctctgtcgcccaggctggagtgcagtggcgcgatctcagctgactgcaacctccacctcccgggttcaagggattctgcctcagcctcccgagtagctgagaccacaggtgcgtgccaccacacccggctaatttttttgtatttttagtagagacggggtttagtagagacggatcactcctgaccacgtgatccgcccacctcggcctcccaaagtgctgggattacaggcgtgagccaccacccccggcctgtattttcagagaggagagcttggtgtttttgtggtgccaagtggtaagataatgtctctttgaggcttcctatggactgcctttattttagtaaactcaagacaccagttaacctcaacagagttttggccttattagaatttgttgtgcatcttattgaaagccaggtttacatcacctcaccccattattctttttagttaaataaatttaccatgccaagtaaccagaatggagcaaattggttgatctttaaggcagtaggtttgactagctagctatcattattgtcacatctaatgctaggcaccagaaaccatttgagccaggagtgtgaatgaataattccagagacactttagacattttttaatgttttatatgaacattttacatttgtgtgattgccttagatattaaattttcctagtgctgataaaaacagcaacattcataacttattttatatattgttccaaagaaaagaatttgttttaatggtttcaaaataactgcacctgaatttgtttatgtgccttaagttctctagtgctatttcaacttttttttcaatctaaatgaagcttaccttagataaggttcatatttgtttcctatagagtaaataaacttccccttcttaaattgtgtaataagcaccaacgtgtggttgcttggcagaatgagaatgttaagggagattgttggatgtttggagtttcattatattttttgtttttattttttgatacctaggtgctttttaaaatattcagacaaatatctatcttacattgattaaacccgtgtaaattcatttgcagtatctacatcgaatgtcaaaaaagtatacttatttttgttccatacttatgtacaattttttccctcttcaggctttttcatttacctttttgaaaaagcacttactctccccttccctatcacccctcccccaaggtttctttatttaaatttttattgagagttgttggagctctaagacaatacaaatttagagttgaacaaaagtataatctgctttacaactagtatagacctaaggtcatttgctttcaattagaggctccagagtcttcatagtggaaagaatgctttgtatttaattgttcttagttaagttgtagcacgtgaatacttacttacatgttttgtttaaatatacttcttgcatagtttaattttttaaaagttgtatctaataaaatgtcttttaaccattattacttgactatatggttgtattaaattttgtttacgaaaaa

SEQ ID NO: 810 - DNA, 8885 bp, Homo sapiens
taggaggaaatgacggagaaagccgggcgctgattggtgagctctggccaggagcggaagccggtgtttcgcagcccagagcatttgcagctggtcactccagtctcctgggactttgactcgccgtactcggcgcgctcctgctgagggtcgccggagatgtcgctcggccgccttctaccaggagcctgatccgtgccgcccgccgcccggatgggaccaccagagtgctctaaagtctccagtgaatattgaattgctgaggattttgggaaaagacaaatcaaagttcccattccatggatcccttaggtgcaccttcccagtttgtggatgtggatacactaccaagctggggtgactcatgccaagatgaattaaattcctctgatactacagctgaaatatttcaggaagacactgttcgatcaccttttctttataataaggacgtcaatggaaaagtggttctttggaaaggagatgtggcattactgaactgtacagccattgtgaataccagcaatgaaagtctcacagataagaatcctgtgtcagaaagtatcttcatgcttgcagggcctgatttgaaggaagatctccagaaacttaaagggtgccgaacaggtgaagcaaaattgacaaaaggattcaatctagctgcccggttcatcattcacacagtgggacctaaatataaaagccgctatcgcacagcagctgagagttccctttatagctgctacagaaacgtacttcaactagcaaaagagcagtcaatgtcttctgttggcttctgtgtcatcaattctgcaaaacgtggttatcctttagaggatgcaacacacatagcacttcgcactgtaagaagattcctagagattcatggggaaaccattgaaaaagtagtatttgctgtctctgatcttgaagagggtacttaccaaaagctgctacctctctacttcccaaggtcattaaaagaggagaatcgatcattgccctacctacctgcagatattggaaatgcagaaggggagcctgtggtacctgaacgacagattagaataagtgagaaacctggtgctccagaagataaccaagaagaggaggatgaaggcttgggagttgatctctctttcattggctctcatgcttttgctcgaatggaaggagatattgacaagcaaagaaaactgatccttcagggacaattatcagaggcagctctgcagaagcagcatcaaagaaattataatcgctggttatgtcaagcaagatctgaggatctgtctgatattgcttctctaaaagccttataccaaacaggtgttgataactgtggtcgaacagtgatggtggtagttggaagaaacattcctgtaacattaatagatatggacaaggctctcttatatttcattcatgtaatggatcacattgctgtgaaggagtatgtattagtgtattttcacaccctgaccagcgaatacaatcacctggactccgacttcctgaagaaactctacgatgttgttgatgtcaagtacaagaggaatttgaaggctgtttattttgtacatcccacatttcgttcaaaggtgtcaacatggttttttaccaccttttctgtctcaggactgaaggacaaaatccaccatgtggacagcctccaccagctgttttctgccatatcaccagaacagattgactttcctccttttgtccttgaatatgatgccagggaaaacgggccttactatacatcatatcccccatcaccagatttgtgacctgccatctttcagtgcttcttggttcccaggatgccacttcctccacgaatagctacctgttgaagtgatattcattgttgctgtacagatccagagagccttttgtccccacctctctggtatttttttattgactgtatattttctggcacataagcaatctaaaaatggtaggccattctgaactgcacacattttaaatttgtatatttatatgaaatggaaatgttcatttttagattgttaatagaaattggggagcaacttttgagtatctttagtttcctgaaggacaccgaattctccattagataaaccaccaagactgttcacatcatctctctaacattgcacgcttcctttgtgtacttaagtgattctcgaaatatacagaaccaatgtatgctaaccagatgcattgtttgcttcagatccatggtgttaataccatgtatattttataaagataatttggctgtgttaaaagagaattacctgagtccaagaatgtggaaatgtatctgacaaaaaacatcaaaatcattagcaaaacataggacttagaatgttaatgtacaagttaagactaaagtttaaggactaaggttccttggattatatgacttgttaagattgccacagttccgatctcaacagtgtggggtgaaacaagaagactgtatcttcagcctttttcctataatcatggatgatttggtcttattcaaaaggaccgcacatattagtactcttaagagcatcttccaagactccagcagtgagcatttagagagtgtgttgtcttccagagtcatgaatgattttgtttagctatcaggtctactacctctaaggacatttcatagcagcatctcttgagttgcctgcatcagtgtggaggaagtgtgtcacagtgaacaaatccagggagctgataattggcaaaagaccacttttaccactcaggctctatttgtgccttagcttggttatgagtaaaaattagaattatgctgcctacctcacagaggtatcatgaagatagcatttagaaagggctttgttgtggtggggtatcttcagttagtttttaaatgggaataaatatatatgagggaatgctacacagcactcctcttgtccttgataccatttgagtgatttttctttttgtgtggcaatacctgttagtgtaaaattccaaccctgatgacctccttcctcttttgtccagaatctcttctggcctgctcatcccctgatgctatacttcaataagaggcatctgttggccattttaaacatttcttcttgaattaaggtcaaaccattattattcccatctgggtagctttgtactttttttgattcctacagccacctccccacagccccatcttcctcaccccatcacgtacattggcagttcagagaaaaaaaaaagcagaacctttctgttctatcatgtgctccagatcagtgcttccaagggtcccattcttttctgcccaaactaattcttcattggagatcaaagaaacatattctcttcatttatgatagggaaatgcccctatagtgcattaaattcatcctgtattttcccatataaacaagaagagactttacattttttagataaaggttcttatcttttgcatgtattgaacacattttctttgtgtcagacctcaaaattacttgatccttatatatacatctatgttaagattttctcttatgtcccctaggtcatcacatccaggcagccagtcagatgtcggatgttaagctttctctcaaacagtactttttttttaaccccttgggcactgtaccttaaaagtctgcaactttaacttcatcttctacagtcaatcgtgagatcatatttgaggtatcttcttcacaaggagcagctatgaaagtctgccaacttttctttgttaaaggggaacttggctacctcaagaacctggcccaaaccattttctgtagagataatagaggccgtaagctactttgccaatttgaaaggaagcaaatttatatatacaatttcttacaggcaatgattttgaaaggatgttcctttgctatattcataccagtatattaatgtttagtaacacaagcaggattctacatatgctgagattttagtacaattgatgtcctagggtataaaggtgatacagaactatatacatatcaactgtgttttataattcaatgatgactaaagaaagataaggaccactcttctcactgaaactaaatttgatgtgggaccaagttcatgcttttatagatgtctaaagtgttatagaatgaagttgcttcaaagtaccaaatcctagaggagaaatataatgaccttgatattgaaatgattaagcaacatttggtataccaatctgcctttgtgaaaaggtttagcctgaataatacatgccattttcaaggacatattagaggataaaggggatactggatggagatgaccaccagcatctgatgttaattcaaagcaccaccaagtctttaatttaattaaactttggtcatgccaaatgctaattgaattgttgaagacacaagttataaaatattaatttattaatcatgcaaggcataatatgatttttaaaacaagtacacttcttgcttccacgtgtatttgggttcttaattcatctatatccaagtttcttgatagtgaaaattacctcttaaaaaaggttcagcctttattagactcgtgagggcaaatggtacatattttaaagacgttttctcctttaatgtatattatgtttcattggcggatgctttatatttcctttttctttttcttttttttttggagacagtcttactctgtcacccaagctggagtgcaatggtgtgatctcggctcactgcagcctcggcctcccaggtttaagtggttctcctgcctcagcctccctagtagctgggactacaggtgcctgccaccatgcctggctaatttttttttttttttttttttttttcagtagagacagggtttcaccatgttggccagactggtctcaaactcctgacctcaagtgatcttcctgcctcggcctcccaaagtgttgggcttaccagtatgagccaccgtgcccatcctgtatttcctttttcaaaggaatacatctgcagtattttgagagtaattagcagagggttttttgagtatttttggtaggaaaaatagatgtagttttttaatcaaatttctgaaattgaaaatatcacttctttttaaagagggataagtatagtcactctagtagaaaaacatggcttgcctatttcctcttcttttctgtttgcttggatattgtttaatgaattcaaactgtaggtttagtcttgtctttataacagttaatggagaagtgataaaattaagtattcagcataaactaaagatcactctttgtatttccccgatacattgacagtatgtatgtatatagagtttaaattgcttaatatatgcacagaaatgattagaatttgaagtactatatagaggagagttacatggttctagtggcagtggattgattgtattaaggaccaaaagaactgcaggataatataaaaacaccttgaaaactggagttagttaggtttctttttctttttcttttttttttttaaagggccttactgtactttttttttttttttggtcacccaggctggagtgcaatggcacgatctcggctcactgtaatctctgtctcctgggttcaagagattctcctgtctcagcctccccagtaagtgagattatagacatgcaccaccatgcccggctaatttttgtatttttagtagagacggggtttcaccatgttggccaggctgctctcgaattcctgacctcaggtgatctgcccaccttggcttctcaaagtgccagattacaggcataagccactgtgcctggccaggtttctgattatagttttcttaagttgtaatcatcataattaacgtgcgctagagtgttttaactgtgctggcactaatgcttcttggcatataattaactcttgttttgcaaaaagaccatgaagaatgaaaggagggctttaccttaccttagtcattttgggtgaataccgtaaactgggtggcgtaacaaaacacatttatttctcacagttggaggctgagaaaccccaagatcaaagtgccatccagcgcaattcctgatgagggccctcttctggcttcttgctgtattctcacttggcagagagagagagacatcgttactttcctgtctcttcttataagggcactaatctcattcatgagggctccaccctcatgacatgattaccacccagaggccccacctccaaatgccatcactttgtatgttagggcttcaacatatgaatttgcagacgaggaggagaacataagcattcagttcataacatacctataatctaggtcatatcataaacccagagatgataaggattgcctggtaggcctaaccatatatacatatacatgcatgcacacacacatatatgcataatctgccttgttttacattctttgagtcggacttctgtggtccatatgtagagaacatagagcaataaataacctagttcaatctttgagtcttactgaactagtccttaaacagatggtatcaagatcattttagatattagtgactctcttgtatattagttattttttacacttttaagaacagcatctttgaatcttttcaagtacagtatgccttaaatgtataggaccactgagttcaggaagaaaagcataggtattctgtaggtgaattacactaacaaaatcacaactgcagaatgtgatctgatacttttgttggacagtaaagctaatacattttatatacacagtcataccttttttttttgtaatgtgtttcgttaacgtaagcacacagtcatcacagactgagacaggactttgttagaccagatcttgtgagctaaatatttaagagcttaacatatataaatgattttaattggtattgggcgaaggaaacctaaaaatgcttaaattgacagatcttacaatttgcttactgaaaattcagaaagcttttatgaaaactttgtattttaaaatattttttgctcattctgaattagaagttagatcccttttaaagagggtctcactctatacaaatatagcctatgaagaatcaatagtgaaataatagtgtttatattgaaccccaggatgggacattattttttgaccatttacatgaggtctttctctaattaccaaagttaaccttaagagtagttaaaaactcagtgaattttagtcaacattctctgtggagacctggactagtgtttcccaaactttcatgtgcatgtatcaaatcagctgaggatattattaaatggagattcagattcaatagttctggggtggcctctgggattatcagtttctaacaagctcttaggtgttatcaattctcctggtccccagaccatagttagagtaaaagagtatagactgcatttagcttccagattttctctttcaaggaaaggagacagaactgtcattgtaattcttcctgtggtccaggcactctaacgttcatcgtctcttctaatgctcttacaaatcctgtgaggttggtgataatagaagttacctcctgaagacgacattcacaagcaggaccgaccgtgtagaccagttttctcaaactgaataatgtacttcactttttaataaggaaaaaaatctcttagctcctcagtttttgcttaatttatatttattataatgttatctaaatatatataaacataaaactaggtataaatgctttatgtttatatgtcttgcacaagtataaaaccaaaacaagtttatgggttaacacaagcaaaactataaaactaataaaatttaaaatagtattaaatagtgatgttttgacaaaatgaaattgtcacttgtaatgtgattatggtactgagtgctacagtacaggctcttttcagttcaacaggcatgtactgccatgtactatgtgatgacccaattcaccctgttttctcctattcagactattactttaatttgttcagcacatagtgatgttatttggtcctcatctagcctgaatccatcattcccctattaaaacagcctctgttctccataagccttccaccactaatgtagaactgggccttaacagggaagtcaatacaaatacaaacctaagcactgagatggttctgccaatatttggttttaatacaattatccaaataattcagagcatgaatattattttaaaatgtttcatcaacatgaataatgcataattctcatagtaagttcatgggcactttcctacacccaacacatatatactccacaaggattttgcatggaccccagtttaagaagcaacaatttagtggtcagtagcattggcgctttggcttctgacacactcagaccttgggcctgtttctcaactttttctgaacctcagtgtttttgtgtattcaacagggataatattaattgaataattaggaggaacaaatgcaataatgtacataaagcatgcatagtagtgtttataaatagcagccaccactgctttgattagaaataataacagctaacatttgaggatttactgtgtgccttgaacgctgctaagctctttatatatattacatattgagtggtagaatcaggattcaaatccagatctgactccaaagcgcatgcttttataaaacataatttaaatatagaatatcaatgtaaattgcttatttagaaagtttattttcttatattttctcaaaaatatttattgtcaaatcagtgattctgtagaggggtaaatagctaaatttccttttaaaaattgtatgatgtgctgatttcaaattgatgtgaaatacagatttcatttaaaggcagtcatgccagattgtgctacagtaaaggaatattcagaccaaaaaaaaa

SEQ ID NO: 811 - DNA, 1876 bp, Homo sapiens
aatcacgcctcagccacctcccgcaagcctctcactgcctcagccacgctttccaggctggtttctggtccccatccgcggctggtccggccctgggaccgaatcacttcccagcgagaggaaggtcaaatttctcgaccggctacgggaaggtcgcggccgccgccctgtcagccgcctcggcgcccccaggacccctcgggtctctttaaccggaagcggaagtgcgtgtcggcgggatcatggcgactttggtcgaactgccggactcggtcctgctcgagatcttctcttacctcccggtacgggaccggatccgcatctccagggtctgtcaccgctggaagaggctggtggacgaccggtggctgtggcgacatgtcgacctgacgctctacacgatgcgacctaaagtcatgtggcacctccttcgaaggtacatggcatcccggctccattccctgcggatgggtggctacctgttctctggctcccaggccccccagttgtcccctgctctgttgagagccctgggccagaagtgccccaacctgaagcgcctctgcctgcacgtggccgacctgagcatggtgcccatcaccagcctgcccagcaccttgaggaccctggagctgcacagctgcgagatctccatggcctggctccacaagcagcaggaccccaccgtgctgcccctgcttgaatgcatcgtgctggaccgcgtccccgccttccgtgacgagcacctgcagggcctgacgcgcttccgggccttgcgctcgctggtgctgggtggtacctaccgtgtgaccgagacagggctggatgctggcctgcaggagctcagctatctgcagaggcttgaggtgctgggctgcaccctgtctgccgacagcaccctgctggccatcagccgccacctccgagatgtgcgcaagatccggctgaccgtgaggggcctctctgcccctggcctggctgtgctggagggaatgccggccctggagagtctgtgcctgcagggtcccctcgtcaccccagaaatgccctcccccactgaaatcctctcctcctgcctcactatgcccaagctcagagtccttgagctgcaggggctggggtgggagggtcaggaggcggagaagatcctgtgtaaggggctgccccactgtatggtcatcgtcagggcttgccccaaagagtctatggactggtggatgtaactactccacctgcccttgggacccatcccagttttcatcattgagccccagaccctctgagcagcaccttgaagagggcagataatcagacttgaggaaactgaaagccccaggttgagagaacagaggcctagggacctccagaccattggaatcactgtttgccagctgtgtggccttggtcatatcatcagcctctgggaagcctagttcccacatctggaaataaggatgatcatagctacctcacggttacattgcaaagccttactctaaaagctcccagcctccagaggctctcaatgaagagtcaccttcatggtcgtcttcaggaacaggacggatgaagaaggggtggggttaagactcaggggcacctgagggtctgagcccccttatgagtacccaagaaggactgtctatgcatgcacacccacaagcctatacaccatttatatacctacacgcacgcaagagacgcggagagataggcgatgcagactcgcgattcaatgatcgatatgctcataaaagtgctcaattatattttctgtattttgtatgctgtattttccaagacgtatattattttactattaaagaaaaaaatcatttttttttcccgagaaaaaaaaaaaaaaaaaaaaaaaaaa

SEQ ID NO: 812 - DNA, 1924 bp, Homo sapiens
agacgaacccggaagtgagatgcaaggcggcgattttcccttctgtcagatcttgatgaacaaagcagtcataattcatctctagaaagatttatatcctggcatttgaaatgctttttatttagaatagtagtaaaaaatggaaaaagaaaaaggaaatgatgatggaataccagaccaagagaattccttggatttttctgaacactttaaccaacttgaattgttggaaacacatggacaccttattcctactggtactcaaagtctttgggtaggcaattctgatgaagatgaggagcaagatgacaaaaatgaagagtggtatcgattgcaagaaaaaaaaatggaaaaagacccaagcagattgcttctttgggctgctgaaaaaaatcggcttaccacagtgcggagactcctttctgaaaaggccactcacgtgaacactagggatgaagatgagtatacccctcttcatcgagcagcctacagtggacacttagatattgttcaggagctcattgcacagggggccgatgttcatgcagtgactgtggatggctggacgcccctgcacagtgcttgtaagtggaataataccagagtggcttctttcttactgcagcatgatgcagatatcaatgcccaaacaaaaggcctcttgacccccttgcatcttgctgctgggaacagagacagcaaggataccctagaactcctcctgatgaaccgttacgtcaaaccagggctgaaaaacaacttggaagaaactgcatttgatattgccaggaggacaagtatctatcactacctctttgaaattgtggaaggctgtacaaattcttcacctcagtcttaacaattctagtaattttcctaagtttctaaataccagtgcctcctgtgtgtgagatgtattcccataatcaaagttgacgtcaaacatcttactacaaaaattcagtgacattcattataacattcttccaagtgaattgcctgactttgatgtcaaaatgtatttgaaagtaatttgcatatatctttaattatttctgtggagtttgtgatttttttatcagaaataattttaatgtgtgtatacttaaaaacttgacacgggttgtacagaaactggtatttttggtgctgatacaagagaaatgtatttttaaatatcccacatcctggatctttgttgggtatttagtatattgacatatatttttataaggtgaggtaactcagaacttaatttaaaagtcttaaatattctgatacaattcagctgtcttctctaccttaccatagccagttgctttcattttaaaccagagcaagtaacatattagtgacttgaatcttcataagttaaagtaaaaaacagcaaaaaacctagatctttgtcttttagaacacagaccattttcaggaaagcagttagctaagtgtttaattcatgaatattgtatactgcatcccctaccacaatttacacaatcctgtggatagtcctacctcaccctggtcaacctacatgatccttaagctaatggcgaatcacgatgaccttgtagacatgcacacaactatacctttgtccaacagatcataatatatctgctatccaactggttttacctgcctaatcctactgatttgggcactgcttgtatagtctctcaagttcacaggaaatgttgattttctaaggtcctcatttttacagagtatacaggcaaagtgacaggggaaaaggaattagtctaagagtaaggggatgattattatattgaggctaaaaccacaaagtggctcaggctttaaaaaaaaaacactgtggataatgacaaaaagcataagtaaaaatatttgagaaaaataaagtacaagttttgaacaacaaaaaaaaaaaaaaaaaaaa

SEQ ID NO: 813 - DNA, 9658 bp, Homo sapiens
gggtggcgcgcgatcttcgcgtcgctctgggcgggcggccgcggcgccgcgctggtgggtgggatcgtggcggagcgccaggcgcccaaagaggggcgagaaagcgccatggcggcggcggcggctgtgtccggtgctcacgccgcggcgaggtgaggggaccgcctcttctccacaactgaggaggccacagctgccggcccacccgccttccacgcgggccgcggctccggcatggccgggatcattaagaagcagatcctgaaacacctgtcccggttcactaagaatctttccccagacaaaatcaacctgagcaccctgaaaggggagggtcagctgaccaacctggagctggatgaagaggttctacagaatgtactggagctgcccacctggttagccatcactcgggtctactgcaacagggcctccatccggatccagtggacaaagttgaagacacaccctatttgcttgtgtctggataaggtagaggtggagatgaagacatgtgaggatcctcggccccccaatggacagtctcccattgcccttgcttcaggacagagtgaatatggctttgccgaaaaggtggtggaagggatgttcatcattgtcaattctatcaccatcaagattcactccaaggccttccacgcttcttttgaattgtggcagctccagggctatagtgtcaaccccaactggcagcagagtgaccttcgccttacccgcatcactgacccctgccgaggagaggttttaacatttaaggaaataacttggcaaacactccgaattgaggcagatgctacagacaatggtgatcaggacccagtcaccactccattgaggcttattacgaaccaaggcaggatccaaatagccctcaaaagaagaaccaaagattgcaatgtgatatcctccaagctgatgttcctgttggatgacctgctctgggtgctgactgactcacagctcaaggctatgatgaagtatgcagagtcactgagtgaagccatggagaagtcagcccatcaaagaaagagcctggcccctgaacctgtgcagatcactccaccagcccccagtgcccagcagtcctgggcccaggcatttggtggcagccagggcaacagcaacagcagcagcagccgcctcagccagtactttgagaaatttgatgtgaaagagtcctcctaccatctgctcatctcccgcctggacctgcacatttgtgatgatagccagtcccgagagccaggtgtctctgccaacagactcatgggtggtgccatgcagcttaccttccgcaagatggcgtttgactattaccctttccattgggcaggtgatagctgcaaacattgggtacgccactgtgaggccatggagacccgaggccagtgggcccagaagctggtgatggaatttcagagcaaaatggagaagtggcatgaagagacgggtctgaaaccaccctggcaccttggagtagactctctctttcggagaaaagcagattctctttccagtcctcgaaagaaccctcttgagagaagcccctctcagggcagacagcctgcctttcagcctccagcatggaaccgcttacgctctagctgcatggtggtacgggtggatgacctggacatccaccaggtttccaccgctggacagccaagtaaaaagccatctacactcctttcctgcagtcggaaacttcacaacctccctacccaggtctctgccattcatattgagttcacagagtattacttcccagataatcaggagcttccagttccttgtcctaatctctacattcagttaaatggtctgacatttactatggatcctgtcagtttgctctggggaaacctcttttgcctggatttataccgcagcttggagcagttcaaagctatctacaagctggaagattcaagtcagaaagatgaacacttggacatccgactagatgcattctggttgaaggtgagctttccactggaaaagagagagcgggcagagttgcatcgtccccaggcccttgtcttctctgcgtcaggcatgattgccaccaatacacgtcatgctccacattgtagttgttcagacctccagagtctcttccggggttttgctgctgctgagttctttcattccaattatgatcactttcctaaggttccaggtggctttagccttctgcacatgctttttttgcatcatgcctttcagatggattcctgcctgcctcagcctaataccctccctccccagagacctaaggcttcctgggatctctggtctgtccactttacccagatctccttggactttgagggaacagaaaacttcaaaggccataccttgaattttgtagcccccttccccctgtccatttgggcctgcctacccctccgctggcagcaagcccaggcacggaagcttcttttggcctcagaggggaggctgaaaccatcagccagttttggaagtcctgtccagtctgaggctcttgcccctgactctatgtcccatccgcggtcaaagactgaacatgacttgaaaagcttatcaggacttacagaagtcatggaaattctgaaagaaggcagtagtggtatggacaacaaagggcctctgacagagctggaggatgtagcagatgttcatatgcttgtacattccccggcccatgtccgcgtgaggcttgaccactaccagtacttggctctgcttcgcctgaaggaggtgctgcagaggcttcaggagcagctgactaaggatacagagtcaatgactgggtctcccctgcagaatcagacagcttgcattggagttctctttcccagtgctgaagtggctctgcttatgcatcctgcacccggtgctgtcgatgctgactctgcaggctcagatagcactagcctcgtagattcagagctatctccttcagaggatcgggaactgaagtctgatgcctcatcagaccagggcccagcaagccctgagaaggtcttggaggaaagtagcattgaaaatcaggatgtatcccaggagaggccacatagcaatggagaactgcaggactcaggtccacttgcccagcagctggcagggaagggccatgaggcagtagagtccctacaggccaagaaactgagcagaacccaagcctccagctcaccagctgcattgaagcccccagctggcagggagactgctgtgaatggacagggtgagctcatccccttgaagaacattgagggagaattgtcaagtgctattcacatgaccaaggatgccaccaaggaggctctacatgccaccatggacctcaccaaggaagctgtgtccctgactaaggatgccttcagtttgggcagagatcgaatgacctccaccatgcacaagatgttgtccctgcccccagccaaggagcccatggccaagacagatgagggggtggcagccccagtgagtggaggtgctgcacgactccgatttttctccatgaagaggacggtatctcaacagtcatttgatggtgtctcattggatagcagtggccctgaagaccggatttcagtggacagtgatggcagtgatagctttgtgatgctcttggagtctgagtctggtccagaatctgttccaccaggatctctttcaaatgtctcagataatgctggtgttcaagggagccctcttgtgaataattatggccaggggtcaccagcagccaacagttcagtttcacccagtggagaagacctcatctttcacccggtctcagttctggtcctgaaggtgaatgaggtgtcttttgggattgaggtacgtggtgaggacctgactgtggccctgcaagcagaggaactgaccctccagcagctgggcaccgtgggactctggcagttcctgcatggacagtgcccaggtacatgctttcaggaatcctcaactttgaagactggccacatcaggccagctgtgggccttcgctttgaggtggggcctggagcagctgttcattcccccctggcctcacaaaatggcttcctacatttattgcttcatggctgtgacctcgagctgctcacttcagtgctcagtggcctggggcccttcttggaggatgaggagatcccggtggtagtccccatgcagattgagcttctgaactccagcatcaccctaaaggatgatatcccccccatctatccaacatctccaggccccatccccatcactctggccatggaacatgttgtgctgaagaggagtgatgatggtgtgttccacataggcgctgctgctcaggacaaaccatcagctgaagtacttaaaagtgagaagagacagcccccaaaagaacaggtgtttttggtgcccacaggagaggtttttgaacagcaggtgaaagaactgcctatcctacaaaaagaacttatagaaactaaacaagccttggccaatgccaaccaggataaagaaaaacttcttcaggagattaggaaatataaccccttctttgagctctgaaaccagtggctcagccatctgtgccaaggagagaggctatcaccagcaatagcaccacctaggacagagggcactgtccagtgctgaataagtcactacggatgccagagggactggggagcactcacttcacttgtgtgggtgtgctttccactagctgttcttacttggactgaggacaagggcaaagcatgattgtatcccaggaaactggggcttgccctgtgtgtggcacaagcatcatgtcttgcctgtataaagccttttggtcctctgtgtactaggtggaatcttctcaacactgtagggccatttcacctcatggtttcatggcagggacatttgcttccttcacaggcctgtgtgaacaagcaaaagtacccacctcctcggtcacccacagagccaccaaagattccatgtcccagagcttcccatagcagacctgaaaagtccatgacctgagctttggccatggtagtggagtggaacaggaaatagtccagcagaggagtgtgggggaagggggcaggagaggcacaagaataagggagacctggactctgcctttttgggaaaaggaaccaagctcatagcaatttggctgataacacaatcagatttttccaggttaagcttcctttctgttatactttcatcattgtgatgctgtggtagaaagtaaataacagtagtggctcagtcatttaatctttcccctctataatacaacttacttgaaatttaaatcaagaaaaaatttctgacgctgagctaggttggtggcatgatatgccaggggtcagtgggggagcttgcttctgagccccctgttgtccgcctggagtcctgcttgtctttcccagctgtgctgagtggctcttctgtctccctggggtccctggcacatctgctttcccagctctgtgaccttaccagttctctcctcagcccttggtggtttgggagctgaatatatgttttaaacttttacataaacaactcaacctgttgcctctcacttccctccatcactgtggcttttaaaactcatgtattttgactcaagtgaaaaaaacacaaaaatccctcatcccagctaggttttgccccctgccctataagagagctatttccccctttctttcctttgaattcttctccaacaccatcccttcattcatactgccctgtgatacacttgaagctgtgttgattggacagacgttcatcagctaacttacctttacttggcaagatggtaaaatagtaacttagtgatgttactaaagtctcgaccattcacctttccatactgaaggaaaggtaaaaaggtttcttctatgggaaattatgcttgacttgcatactctagtttgatgaggataaaaagaaacatgtaattgcagtggtgtttacaactaattgatcacaaccaatcatagatttctttgttccttctccactctcaacacttcatttgactagaaaaaaaaaatgtattcaccaaggaacaggacccaatttgttcagacttttgttaagtttctttactaaggcaatttttgaaacaccagttactatgggatggtgggaatttttcatgcttaagaaatagagacttaggaacaaagaaacatctttctggagaagatgctaatgggaagttacctaaggcttgatgcttggttcaaccttatttaaaatttttataaatgacctgaaagtaggattttacagtgaaatcaaatgtcactacttccaggcagtgaaaggtaatctagaagaggtttaaaaaacacaaaaccggtcgggcacagcggctcacgcctgtaatcccagcactttgggaggccgaggcggggagatcacgagttcaggagatcgagaccatcctggccaacatggtgaaactttgtttccactaaaaatacaaaaattagctgggtgtggtggtgggtgcctgtagttccagccactcgggaggctgaagcaggagaatcgcttgaacccgggaggcagaggttgcagtgagccgagatagcgccattgcactccagcctgtcaacagagtgagactccgtctcacaacaaacaaacaaacacaaaaccacagaagggttactaataagcagggctgagaatactcagaaaactgacaggtgaggttcaacataatataaggaaatgtatttatggaagaattatcaactgatatgcctgaacactgttagaactcaggaaagaaacaagcattgctgagggggaggagagatcaatgtgctgctgtggccaaaagcctaattgccctgtgggcatcatcaggaagggcttttggagataacagagaacagcactttatacaaaaccatggatatgtcttgatcggattatctgtgtttctagtgaccttatttacaagatatatgataaagggaggaaaggtccagagaacagccaaaattatcaggggatggaggtatatccatatgaggacacatttttaaaatatagactctatcctgcaaagatgaaagcagaggggagttagatcaaatatccaatcaagagcaaggacccggtcctgtactactagctctagggctctatctcatagccttagtaaagaaagcacttctcatagcaaatcagaaatgtaaggagctcattgtctaagaagggatgccaccagaaactatacatgggtgcaggtttatgaggaatccttgcatgacggccttctacaaggaattatagaaaagtagggctacttggtaatatacaactgagagggtaactgtgtccctcaacaaactactccttagtgcctctttcaaaggcagaatgttgatctgaatggatcactggtcaagtatggcatctctaatgttcttgaagggggaggaaggagatctggtagctggaaaatataattattccacgttaggctcacctgaattggtttaaaatcatattctgattctcttctcatcccttcctcccctcacccaccatatacctctggcatccctccatgcaaagaaatgtcgaataggcatttcttggtataatttacctacacttgtgcttgtggggtgggagtaaaaacatatccagtaagtaccaaggctaacctcctaatggctggagctcagttaggtctctgggctctctaaaggagtccagagctcttgtccatgtcacaaatggagccttagaatttctgtctttccttatgtggcagctttggccattgtgtcttgaaattctccctcaggaaatgtgataggggatattatcccatgggattttagtaaaaatcagcttgcctaatttcatattcgtgttcataatgaagaaatgcgaagtggtggtagtcctcaggattaagtgtaaaggaaaatatgcaaggaaaaagtagcagtgtcagcccttttggactgcttatgatttctgccttagagctacaagacttggaacaagaaataacaatacctcaagaaaatgtctggagagatagcaccactgtccctcaaagacttcagccactgcacattaccaattcagctgtgaagcatttacaactgtattatctgtgattgtctgcatttcctgtttacatgcatgtgctggggatatgctttagtgtgtatggactagagtttaaatcctgtctttaactgggctgcaaggatggctatcaatcccaaattctgttttcaactcactggaataattaatctggtgttcctgatataaaacaggtgggttctattcacatgatggctgctctttaccatatatttcacctgaccctcattttgccatgggcctcaacctttatgtgtgctttttatggctctgaaaggactggctcccgtgtgtggaatatacaaggtataaacaccacccctcacatacccctgtaacttaaatgcttccatttaactcacttagattactttccccttagtggtaaacgggttgggggatgggtggtagtgcaaagaaggtagtttgaaatattgccatagtaatatgggaactttttattccaaccctttaccctggcttttttttctctcaatatttgcctaaaattctaaaatgagttatagtaaaatcataaaactatggaaacaactgaactttggtacacaagttagttcgatgacatcttgttatttgagaacagtaaaaggtgtgtcattgcctcatgatttatcatagtcattactaagggtttcagagagaatctggtgtgaagcactatcctttcagacactaaggcctttacctagttgctcccctaccttctgtcggaataggattattcccatgcacctctgggtaggtataggtagtagctattgaacggggattattttccccatggcacaaggggaaacactcttggataaccttcaacaatgaggctttgctaagtggccagacttgggatttgatcttcctcacttgttatttattaagtttaagccttattcagtatctctaattgcaatagatatagttcctgtgacttctaaaaaaaattcctgttaatgctgagacagtatcttttttgtcagtttattaatttttggtcaagatttagcctgagtcttaaagcatttatttgtggaatgccccactgaagtgtcttctccattggctaagtacatgtttaaagccatgggttttaatgtaagatactttcagtatctaattctgtttcccccactgagggtgctaaagagaattagaatctttactaagacatgctcaggaaagcttcacgagagaacagcttcaaaatcctccctatgacactgaatggtagtgaggaaagaattcttggggatgccagttacatacaatagccttattactgctaatcactgtcaataaaaggtcacttcattcacctctatttgaggaaaacaatgagaatgtatctgatgaactagaatccttgtcagtattgggaaattttaatgttgcaatatctagtcaaactttgagtgtactggttctgtgaaccacctgaaaaaacaaattaaatgtattaaaccataaaaaaaaaaaaaaaaaaaaaaaaaaa

SEQ ID NO: 814 - DNA, 14136 bp, Homo sapiens
ctcttcttgtacagccccggcagccctgccttcttggctggagagtatattcagggatttccccttaataatcaccgaccctgggagcactttttagtttccaaaataaaaatatgatcctcacccctcttgcttgacagggaaaggctctcgccggagcccaggggggagcagtagcagcggcagccgagcttcctagtccattgccagcgcctctcactctgatctgtcagcccagccgagggaacaggggggaaggagaaaaaaaaaagcagctgaaagacaatctgcttcatcctgattctgcggcattccaaactgtggtatccttgggggttctcttaacattgctatggtgcagaagatttaaaatcagctgatgttcacaaggaatagagtcacgtgatgtatgaagggaaacatatacacttctctgaggttgacaataagcccttgtgctcatatagccccaaactgtgcaagcagaggcgactcaacggctacgccttctgtatcagacacgttctggaggacaagactgcccccttcaagcaatgtgaatatgtggccaagtataacagccaacgctgcaccaaccccatccccaaatcagaggatcgtaggtactgcaacagccacttgcaggtacttggctttatcccgaaaaaagagaggaagaaaaagaatgatcctatagatgaggtgaaggtcaggcaccagatggataccatggcctttagcctgacagtgcccacgttggccttgaagatgcccaacggactggatggaatgtccctctctccacctggggcaagggtccctctccactacctggaaaccgaattggaagacccatttgctttcaatgaggaagatgatgacctaaagaaaggggcaactgtgagaaagaagttgcagagcaagttggcccagaatcggcagcgccagagagagacagagattttaaaagttcgacaagagcactttagtccccctcctgcaccttcacagcagcagcctccgcagcagcactcccacctgtcacctttatctacttctttaaaacctccagcgccaccgcagggttcagtctgcaagtcacctcaacctcagaacaccagcctaccaatgcagggagtggcacccaccacacacactatagcacaagcacggcagttgtctcacaagaggcctctgcccctcctgccatccagtagggctcccactgtggacccacccaggactgaccggatcctcatgaaagccacagccttctctccacacttctcatgtataagccgactgcagagactggtgaaactgtgcacccagaaacatcagttggacactgatctgtttccccatttaggtttggactggtctgaagagagcggagaggaaccagaggactcagagcaggcctcgccctaccaggttgcatggtccatccgggaaaccctcagatatcaaagacatgcgtcagatgatgatgatgcggagagtaggagctccagggtgactcaactttgcacttactttcagcagaaatataagcacctctgccgcctggagcgggcagaatctcgtcaaaagaaatgccggcatacgtttaggaaagctttgctgcaggcggccagtaaagaaccagaatgcactggtcagttaatacaagaactgcggagagctgcatgcagtcgaaccagcataagccggaccaagctgagggaggtggaaccagcagcatgcagtggaaccgtgaagggtgaacagtgcgctaacaaagcccttccattcaccagacattgtttccaacatatcctcttgaaccactctcagcagctcttctcaagttgcacagccaagtttgcagatggacagcagtgctctgtgccagtttttgacattacacatcagacacctctgtgtgaagaacatgccaaaaaaatggataatttcttgagaggagataactcccgtaaagttcagcaccagcagcagaggaaacccaggaaaaaaaccaagcctcctgcactaaccaaaaaacacaagaagaagagaaggcgtggacctcgtcgaccccaaaaacccattccacctgcagtcccccaagggaacctcagcatgcccgccagcgtctcactgccagtggaggcctctcacatccggagcccatccacgccagagctgagtgctgatgagttgccggatgacattgccaatgagatcactgacattccacatgacttggaattgaaccaggaggacttttcagatgtcctgccacggctacctgatgacttacaagattttgatttttttgaagggaagaatggagacctcctcccaactaccgaagaggctgaggagcttgaacgggccttgcaggctgtaacttctctcgagtgcctgagtaccattggggtccttgcccagtcagatggtgtgccagtccaggagttgtcagatagaggaataggggtgttctccacaggtactggagcttcaggaatacaatccttgagccgagaggtgaacacagacctaggggagctattgaatgggcgtatagtacatgataatttttctagtctagagctggatgagaacctgctccgttctgctaccttgtcaaacccacctacacccctggcagggcagatccaggggcagttctctgccccagccaacgttggccttacttctgccactctgatcagccagagtgcacttggggagagagccttcccaggacagtttcatggacttcatgacggcagccatgcctcccagaggccacatcctgcccagctgctgagcaaggcagatgacctaatcacctcacgacagcaatacagcagtgatcactcacactcctcaccccatggaagccattatgatagtgagcatgtgccgtctccctacagtgaccatatcacctctccccacacaacatcgtactctggtgataatatggcagctaccttttcagcagagatgcccatcatggcgcagcacttgctcccaacccaacttgaggtgccacttggaggcgtggtaaaccccagaactcactggggcaatctccctgtcaaccttggagacccctctccatttagcaaccttctcggcgcagatggacatcttctttccacttccctatccacgccacccaccacttcgaactcagagaccacacagcctgccttcgccaccgtgacccccagcagctccagtgtgcttccggggttaccacagaccagcttcagtggcatggggccttctgctgaactaatggcctccacctctcccaagcagcaactccctcagttcagcgcagcctttggccaccagctgagttctcacagtggcattcctaaggacctgcagcccagccacagctctatagcccctcctacaggcttcacagtaacaggtgccacagctacaagtaccaataatgcatcttctccctttccctcccctaactgagggtgtctgtgtgtttgcaggcaggtggggaacccagtgttttctatctttgtttcctctttagcacccctctccccttttcctaaagaagatataacagatggggatcagaggggcaccccccttcccagttcaatgagtggccctgcagtggacctcgctacagtgttcacatgtgctccttagcactggtgctcattccctcctggcaggcccactccgccccagtggtttccttagtggttcagcacagtgactggataggattgatttttagcagcaagtcctagaagtggaagatacctcagaataccagtgccctttactatttcctagtattcagatcagtgctttccattctgttgccaggtttttacataggtggttctagatagaatgatcttattaattgagttcctgtataagagacagcaaatggtgtgtggcaggtcaagattctgacctagcaccaactgctaaacaccacagtgaggccaggattccattcgtaattgtgatcatgtttaactaaaagaaaaaaatgtgtcttttgactgcctgtgagtatgcgtgtgcccacgcgtgtgtttttgtgcagtgcaggaagcagctgtcccattagtttgatttttttttgttctccccttccccctacttaatgagtataaaactcttacttttctcctgtcctacatctcacagtcctaataaggttggtccttcttttcctcaagtttcctgaatagggagggtggtggactggtcgtgtgagtagcacaacctttttctgctaaaagttagcccaagaagaaacagaacatagaaagcttggattcccgtcagtgaggtagggatgtcctaaaaagcttgcctgggatgactgcaggctgccggggttctggggcctgatggtcactttgtcttttcagacatttgtttgtttctaaatccctctctcatggaatacatttgcaagatgtaattaaagaaaatattttgatgtgaaaaagcaggataggtcagatagatttgaaaagatgggatctgtcaactccttgatccatcttttgcttttgaatttttcatgtttacagtagtgattctttggtaagatttgtaaaatgttaagacacttgtagaatcagtgtaccagttgtgaagtgatgtgtaatatctgaaggatacacattttaaagtttctttcaaagcagaatatggaaattagatataaattttattcgccctttggtccttttaaaataattcaagtacttgggtttaagtaaatttgaaaatagctttgggaaatgtttttaaaatgccaggattttaggggttaaagatcatatggggtagtttaggaagtttgtgactatgagatgaatttgtgaggtttcttgcctaccttttttcccccccagagaagggtggaactagattttaaaggcatctctactctgcttttgctgagtagtttcactgtcccttgagataccattggctatttatacctgagtctagtctaattcacatatatatatattttaaaagttgagagaacatacctattgatgtggttcaataattcatttgtcagggaatatttgatcttaattcctttctaataggtagtgattggatgtattttcctacttcctgtatgtaatctctttatgccatgctagttctaaccagtcccttcttttgaaagcttttctttctctgctttttaaaggaatgatggtgatcagcaggcattatgcagataccacgtgcctgaggttatggaggggaaatgtcacatgactgtatgaaatcattatatgccctattttgtatttattgatgtttctttttgtgggccaaaaatatgtttgtaatatatttagtttttttaaaatcatggtaattgattggaagatttatttttaatagctttgccttttttgcagagtgcaaaatttctaaattataacttatgtcataaagcaaaattatatttggtatcaccataaatttctattctgaatggtgagaacagataatttgaatatttctcacctgtgagtctatattagtaagcttttttattttaatgtactgtaatgaagtggtcacgagtagttacctcggctcaaaaatgtcatttagtttgttaaactattttcacaaccatcataagcataactagataactgtccattcccagcagttcagtttagtctccattgtgtatttaaaggttgtcgcagagcagcacattgacttcctcatcagccctttgacaaggaagggaaagtcgtgggtagtcgatttgaactttttctgtctacttgtcccctcatgttagctgcttgaaattcttcagttatgatacaaagctgagtttgcagtaagttgcacattttattgtttgcaattttctgttttatgtgcatttaaaagcccttctctgctttctagtaaggaggcatgaaattatcaggaatgttgctagttacagcttcacaccaaaaactttgagtaaatacattttcgtttggatgcccatgatgaaagctgaggaaagtggttgaggaattatcaacaacaaacttttcctcttattttatctagttcaaaacagatatcaaagtttgcaatttgctttgctcttgctgtttcttatgagtccctttttggaagagaggagaacatctataagcccagagagatctgtgtttttcttttacttaatagagccattctcgtctattagtaggaactttgctattaatatgtatagaaaggaatgaagtggcttttactccagaaatatgaaaattagtatcttttaaaatagcacttatgctatcacaaggcaatactggaatgaaaaacaaatcttatataaggtcctaaataggtagaaactagcttttattctagtgttgaacccaggagaaatagtggcaaagaagtttcactctgtttctgcagttctttgggactatttataaaggccagttagattgtgttactgtgatttaatttacaaagttgctgcagttaatggatacattctgtgctctgagaatctgaattccattctaatgtgtgatattcactggctatgatcagtagtatctgaagaaaagatgggctttttctcctttactctctctacataattattaatattattttaattaaagtacttaagacattgttttttcttctgtaaaaatggcttagcaatttgcacatctgggtaggttatgtagctagtaaacaactcaatagtaagtagcaattatacttaacccaccaagtgacagactatgcaatggaaaaattttctaattatcgtcacatagcttagacagcaaaggattattttctctggtgacctaccatgtgtgatataactgctttataaatgacttcctgagcaatttcatgttggcaggcagtgtggtgtgtctagtgcccctctatgagaagactataatttaatcagaaacaaatagtaggcatggggagcaagttggaaagtgaggttattattttttttccttaaaattggtgttactgtctttagtggcttgaggctaaagaaagctgatactttatctttgccaaataattatttataagatttatttttaaataagcccaatctctcacctgcagttaagaatcatcattttctgtgactgacactaaagctcttccttatcagagcttgttctcaatctgtgatcacagtccacagtggcaaagacaactctttgattaggaaggaaaccatgtttgggatgcacagaggtgccctgtccatacggttttcttcttacatgaaagaattgacctttctgttgacctataccattctgtttttataaagtgggattagaatttgagcatatctagtaaatgccgtgtggtcagtccgctgatgcttgcccgccgtctttgccgtgccttggcatcctaggggtgctggtgatggtcagtgggcatcatcggtcagcagtgcacgtgtaaggcaatctcctctcctccaggttagttcagaaggtcgctatgggttggtattgcaaaaagatgagtatatgaacactaaacttattaagaggtttgaaattcattaaaaattagttttcagtttcttcatctttcttttcagacttctttaaaaatactgttcttaatctggtatatatagaaatctaatattatggtcttctaaatggtcaacagaactctccagtttaatgaggcaatttagaggattccttgaaagaaaatttcatcatactgaacagtcctcatttgtatctcttttgttaccagtatttacattgttccaaggatttttttcctgacaaaaaatatatttctcgggagtggagagttttttatatatatatatgaaagaacatagatgtttccccccgcccaatacattaactgaatcttcactggcattctgtagaaaagttaaaacagtttaataatgtcttaacatctttatacattttcctatattctggaggaaaccagaatcatgtttagtagattaaagtaacattttaaatactacctttccaataatttgtaataaaataccagtgaaggacatgtttggatatctgttaagcatttttccctgactaatgaattaggaaagaaaacataaaacataaatgaatagttatgtctcttctaataaacagtgtcattaatgctgcagttgtgggtcaaacttagggagccttatttctaaatagcaaaaattctgttttcacttcagcccttatttttttttgttagtttttctctgcactgtgatacagagctaataagaggaaatgtgacgtttcagagagagagcaagcaaattgggtatgacttttttaccctatgttccccaatactggggatgtttggctactttgaacagcagtttttagtgatctaaagtttagatcaatactcgtataagagaaaaatctaactctcagtgagctccatagggcagcacagctttccatcttctctttcgccttcttgcgtctgcccaccacagtcccgaagaatgcacacgcacatatgatctgtacccatcccgcccgaagagtcatagaatcctcttctttcacttgtttcttttttcttcgtttgtttgtttttgtttgtttgttttttaagctggggaccactgaagtaagctctgtatgcacccaaagttccccttggaaaaattttcaacacgcagtgcagaaggctccagtgcagctaaatgccacaccattggttctacctgggggaatagactgatttgccctaaaatgactccaacctgcatcattaaggtacagttggctccagtggattagtgctgaaatgatgggaagtctgacacttgttgacattgtcttcatctgtttggaagggttgaatctgttcctctcaacagtgatagttcttttcactgtatagtattgagtatgtctcagggattccttgtggaaattagggcagtttttaaaataagaaaatagttttaaaagaaactaaaggtgactcatcattgaagagagcggaagaaagaggaaacatttggttttgtagcccacagtgtcttgcataggactttttcctttctcctccaggctctcatctcagcttcagaatacagaatcctttcccatcacgcacagctttaaaacttttatttaaaaatttccttccccaatgagctttcagaatacttattgtagattttaagagaaaaggtatattaatttatgctattaacatcacctcataaattataagttttatactaaagctgtatcgagtgtaatgaattatgttgcctatgtgtttaatagctaaatatatatgagcttttttttttttttttttttttgacaaaacaaactagtgaagcacctttttacactggatctctgccgtgtcaaggtgtatagctatcctttgctaccttgcagatatataaaataaaaggatatcctggggcctcaaaatgtagaacacctttagaccatttataactgttcctagaactgttgagaatcatgttctttagtaaatgatctgtggtttacacttaagatggctagaagcttagttacagggtacatagaaatacatagatcaagtaaaactccaactactgtagctggaatttgtaaactaagtttgtaagacctcttttatttcctatggagttattctttaatttacagtttattctgtaagttgggaagtaaaatagagaaaataataaatctagatgttctcagtgtcttattcaggaactttttatccctcctcactaaggaattcccactgtgactttaaaatagaactaaattacttgtgtgcatgtatatgtctgtattttttacacacatgcaaaaatatacattgggggcacgtgtgtgagagatatgaatgtgtgcttatataaaaatagataaaggtaaccgaatgtattgtagaaacatgatttatttagttgagggtattggagttactttctcattgtctctgttgtataaatacaccaaattaatcattatgttatcttatgttaaaaggctagctctgatatcatgtgcattttatgttaacctttggattaacttatattatgctatgttcataaaatgacatgagaaacaggaggttctaagatcagcctctcactttcgagcataaaaataagagagggagacagacagccccagacatgagctgtgtttatctattgtggtgatgggaccacagatctattgaatcttttttatgttaattatagatttctttatattcgagtaagaaaatattgttgatcatcttttcttggtgaagttaagaaaaagtataggcctttcataaacaatttttggaaggggctgctttgtttaaggagttggtgggatcatttcaccgtgcatatttcaaagctggggtgatttcatttatttccaaaatttttcaaaaaacttttactcagttctgctgttatttattaacttaagagtgctcccatccccatatttcagctataggaaaattgtgctacccctgattcatatggaattaaaaaaaaatacatccctttattttgagttttaagttgttattttgctatacatttattactggagtatctggtggtctgaaatagtcaaaagtagagttggtattaaatgttccaatgacatttatttttaatacttaaaaaatcatgtactttgaaatatgtcaaagcaacttctgataatatacctgaatttgtagttgtctcttgagcatcatttacttcatcttagatatagtgaagatctaggaaagctctatatgctgttcttttctacagttgtatttttgcagcatctcctggtttcattcactcttgttttgggatttttttttagatctgcatatttcttgtacatatgcatgcaaatgaaagaagggagtttgtactggtgccatttctcccttcagttgctggttaatgggatttgctagaaaaaattctcccggttgaagggtgaaaacagacccttatgtgtatatctgtacagagatgtgtatatgggatgtggtggcactttgctgaatgtgaacttgccttgtcaatggaaagattgaaaagtattatgtttatttatacatttgtataaatctatatatacacgtatgtatatgtgtgtgtatagataaagctatatacatatatttcccttaaaaatgtgtgtgtataataggtaaacagcctttgttaagcaagattaatgtctatggaaagttctggattattctgtaagccagaggaggtgacagtctagagtacatcatcagaacatactaaaatggaagtcctttggattatagttttgtttatggatattacacaatgaatgcttgtctgaacagttcttacttgccagttccactattcttcatcttcaccaccttctactggtcagtctttcatcacttaaaaaaaaaaaaaaaatcacacatcattgtggtttttttcccccttaattctgtctcttctagccagaagcatctggcttaagcatatttcatcaacttctctgttatttcttttaaagatctttatctctgaaattttcccagaagatacaagttttggtaatattatcaataggaattttgagacttgggcattcatctttgtctcaaaaacaaacagaaagccaaccttcaaataaaacaaatttgaaagttttagctcaataatttggggacattttacttaaattacaaaagaacataattatgattttatgatcgatattagtgttaggtttatttccacacttactgtcattaatttgtcatttacatatttttatttgctttgtagtttaatcataacttcaccatttacattttaatggaaagcatacaaggtcacatgttagcctcttgaattctgtaactaactcatttttctcatgatgaaactgctttgatgaattcctgtgtgatgaattctgctatatttccttttgacttttctcagtttgtgacattctgtattaactttgctgcagctctctagaaaacttgcatccctatatattgtgcctttaaagctcttatgcacacacagacaaaagtgtatatatacatgtcagagcatgtgtacatatgctttcgtatgtactcacacagtatgtctctagtatatattgtgggagtagatatatagatattcaaaggcaatgaaatattgctctccagatatatatgtatataaatagtgttgatataactgtatatacacatgtatatgtatgagttttaaatggcaatcttttacatttagcaaaatgctgcccctactggaatattgtcactgcagtggcagttgtatgtaatgatttaaaatacattatcaaaagttatttaaagaacatttaaagtctcatctaaagacatccacacactatttatttatcttccttttccttttattgttgtgtttttcttaactgaaagggagactgtcattttaaaaatgccatctgtcccatgagagtaagaaagagctggagattcacttgaggagctttgtgcatttttcctctctctgaagtggagatgttccacagaccagactgtttatttcacttataaagcaatcctaatatttccgttagtgtatgtcagccaccatctcctagatcaacttaattcaccaatttgcctcctcctttcattaataaataatgattattgagatcattttgcctgggggaagttaactactcccatgctgcagggaaatatatcacctaattgttattttgccttgttcaaaattcaaatttgaaagaaggcagctctctcatgaagctgtcttaagcacattttagttaagggccctcccaaactcttttttctttctttctttctttcttttttttttttttttgcgagttccaagttgcatgtgcttgaaatagatttaattcttattccccacagtttaggtatttttcattagtacatcaatttgacacactgaatgcaagactattaaggaagaacgattaaatattattttattttgtgaagagttggcagcagattacatctcaagaacttgcagagagaggaaggtagatggacaatcctaaattgtaagatgttacaaaaaacagtgaagtaagagtactcctgaagactaaaatagagaggctggggtttgagccattttactgagtagcttagctggaacctgatatcagaagtagcctttaacaaaaagcctcttggcaattgtatggtactaacaactagagtactgaagtgtaagttgaaaccaagttgcagtgggaaatcaaaggtgaggtagcttatttgaaaccagcaaatgagacaggttggacagttttaaaatctcttctaacaaagaaactgcacggtagcaaggactagcggttctcaaagcccttctttttcagtgttctcattcaccttggcacccaagtatgtttaacaggccatgcattaaaaataaatacaaaaatataaaagccgcttaaagggaacttacaaactgacaatctctcctctgtatttgtgttcatagtggctgggagtttaattatatgcacaaaagttaggagccacttgtttctgcacagactgtaggagcaagatgaggagatgggcaggttttggtaagagcccccagttctggtggacaggcatacttgtggcattgggtgcggcattgctgggaggaccacgtcttgggaggcgattgacttttggtttgtaatttccctttaaacaagaagagatggctcacattttccatatatatctcaatgaatgtactgtattactgttttaaaaatttgatgaaataataatgaattggtctccttttgttatctggtccttgtttaatttgtttaagggtttttgtatacaaaagtttacatttttatgtatatttttcttgtgtaaaaactgatgtaatatgtgtatgaaacactgtatgtattatctgtatatagtgtgacaaaatcatttttctttctttcttttggatgtattaataaatcttgctgtgaagta

SEQ ID NO: 815 - DNA, 11589 bp, Homo sapiens
gcggcggcggcggcggcggcggcggcagcggcggcggcggcggcggcgcgggggttgagtcgtggtggtgcggacgcgctcgtgctcgggaactatcggattaaacttgaatcgagtgaaattacacaaaggagcgccgcggaggaggcggcccggggacccggacaccctgaaactcaccagagacccgttcgcccccggccaactccgtgcccgtggattcagccccctggccgcagctgccgagccaactccggagcccgctctgcgttttgttttcccctcggcactaggcagcggaggagcccgaccgacccggacctatatccagactttgcctgacactgcagggtccaagagaattaaagaaatatggaatgacatgaagaagattagttaaggattataggctttgagggcaaacacctcagtgaagtgaagcacaggcaagctcctgagctgtggtttggaggagccgtgtgttggaagaagatggcagatccaggaatgatgagtctttttggcgaggatgggaatattttcagtgaaggtcttgaaggcctcggagaatgtggttacccggaaaatccagtaaatcctatgggtcagcaaatgccaatagaccaaggctttgcctctttacagccatcccttcatcatccttcaactaatcaaaatcaaacaaagctgacacattttgatcactataatcagtatgaacaacaaaagatgcatctgatggatcagccgaacagaatgatgagcaacacccctgggaacggactcgcgtctccgcactcgcagtatcacacccctcccgttcctcaggtgccccatggtggcagtggtggcggtcagatgggtgtctaccctggcatgcagaatgagaggcatgggcaatcctttgtggacagcagctccatgtggggccccagggctgttcaggtaccagaccagatacgagccccctaccagcagcagcagccacagccgcagccaccgcagccggctccgtcggggccccctgcacagggccaccctcagcacatgcagcagatgggcagctatatggcacgtggggatttttccatgcagcagcatggtcagccacagcagaggatgagccagttttcccaaggccaagagggcctcaatcagggaaatccttttattgccacctcaggacctggccacttgtcccacgtgccccagcagagtcccagcatggcaccttccttgcgtcactcggtgcagcagttccatcaccacccctctactgctctccatggagaatccgttgcccacagtcccagattctccccgaatcctccccaacaaggggctgttaggccgcaaacccttaactttagttctcggagccagacagtcccctctcctactataaacaactcagggcagtattctcgatatccttacagtaacctaaatcagggattagttaacaatacagggatgaatcaaaatttaggccttacaaataatactccaatgaatcagtccgtaccaagataccccaatgctgtaggattcccatcaaacagtggtcaaggactaatgcaccagcagcccatccaccccagtggctcacttaaccaaatgaacacacaaactatgcatccttcacagcctcagggaacttatgcctctccacctcccatgtcacccatgaaagcaatgagtaatccagcaggcactcctcctccacaagtcaggccgggaagtgctgggataccaatggaagttggcagttatccaaatatgccccatcctcagccatctcaccagccccctggtgccatgggaatcggacagaggaatatgggccccagaaacatgcagcagtctcgtccatttataggcatgtcctcggcaccaagggaattgactgggcacatgaggccaaatggttgtcctggtgttggccttggagacccacaagcaatccaggaacgactgatacctggccaacaacatcctggtcaacagccatcttttcagcagttgccaacctgtcctccactgcagcctcacccgggcttgcaccaccagtcttcacctccacaccctcatcaccagccttgggcacagctccacccatcaccccagaacaccccgcagaaagtgcctgtgcatcagcattccccgtcggagccctttctagagaaaccagtgccggatatgactcaggttagtggaccgaatgctcagctagtgaagagtgatgattacctgccatcaatagaacagcagccacaacaaaagaagaagaaaaagaaaaacaaccacattgtagcagaggatcccagtaaaggttttggtaaagatgacttccctggtggggtagataaccaagaactaaataggaactcactggatgggtcccaagaagaaaaaaagaaaaagaaaaggtcaaaggcaaaaaaagacccgaaggaaccgaaagaacccaaggagaaaaaagagcccaaggaacccaagaccccgaaagcccctaagattcccaaagagccaaaggaaaagaaagcaaaaactgccacgccaaaacccaaatccagcaaaaagtcaagtaataagaaacctgactcagaagcaagtgctttgaagaaaaaggtcaacaagggaaaaacagaaggttctgaaaattcagacttagacaaaacacccccaccatctcctcctcctgaagaagatgaggacccaggtgttcagaagagacggtccagcagacaggtgaagagaaagcgctacactgaagacctggagttcaagatttctgatgaggaggcagatgatgcagatgctgctgggagggattccccctccaacacctcccagtcagaacagcaggaatctgttgatgcagaaggcccagtggtagaaaaaattatgagcagtcgttcagtaaaaaagcagaaggaatctggagaggaggtagaaattgaggaattctatgtgaaatacaaaaacttctcttatcttcattgtcagtgggcatctatagaagatctggaaaaagataagagaattcagcaaaaaattaaacgatttaaggcaaagcagggccagaacaagttcctttcagagattgaggatgagctttttaatccagattatgtggaggttgaccggataatggactttgcacgtagcacagatgaccggggagagcctgtgactcactatctggtgaagtggtgttcacttccttatgaagacagcacgtgggagcggaggcaggacatagatcaagcaaagatcgaggagtttgagaaactaatgtccagggagccggaaacagagcgtgtggagcgacctcctgctgatgattggaagaaatcggagagttccagggagtataaaaacaataacaaactcagggaataccagttggagggagtaaactggctacttttcaattggtacaacatgcgaaactgcattttagcagatgaaatgggtttgggaaaaactatccagtccattacatttctctatgagatatatttgaaaggaatccatggcccttttttagtaattgccccattgtccacaatccccaactgggaaagggaattccgaacctggacagagttgaacgtggttgtgtatcatgggagtcaagctagtcgtcggaccattcagttgtatgaaatgtacttcaaagatccccagggtcgagtgataaaggggtcctataagtttcatgccatcatcactacatttgagatgattttgactgattgtcctgagctgcggaatattccatggcgctgtgtagtcattgatgaagcccacaggctgaagaacaggaactgcaagctgttggagggactcaagatgatggacttggaacacaaagtgctgctgacgggaaccccactccagaacactgtggaagaactcttcagcttgcttcatttcttggaaccaagtcgcttcccttcagaaaccacatttatgcaagaatttggtgatctaaaaacagaagagcaggtgcaaaaacttcaagctattctaaagccaatgatgttgagacgtctcaaagaggatgtagaaaagaacttggcccccaaagaagaaactattattgaagttgagctaacaaacattcagaagaaatattaccgagccatccttgagaagaatttcacatttctttccaaaggcggtggtcaagctaacgtacctaacctattaaacactatgatggaattgcggaagtgctgcaatcatccgtaccttatcaatggtgctgaagagaaaattttggaagagtttaaagaaacacacaatgcagagtctccagattttcagctccaggcaatgatccaggctgctggcaagctagtgctgattgacaagctgctgccaaaactgaaggctggtggccacagggtgcttatcttttcccagatggtgcgctgcttggacatactggaagactacctcattcaaagacggtacccatatgaaaggatcgacggccgagtaagaggcaacctccgccaggcagctatcgacagattctccaaacctgattctgataggtttgttttcctcctgtgtacaagggcaggaggtttaggcattaacctcactgctgctgatacctgcatcatctttgattcagactggaatccccaaaatgacctccaggctcaggctagatgtcatagaataggacagagcaaatctgtgaaaatctacaggctgattacaagaaattcctatgaaagggaaatgttcgacaaggctagtttgaaactgggcctggataaagctgtgctacagtctatgagtggaagagaaaatgctaccaatggggtacaacagctttccaagaaagaaatagaggatcttctacgaaaaggggcctatggtgcactcatggatgaggaggatgaagggtctaaattctgtgaagaagatattgatcagatcctcctacgtcgaacccacaccattaccattgagtcagaagggaaaggttccacatttgctaaggccagttttgttgcatctggaaataggacagatatttccttggatgatccaaatttctggcaaaagtgggctaagaaggctgaattggatattgatgccttaaatgggaggaacaacctggttattgatactccaagagtgagaaagcagaccaggctctacagtgcagtgaaggaagatgagctgatggagttctcagacttggaaagtgattctgaagaaaagccctgtgcaaagccacggcgtccccaggataagtcacagggctatgcaaggagtgaatgtttcagggtggagaagaatctgcttgtctatggttggggacggtggacagacattctttcccacggacgctataaacgccaactcactgagcaagatgtagaaaccatctgcagaaccatcctggtgtactgtcttaatcattacaaaggggatgagaatatcaaaagcttcatctgggatctgatcacacccacagcggatggccagactcgagccttggtcaaccattccggtttgtcagctcctgtgccaaggggaaggaagggaaagaaggtgaaagcccagagcacacagccggtggtgcaggatgccgactggctggccagctgcaacccagatgccctgttccaggaggacagctacaagaaacacctgaagcatcactgtaacaaggtcctgctgcgtgtccgcatgctgtactacctaagacaagaagtgataggagaccaggcggataagatcttagagggtgctgactcaagtgaagccgatgtgtggatccctgaacctttccatgctgaagttcctgcagattggtgggataaggaagcagacaaatccctcttaattggagtgttcaaacatggctatgagaagtacaactccatgcgagctgaccccgcgctgtgctttctggaacgagtcggtatgcctgatgccaaggccatagctgccgagcaaagaggaacagacatgctagcagatggtggtgacgggggagaatttgatagagaagatgaagacccagaatataaaccaaccagaacaccgttcaaagatgaaatagatgaatttgcaaattctccttcagaggataaggaagaatccatggaaatacatgccacaggcaagcacagtgagagtaatgctgagttaggccaactttactggcctaacacttcaaccctgactacacgtctgcgccggctcattactgcctatcagcgcagctataaaaggcaacagatgaggcaagaggccctaatgaagactgaccggcgcagacggcggcctcgagaggaagtgagagctctggaagcggaaagggaagctattatatctgagaagcggcaaaagtggacaagaagagaagaggctgatttttaccgtgtggtatccacctttggggttatttttgaccctgtgaaacagcaatttgactggaaccaatttagagcctttgccaggcttgacaaaaaatctgatgagagtttggagaaatacttcagttgttttgtggccatgtgtaggcgagtatgtcgaatgcccgtcaagccagatgatgaaccgcccgacctctcctccataattgagccgatcacagaggagcgagcctctcgaactctgtaccgcattgagctgctacggaagatccgcgagcaggttctccatcacccccagctgggagagaggcttaagctctgccagccaagcttggatctgccagagtggtgggagtgtggacggcatgaccgagacttgctggttggtgctgctaaacacggggtcagtcggacggattatcacatcctcaatgaccctgagttatccttcttggatgcacataaaaactttgctcaaaacagaggggcaggtaatacatcttccttgaacccactggcagttggatttgtccagactcctccagtcatctcatctgctcatattcaagatgagagggtactggaacaagccgaaggcaaagtggaggagcctgaaaacccagctgccaaggagaaatgtgagggcaaagaagaggaagaagaaaccgatggcagcgggaaggagagcaagcaggaatgtgaggcagaggccagctctgtgaaaaatgaactgaaaggtgttgaggtcggcgcagacactgggtccaaatctatttcagagaaaggttccgaagaggatgaagaggaaaagctggaggatgacgataagtcggaagagtcttcccagcccgaagcaggagctgtctctagagggaagaattttgatgaagaaagcaatgcttccatgagcactgctagagatgaaacccgagatggattctacatggaggacggagatccttcagtagctcagctccttcatgaaagaacatttgccttctcgttttggcctaaggatagagtaatgataaaccgcttagacaacatctgtgaagcagtgttgaaaggcaaatggccagtaaataggcgccagatgtttgatttccaaggcctcatcccaggttacacacccaccacagtggacagccccttgcagaagaggagctttgctgagctctccatggtcggccaagccagcattagtgggagtgaggacatcactacgtctcctcagttgtcaaaggaagatgccctcaacctctctgtccctcgccagcggaggaggaggaggagaaaaatcgaaattgaggccgaaagagctgccaagaggcgaaatctcatggagatggttgcccagcttcgagagtctcaggtggtctcagaaaatggacaagaaaaagttgtagatttatcaaaggcctcaagagaggcaacaagctctacctcaaatttttcatctctttcttcaaagtttatcttgcctaatgtctcaacaccagtgtctgatgcctttaagactcaaatggaactgctccaagcaggcctttcgcgcacacccacaaggcatctccttaatggctccctagtggatggagagcctcccatgaagaggaggcggggaaggaggaaaaatgtggagggacttgatctgcttttcatgagccacaaacggacgtcattgagtgcagaggatgctgaggtgaccaaagcttttgaagaagatatagagaccccaccaacaagaaacattccttctcccggacagctggacccagacacacggatccctgttatcaatcttgaagatgggactaggctggtgggggaagatgctcctaaaaataaggatttagttgaatggctgaagctgcaccctacttacactgttgatatgccaagttatgtaccaaagaatgcagatgtgctgttttcctcatttcagaaaccgaaacagaaacgacatagatgtcgaaaccctaataaattggatataaacactttgacaggagaagaaagggtgcctgttgtcaataaacgaaatgggaagaagatgggtggagctatggcgcctccaatgaaggatctacccaggtggctggaagaaaatcctgaatttgcagttgctccagactggactgatatagttaagcagtctggttttgttcctgagtcgatgtttgaccgccttctcactgggcctgtagtgcggggagagggagcgagcagaagaggaagaaggcccaaaagtgagatcgccagagcagccgcggccgccgctgctgtggcctccacgtcagggatcaaccctttgctggtgaacagcctgtttgctggaatggacctgacgagccttcagaatctccagaatctccagtcgctccagctggcaggcctcatgggcttccctccaggactggcaacagctgccaccgccggaggcgatgcgaagaaccctgctgctgtgctgcccctgatgctgccaggaatggcgggcctgcccaacgtgtttggcttgggcgggctgttgaataaccctctgtcagctgctactggaaacaccactactgcttctagtcaaggagaaccggaagacagcacttcaaaaggagaggagaaaggaaatgagaatgaagacgagaacaaagactctgagaaaagcacagatgctgtttcggctgctgactctgcgaatggatctgttggtgctgctactgccccggctggattgccctcaaacccgctagccttcaaccctttcctcctgtccacaatggccccgggcctcttctacccatccatgtttctacctccaggactggggggattgacgctgcctgggttcccagcattggcaggacttcagaatgccgtgggctccagcgaagaaaaggctgctgacaaggctgagggaggaccctttaaagatggagagacccttgaaggcagcgatgccgaggagagcctggataagactgcagagtcctccctcttagaagacgaaatagcacagggtgaagagctagactcacttgatgggggggatgaaatagaaaacaatgaaaatgatgaataaccagtaccagttccagttcaagtgtttaaaacttttgacaagtggtagtcctactgtttacactcacagttaatgttcatacctagttttataagctgttctgtaacatagtgtagcaaaaaaaaaagttcaagtcatgttatacaggtgtgtcaaaaggtatcttggtcattaagtattgtgcagtgcattatttattatccctaggagagatgaaatttgagaggtgatcatgtctttttaaggaaacttacataatgctctgctttttttttttctcttggtaccattggtattataataaagagcaatttgtaactgagtggcactaatggaagaaagtgctgctcaaaggaagtatgaagttatatatttaattttttaattttaatttttaatttttttgctgtgaaggtcaagctgaaatttaccatacatatcatacttgctcatttgtttccctttttgactgtatgggggttcccacactcgtgcatacacacacatccatacactctgacaatctccacgctagtgtgaacgcctctgtcccgaggcgcagcaataataaggcagctgttgaatgtgaagggtccctttggaaaattaacctactgggagggttcttgccagacagaactacagttccattgtctcgtggtcttgtaatgcactggtaaaaacaaaataaatagatgaataaataaagagtgagagaagagagaatcaggtaccttttttaaattaaaggactttgttactttagccacaaagctaaaacagcattacctcagctctaaactagccttgaagtttacagacatgactttgtaaatgtattgtttttctttgttgtgatgtccttttatttttttctttgaaaactgctatcatgtaagataaaatgtaaattgctgccaactgtagtaatgatgcttttaataaaagtgacccatgatatgcagagatgtaattatagaatgtagtatatagggaaactggtgttcactctattttttttgtattcgcaatagatgcaaatacagcattctggcttttgtacagtttcttgatatatcctcttatactagattagcttttggtaagacactaaactgtctcgaagactagacaggaaggaaaaccttgaattactctcacataattccactccagatatctcaacagaaatgcatacaaaaagctcctattactccctcaaaagggcatctgagaccgagaatacttagaaatgtgtgcagcgtgtgataatgtggtacactgaagaacaaaagggcaaaagaaaaatgaggctttaacaggcacaatatctaggtcatttatccttggttaatgggtagaaaaacacaatgcggtagtgtcagcaagggacacaaaggcactctggtgtcctgcagaccagcgctcgatgccagaaaccagtgtgtggaaaaacccatgtggaattgaaacagacccacttaagcacgcacgcgcgcacgcacggtctcaggagctactgatttgtggacccctttttgacctttggtatttaaagtaaaatataatttgagatctactgttttcacctttttatgtcacctgaaccaacacaaagccatatttccatccagttaaaaagcaggggaagggatgtggacgagagtgtttcgtgtgtgttgccttcctccacacccttcccccaggacgtccgcacacagtccacctccagccagtgtgctgccagacaggtggtctaaattcctcccagactgtgagattcagttcgtttatgccccaagatgaaaatatgccccttaatgattctgggaaagaaacaacctgaaccctccaccttacagatcctgtgattgcttttatttatcatcgtcgttgtctgctgaaagtgaatgggccgtgcacactggaggaaagtgccttgaagagaatattttttgaaagggaattatttgaacacgggaaagtgaaactaggtctgcatgaagtataggaaatttaagtatttaagtaacaaagatgttagcagggagaatttgcttaataaaatgagtcattaaagggtgttttttttaaaaaaaaaaa

SEQ ID NO: 816 - DNA, 3585 bp, Homo sapiens
ggcagagaggccgcggagggctggcgggcgagcgcgggcaggcggcgacgcgggggcaggggtggacggcggtcagagccgaacgcgagggcggcgcccggggactggagctgcgcgcaataggacagctggcctgaagctcagagccggggcgtgcgccatggccccacactgggctgtctggctgctggcagcaaggctgtggggcctgggcattggggctgaggtgtggtggaaccttgtgccgcgtaagacagtgtcttctggggagctggccacggtagtacggcggttctcccagaccggcatccaggacttcctgacactgacgctgacggagcccactgggcttctgtacgtgggcgcccgagaggccctgtttgccttcagcatggaggccctggagctgcaaggagcgatctcctgggaggcccccgtggagaagaagactgagtgtatccagaaagggaagaacaaccagaccgagtgcttcaacttcatccgcttcctgcagccctacaatgcctcccacctgtacgtctgtggcacctacgccttccagcccaagtgcacctacgtcaacatgctcaccttcactttggagcatggagagtttgaagatgggaagggcaagtgtccctatgacccagctaagggccatgctggccttcttgtggatggtgagctgtactcggccacactcaacaacttcctgggcacggaacccattatcctgcgtaacatggggccccaccactccatgaagacagagtacctggccttttggctcaacgaacctcactttgtaggctctgcctatgtacctgagagtgtgggcagcttcacgggggacgacgacaaggtctacttcttcttcagggagcgggcagtggagtccgactgctatgccgagcaggtggtggctcgtgtggcccgtgtctgcaagggcgatatggggggcgcacggaccctgcagaggaagtggaccacgttcctgaaggcgcggctggcatgctctgccccgaactggcagctctacttcaaccagctgcaggcgatgcacaccctgcaggacacctcctggcacaacaccaccttctttggggtttttcaagcacagtggggtgacatgtacctgtcggccatctgtgagtaccagttggaagagatccagcgggtgtttgagggcccctataaggagtaccatgaggaagcccagaagtgggaccgctacactgaccctgtacccagccctcggcctggctcgtgcattaacaactggcatcggcgccacggctacaccagctccctggagctacccgacaacatcctcaacttcgtcaagaagcacccgctgatggaggagcaggtggggcctcggtggagccgccccctgctcgtgaagaagggcaccaacttcacccacctggtggccgaccgggttacaggacttgatggagccacctatacagtgctgttcattggcacaggagacggctggctgctcaaggctgtgagcctggggccctgggttcacctgattgaggagctgcagctgtttgaccaggagcccatgagaagcctggtgctatctcagagcaagaagctgctctttgccggctcccgctctcagctggtgcagctgcccgtggccgactgcatgaagtatcgctcctgtgcagactgtgtcctcgcccgggacccctattgcgcctggagcgtcaacaccagccgctgtgtggccgtgggtggccactctggatctctactgatccagcatgtgatgacctcggacacttcaggcatctgcaacctccgtggcagtaagaaagtcaggcccactcccaaaaacatcacggtggtggcgggcacagacctggtgctgccctgccacctctcctccaacttggcccatgcccgctggacctttgggggccgggacctgcctgcggaacagcccgggtccttcctctacgatgcccggctccaggccctggttgtgatggctgcccagccccgccatgccggggcctaccactgcttttcagaggagcagggggcgcggctggctgctgaaggctaccttgtggctgtcgtggcaggcccgtcggtgaccttggaggcccgggcccccctggaaaacctggggctggtgtggctggcggtggtggccctgggggctgtgtgcctggtgctgctgctgctggtgctgtcattgcgccggcggctgcgggaagagctggagaaaggggccaaggctactgagaggaccttggtgtaccccctggagctgcccaaggagcccaccagtccccccttccggccctgtcctgaaccagatgagaaactttgggatcctgtcggttactactattcagatggctcccttaagatagtacctgggcatgcccggtgccagcccggtggggggcccccttcgccacctccaggcatcccaggccagcctctgccttctccaactcggcttcacctggggggtgggcggaactcaaatgccaatggttacgtgcgcttacaactaggaggggaggaccggggagggctcgggcaccccctgcctgagctcgcggatgaactgagacgcaaactgcagcaacgccagccactgcccgactccaaccccgaggagtcatcagtatgaggggaacccccaccgcgtcggcgggaagcgtgggaggtgtagctcctacttttgcacaggcaccagctacctcagggacatggcacgggcacctgctctgtctgggacagatactgcccagcacccacccggccatgaggacctgctctgctcagcacgggcactgccacttggtgtggctcaccagggcaccagcctcgcagaaggcatcttcctcctctctgtgaatcacagacacgcgggaccccagccgccaaaacttttcaaggcagaagtttcaagatgtgtgtttgtctgtatttgcacatgtgtttgtgtgtgtgtgtatgtgtgtgtgcacgcgcgtgcgcgcttgtggcatagccttcctgtttctgtcaagtcttcccttggcctgggtcctcctggtgagtcattggagctatgaaggggaaggggtcgtatcactttgtctctcctacccccactgccccgagtgtcgggcagcgatgtacatatggaggtggggtggacagggtgctgtgccccttcagagggagtgcagggcttggggtgggcctagtcctgctcctagggctgtgaatgttttcagggtggggggagggagatggagcctcctgtgtgtttggggggaagggtgggtggggcctcccacttggccccggggttcagtggtattttatacttgccttcttcctgtacagggctgggaaaggctgtgtgaggggagagaagggagagggtgggcctgctgtggacaatggcatactctcttccagccctaggaggagggctcctaacagtgtaacttattgtgtccccgcgtatttatttgttgtaaatatttgagtatttttatattgacaaataaaatggagaaaatgaaacgaaaaaaaaaaaaaaaaaaaaaaaaaaaaaaaaaa

SEQ ID NO: 817 - DNA, 3384 bp, Homo sapiens
agggggcggggcgggccaagggcgggggcgggaaggggcggagtcaggcggaagccggggagaaggcccaggaagtgacggccgcctcccggctaccggggacttctggagtccgagaagtcaacggcgcggttgctgcggccgccgcgctccccggcccgaggcgatggagaacggagcggtgtacagccccactacggaggaggacccgggccccgccagaggcccccggagcggcctcgctgcctactttttcatgggccggctcccattgctccggcgcgttctcaagggcttgcagctgttgctgtctctgctggccttcatctgtgaagaagttgtatcacaatgtactttatgtggaggactttatttttttgagtttgtaagctgcagtgcctttcttctgagtctccttatactgattgtgtattgcactccattttatgagagagttgataccacaaaagtaaaatcatcggatttttatattactttgggaacaggatgtgtgtttttgttggcatccatcatttttgtttccacacatgacaggacttcagctgagattgctgcaattgtgtttggatttatagcaagttttatgttcctacttgactttatcactatgctgtatgaaaaacgacaggagtcccagctgagaaaacctgaaaataccactagggctgaagccctcactgagccacttaatgcctaaagactctggggagcagatgttacctaaggtagtgaccctgcattgtggtgcctgagccctggcagaagctcttgtaaaatttgttaattgtttaaaccacttcttttggagagcaaggggaaggtcaagaaggcagttttatcaatattgtgtcagtcaccacaaagtaggccagataagttaaaaaaaatttttttttaaataataattgaaacttatctcaaatggagattttggtgggaggaggagaaaacaattgtttttaaatcacacagctcaacggttgataaatgattctgtcattctgttacaggtcattcttttactaggcttagcttccaaattatgctttatagctgtataaacatcgtgattatattcatctacttagaaattgttttatttttaaattaatttgcttagctgtttgttttgatgcttagattatgttctgttaatgggaatttaacatatttaagaaaccaatatttaaaatgttggtctaggtttttttccttaacatatattaccaggctttactgtatttcactcagccttaaatgttataatatttttggataacggttattaattctttgagaccttcgtatagcctataaaatgtatgggagatgttggtattttatgtgtataaaagcaacaatatcagcaacttcgtgtttatactgcaccttggttgttgatgtcaagtaaaaaaaagattgttttgtaacacataaaaaaatggaagaaactgataccacacctaaggaccaaagataagaaagactttttgcccaagacagtgaaagtaattataaaaacaagctttgaccacttaccaagtatctgaagagatgagttcatactatgatttagaaagtggttcaattcccctgttggcatatgattatttttactaaaattaatacagctctgtgggtcttccttagtgttttctttgaagccaatctgttttttttaggacaccagcctttggtttttcatctgttcgagatgcctcttctctgtctccttatcagatagaaatggagtcatgtgctgctgcttcatctagcagaggttggcctctggctctgacactttttgtcagttgtctttaggtggtcctgaatcttgggcccttttgattgtgaatactgtgtagcaggatcttgagagtccttgttcttacataggcattgctctagtttgtctttggcaaaaaaaaaaaaaaaaaaaagtaaatatccagggaaccctgcccagactaatactgttggtggcataagagaatcaagccattctcaagagataacttcataaccagaattgtctgttggctagcagctgtcacagataggcagggcacttgggatatgacctttctgtccaggtgattcacagactagacctttcttatcctcctcctagagttttgacttgggactctagtgttaagatgatgagcccgtgcatcaggtccttctgcactttggtggaagtctcccagggtaggtttcctatttgaaacagtggaatcatgtttccagtgataaagtttaatgacctcatccttttttttttttctcatctgccatttgtgtgtcttagatgggttttaattgcatgaatgtggctaatgtggttctcagaaattggtcagtatggcccaacatagcttctgctctgtcttactgactcaatacctttaggatttgtatcagagtttggatactagtgttagtggtggtgtcaccactacttaattgggagataatgaaaccaatcatggatgctgtttttattgggcatgtcatctaagagaggagaaatagctgggttttgggtctaattatgaataaggactgattcagaaaacgagtttatggtaggtagactaaagtttcacatcagactgtaccattgtgatttagacctatctaaaattcagagcatatcatctgggctacctcagggtcaccacccatgtattgggcttagtcaggattgacagatacattctcagctggcctgtcatataaaacatactgtcattgagcttaagctccgcttgttctgaggtttcacctccatgtgtttcattggtgcaaaagtggatctcttagttggtcacttaattctttctttttcagaaagatagtatgttcactggtatatttggtcactcttagaaccttccttcacattgttttttatgggacccatgaatggttagcctttcttttctattgtagaaggaaataaataggagtaaaaagaccattgtagtaaataagttcaaggggaacttgggaccagaaaccactgttatgtacaaaaaaatggcaaattcaataaactcaaatttaaaataatttttaaattaacagttatgataaattttatattttatacaaatagattgcttagaatggttctcaagaattataagagaaatgaactcacagtacaaaaattttataattactatacttgtgttttgtttgggggctgggaaatgtatttttacattgtagccaatcattttatatttgtcaatttaaatcttatgggtcttttttttttatctctcttgatgtcagattttatagtctttttaaataaatccatttaattaaaacgttaaaaaaaaaaaaaaaaaa

SEQ ID NO: 818 - DNA, 6928 bp, Homo sapiens
ttttgtttttttttttttggggtccggaataggcggagcttccggttccggtgggggccgtccctggcggcggagatggcggcgacagcggcggaggctgtggcctctggctctggagagccccgggaggaggctggagccctcggccccgcctgggatgaatcccagttgcgcagttatagcttcccgactaggcccattccgcgtctgagtcagagcgacccccgggcagaggagcttattgagaatgaggagcctgtggtgctgaccgacacaaatcttgtgtatcctgccctgaaatgggaccttgaatacctgcaagagaatattggcaatggagacttctctgtgtacagtgccagcacccacaagttcttgtactatgatgagaagaagatggccaatttccagaactttaagccgaggtccaacagggaagaaatgaaatttcatgagttcgttgagaaactgcaggatatacagcagcgaggaggggaagagaggttgtatctgcagcaaacgctcaatgacactgtgggcaggaagattgtcatggacttcttaggttttaactggaactggattaataagcaacagggaaagcgtggctgggggcagcttacctctaacctgctgctcattggcatggaaggaaatgtgacacctgctcactatgatgagcagcagaacttttttgctcagataaaaggttacaaacgatgcatcttattccctccggatcagttcgagtgcctctacccataccctgttcatcacccatgtgacagacagagccaggtggactttgacaatcccgactacgagaggttccctaatttccaaaatgtggttggttacgaaacagtggttggccctggtgatgttctttacatcccaatgtactggtggcatcacatagagtcattactaaatggggggattaccatcactgtgaacttctggtataagggggctcccacccctaagagaattgaatatcctctcaaagctcatcagaaagtggccataatgagaaacattgagaagatgcttggagaggccttggggaacccacaagaggtggggcccttgttgaacacaatgatcaagggccgatacaactagcctgccaggggtcaaggcctcctgccaggtgactgctatcccgtccacaccgcttcattgatgaggacaggagactccaagcgctagtattgcacgctgcacttaatggactggactcttgccatggcccaggagtcaggtgtttggagcgaggcagggcagttggcactccactcctatttggagggacttcatacccttgcctcttgtgccccagcaccttctctctctgccccccgcctaaagtcctgcattcagtgtgtggagtcccagcttttggttgtcatcatgtctgtgtgtatgttagtctgtcaacttcggaatgtgtgcgtgtgtgtgcatgcacacgcatgtatgtatctgttccctgttccttctgggtcaggctgtcacttccggctctcagccctatctcctgcaacctcagtgcctcagcctgagagagagatgagatgctcttggactccccactgcatctgggctgcagggccagagctagtctgaccattaggtcagtctgcctcctgacagtttttgcgtagtcaagctctaggcggtatgggaatggctaccgggactctaatggggtgaaagagaggggaggcttgcctttgagagcctatatagccttcctgtgagagaggattagatagggttccaactgggcctacaagctcaagccatacataaaaggaccttgggacataagaaccaatgattgtgcataagttctaaattagagacacatatagtttctctctttcagcaccagctcttgcccctatgctgggtaccaagggagttctcctagctgtggcttctctaggttctaggggtgcaagcctctgtgtgtttgtttgtgtgtgtctgtgtgtgcgtatccacactaggggtgcaagcctctgggtgtgtgtgtgtgtgtgcgtgcgtgtgtgtgtgtgtgtccgtgtgtgtgtgtgtgtgtgtccacactggccagcctccctacttaccaaggttctccactgcttaccttttccagtgggacagtacagtgtgagcccccgggaagtactgcctgacctatcctaagcttttacacttggattttagccatcatatgttggccaggtctcactgcagcctgcccgaggctaactggctagagcctccaggccctatgatgctccctgcccaggccatatcctttattcctgctgagcttcctggctgaatagatgaaatggggtcaagcccaggcagctcattcactacctgtgatccacctcagggcacgggcaaacacataggcttgcgtcttaaagccagctcctctgccagaccccgttgtaatgtgccacaacaccctcaatagtcagggcaactggtggagcatggaagtcgaatttccttttctgttaggagctactcctgggaacccctctcagggctgcagcttacaggtgggcagctgtgattgcacaacttgaagggccatcattcacatctattcagtgggagtggggtccctgggattgggcagtgtggtggccctgtgtctcctcacctctgctcctgtcttcatcaccttctctctggaagggaagaggagttggaaggtctctggttttcttttctttttttttttttttgccaaaggtttacttccagcatctgagctctggctctcacccctgaagctcagttatagtgcactgatgaactgagaggatgcgtgtggatgtgtgtgcatgcctgagtgcgttttttggggaggggtgtttatttttagtaccccattctggggttctctgatgcagtgtggatgtgaagatatggtaccttctcaagtgtagctctttcaaatatagtcaatgctgggaaatgtgattgcagtgatctctatctctccacttcttttgggaaagaggagcacaggagcggaggaaaaacttggccacagtcacacttggaaagatagtagattattttcgttctcctcagcaggtctgctgtattcctcgctcagcgctcaaagatgtgggtgatgtgtcaaggaggcatgcactcagctggtccttgctgagttatttgctgacacaggtctcactaaggtggctgaggggtgggagggagaaggctaatcttggaaccttcacaggattggccttgatccttgggtaacacaagagtgattcctgatttttagacacctaatatgtgcctagtgcttttctctttgttcctcactatcctgcaaggtaggtattctcacttacagatgaataaatgggctcagagagattaggtgattagtgacaatcagttgtaacttagcactgttaggctgcaaaccccttgctccttcctttccaccaaactatgttgattttccttccttacctccctccttgtaccacaggttctgtcctcaagatatcaccccactgggcagtatctgaaggcagacccagcccaagatggtgcagaatatacagctcagggtgaaagttcttctgggctcctgctaacaaagtcttggaaaaactgcctgggaagccatattatgaattagtgctagaagaagctgtggggggaactgagttctgtgtctaattgcattacttatgtgtccttgaataggacccataactcctcccggcatgcttttgcatctatagaactgaagctgtagttctagatggcactaagggtcttggttcatattcagctgctgcttccccccaaggaaaagatgaggtttttccccttcgattaccttttgagggatgtttaggctcaaattctgcttgccacagaggaaacatttctgctgtagttgtttacctccatcctagctggcagtgtgggacacacacatacagcaagtgaaggtgggggtttgggcctgtatagaggtcagctacgctgcaggctcatctattcacaccagcaggtacagagaaaactagtgttttgtaaagtcaaatatttgttgggggttggagttctggggttggaggaggggctgttctgggcatcagttgagcagatgcccaggatgcctgggggagaccagcttcccctacaaatcagagctctaaattacaaggtttttaccaacgtgaacagttgggggaagtcgtctgctctcatttgcgtaatggtttctgtcactggtgattagacacaggatgaaggaaaagaaatttgacaattaggaatgagcgatcattaatctgaatctgttaggagacagagaggggaaggatccttatcagtgggccagcccagtatggggagacactccctccctctgcccccagagactcctgggctacatcctctttcagtattgccacaagtgggcagagcttgtatttcttaacaaagattagggacccagttgccagcctgagatggatataggaacagacatctttgggcatgagccaacaaagatagaaatagatgagtgtcaggtacaagctataaggcaaagaataacagtggaaaagttttgacatgtgtttgccatttgtggaaaatgtttttgtaatagtcaacacccctcatagcccacctgtgacaagtacttgttacattccagcactgtagggcgtgaggaaaatctggtccttatcaaatcccaggagcttctgcttagttggggaagaaattacatgaagcaaccagaggttataaggccacacttgtatatcgtgcaccctgtgtggacaagattagggactgttgagagaggaggaaaccagtagagagcaaagctctacccaggctccttgtaagcctctgggctcccccgagagggcctcgctactctacgcttcctagcaacgttgatgtccccacaaccccacatcagtgcagctgtggctgtgtggaggggctctgaggcctctgaggccagatgtgtaaacagtgctgaggttcagtaataggatgagtcttcaggtgtggagcagcccaccttggctcttcccatgtctctgtgttacttctcatattctgctgtcctttcaaacttcaaggacagtattaatttatactagtatttcttcctcagttttgtgacttgaatgcagtgagtgccttagaggatccaaggatgaaggaatgcgggttggtggttctctctttcagaatgggaacttcccaaaaatggggctgcgtctcgcctctcagtaggttccctacctctgggtcttccacccttcaaaatctggtacagaatttagcaggggctgcagggaatgaccctcagggaccagtttcacccagatggggtagatgatgaggtatacctagaagtagctcagggctccagagtctggcctttcagctggtgtcttactcccctttgagaccttcagctgcttgtcttccactgcctgcatacttctctgatgtcttctcaaactgttggctctaaagggatgttccagcctccctctccagagctgcctgcagtttcccttattcagctgtctcctgcctagtctctccagcggcctccttaccaagaccctttttcctaaacagttgtccttccctcagaaactccatggctgcaagtgtgaatagacttgtctttaggatccctctctctggtcatccctgatcatcttagggccgtctcccttttctgatttttgacagctctgtttattttgcccatggctagtcctcttgttttgtgtctgctgtgtgttcttgcccttccattgtcagttctgtacatcctggttcagcttgtctcactgtggtagccccttctgcttgtcttcagccatcttggtttaatcctcataggtcatggatgaatggagccttgctgagcactttgagggcatttctgttgggcacaacctcagaaacgggaagtcttgaggcctgggggcgtgtggtcagtgaggcctccagaggtgggttaggggtgggcacctacaagggccagttgaggggagaggtgcagggattgctgaggagactttgtgagaatgatgtcaggcccgggaagctggtgtggaagaactgagctgtcagaaggagataccaatatcccctttgcagggtggtgatgggcatcaaacatgacgtggaacatgtccccttcatggagggtttccatctaaatgcatctgtgtgccttagggatcagtagttcaggggtggtggacttttttgagtgtctcctaatttctctgaggtgtctttggctctgtgtcaccaaatgtgcctgacctctgcatcccagtggttgctgaaagggaaacagtatattgcgtagtcagatgtcaggagtagagatcttaatgagaaaggccctggcagctggagagatgagaggacctagtggtcagcttatacccagactatctctccactcctccaagagtttgagtcccatagctgatgaaagaatttacatatgggctcccccctgctttcccactgaaaatctattctcatattttgggaaggagcatatgtcctttaactttcaatggtaaacaatctaggatagtgtttaaaggcatggattttggagtcacatatagttggtttgaatttctagcttcactacttaccagctgggtttgaccttggttgatttacttaacctctctgagcctcagtttcctcaactataataacatgggtggagggaggcatgttgaaaatatctacctcagggttgttggaataactgaaacaatgtttgtaaagctttagcacagtgcctggcaagcacttaataaatggctgtggtggtggtggttatatttaaaaaaaaaaaaaaaaa

SEQ ID NO: 819 - DNA, 6910 bp, Homo sapiens
ctcgtgatgccccgccccgtcgctcctgcgcctgcgccgtgcccaccgaccggcctcgagcgccccggcgggaggtttttctatatgagtggagaagacagctgttaccagggaggtcatacaacatttttttaggatgtctgaagatgaagaaaaagtgaaattacgccgtcttgaaccagctatccagaaattcattaagatagtaatcccaacagacctggaaaggttaagaaagcaccagataaatattgagaagtatcaaaggtgcagaatctgggacaagttgcatgaagagcatatcaatgcaggacgtacagttcagcaactccgatccaatatccgagaaattgagaaactttgtttgaaagtccgaaaggatgacctagtacttctgaagagaatgatagatcctgttaaagaagaagcatcagcagcaacagcagaatttctccaactccatttggaatctgtagaagaacttaagaagcaatttaatgatgaagaaactttgctacagcctcctttgaccagatccatgactgttggtggagcatttcatactactgaagctgaagctagttctcagagtttgactcagatatatgccttacctgaaattcctcaagatcaaaatgctgcagaatcgtgggaaaccttagaagcggacttaattgaacttagccaactggtcactgacttctctctcctagtgaattctcagcaggagaagattgacagcattgcagaccatgtcaacagtgctgctgtgaatgttgaagagggaaccaaaaacttagggaaggctgcaaaatacaagctggcagctctgcctgtggcaggtgcactcatcgggggaatggtagggggtcctattggcctccttgcaggcttcaaagtggcaggaattgcagctgcacttggtggtggggtgttgggcttcacaggtggaaaattgatacaaagaaagaaacagaaaatgatggagaagctcacttccagctgtccagatcttcccagccaaactgacaagaaatgcagttaaaaaccaaatttcagtattattggtgccaacatgtctatcctgaggacctttgctgctgttggacactccgtcaccttttggaacacaagtatatcaagatagtggctactgatgttcaagtgggattgaagtgtgataaatggatatattttgttgtttgctggggtgttcatggagatgttaagagattgaggccctgggctgagggtatataatgtatgtcaggtaaagtttgaagactgccaaggagcagattttctccctggaaatgtgaaaactgaacctataactctgataaggacttgagatgtgtagaaacgttgggttatggaagactagtttcttccataaccctgaattggagaccttaatgctaagtgtagattattgaggtttgttagtgaggaaaagaataagagttcagaagcctttgttatcagatagcgaaatcagggcctagtgaggagcacaggtcgactacataatggagtccattggcgaaccctattgcaatttggtccaactatatcttctggtgaaggaaattaatgatgtaagaaaatgcaagaggctcaacttctcttccaaaaatcttctggcttctgaactcttcctctgcctctctttaaataaataacacagaatttcaagtggtaggagacttattaagccagtcaccaagcttggtctgtcagcctgtcttctaacacctcaaagatcttgtgccctgtgctgtccctcccttgtaattatgaaaagttctttggtttctggggtgaattctacccatgtataatgaggaattctctcataaccttttttgtcttgtctgtcatctctgttcatcccttcctataacctctaggtaaaaagaaaagaaaaaaagaaatttcgagatattttcaacattgttagagtttgggctaaaatgagcaaggagaaaaaaaccaccaagaacatttcctggggcatgttccagttttgaggggtgatatatctgccagatagggggtatctgacccagtcttcttttcagctggtctctggggggagctgagaactcgcttgctacctcacatccttttccccagactttttatctcctatgcatccctttgctttctatagctggtgtttcttccccaaaatggcgttcccatgcttacctttctcacattctagacaatgatggacaaagacgcatgcaagactcagacccggggaatggtgtggtgctaatctcaacacctgacattcacagcaagcatggcccagcccaactgcatgtctatctcaaaccgcagaaaggctttaatactggaaaaaaagaattcaagactacaggcagctcccctctgtaccccaactcatttaaaataggaggaatcactttttgccttacttaacgcttttttctgagcacagggatgggcacctgcaccccagaaggtgtgagctgtctctctgccaggagctaaggttcattaggggattggatggtttatcacttctttctttctgagtttacttttagtaacttttattgatggctacctttcatgtccctgtctaaagagactttctctttcatacgtcttaaatctcatcaatgaaatccagtgaaacagcaccatttcttagtatcattaaataactagaaagtatcaagtattgctctctgctgctttatatcattaacatattaataataccaagaaggaaatactttgaataagtgtcagattctgatccagtattggacacctgtgatattggacacctgtgaggctgggataattacttttgaattacacctcttctctagtttctggaccttgctctgtcactttaacacagggtgatcaaacctgaatgaggatcagaactcacccaggcacatactaaagcaagattcctaaacctcagttccaggggtaattctgacatcacccgtccagcatagtcagctgaaattataaatctaagaaacagttacatcaagattctgctgtgtcatttaattctgaaactcccagtattctacccttcttcatcactgcatattaccccactcttccatcccaaattggctatcctttcagcccaccaacttagcggcagcactagggattcattataaggtaaatctggtttacataaagacctgaaggaggcctgtatttgaagctcacacttggtattggtatctctcatttttactgagccagtgtggaataccactgtatgtactcatataagcccttgacttttactgctcatcaggattggaatattactctagcagtcttcacacataggcaagttacagtccttttaaaaagtatctcatttccctataatggaacctaatagccaactttttcatagaaattgctagaagagtttgatcaactataaatgataaagtgtttataagcatagtcagtgtgacacagaaaccaatcttaaaattgaatttaatgttttatcatatcagattaaatattttctccatgtcttatttttactgcaacaagttagaaagtgggaacactttgattaatgtcttaaaatttgtgggccctcatttggataaaggcagcaatcctaaggactttttttttttttttaacataatctgagaatttctctgtagagcagagactttcaaaccttttggctgtaacccacagtaaaaaacgcatttatatcaaaccttagaatatgtttaatgaacaatacttaccattctgatgctttttattgtttcagtttttaaaatatgccagttgcaacccactaaattgatatctaccaatgggttgcaacccttagcttgaaaaaaacaccctcacagaggaactggtatttcttgaataccttctgtttgccaggcacttcaccaggcattttacaagtaaggaaactgggcttcagagaaaataatttgcagaggtttactcaactacaaaggggtgaagccaggaatgttaactaggtctgttgagctacaaaaacttttatgtctctcagactatacagcctctatacaaaattgagatgggggttgggggcaggggctcatgcctgcaatcccagcacttagggaggcagaggccagaggatcacttgagcccaggagtttgagaccagcctgggcaacatagtgagactcttgtctgtatgaaaaaaattaagaattagctgggtgtggcatagcacacacctgtggtcccagctacatgggaagctgaagtgggaggatcacttgaactcaggagcagccttggtgacagaacaagaccctctctcaaaaaaatatttaaaaaaaggtgggtcatccattctcctttaccaaacaggctttgaaatgacacattccattcatttgcatctttttaaaaaacttctgattccttactgagtgtccagcagcctcaaagtttttaatggtagctgatgcagacataaacagtgctcaatttggcccttaaactataaaatcaagaaagagtatttcaatcccatccacctgcctgcaagatttcttaatgttcactagttataaccattgtttaaacagtgctttttgtgtaatttaaaaataaactttaatgctttttaaaacaaatttatcataattcatagatcaaatgattatcctttaaaatgatacccttgggaaatcatgtacttactgtagtgatgctagtattaatattacttagaccaattttgaaactgttctttcagaattgcctccaaagacattttgcagatcatcccagaaaagggggtatgatggtgctgtgtagaactgaccagagttcctggaggattttgaggttatactgaaactgagtgctgtacagggagaattgcatgagtccagaaacttccttctgtgggctgcctgccttcctgccctcccttaagtgctctaagatttttgtacaggagtaagaatcaaatactggtaacatcaatcacaagaagttgaggaaacctgtaatatagctagataatatacaacgtttgtcttccatcagagtgcagaaaccaaaccatgctttgtgttaaccttaaatatgaaaggtgtttctcagggtcccctttgtccttcgttgctgccatatgaaatcttacaaggaaggatgaggaaaagcctggggggaggttctcctcggaaatgaggtggttttttttgttattaagtagaacgtggctgtggttcacaggtacttaacgaatgttagatgatgttcttaagtaatcagaggcctaataaaaggcaggggagtttctcttctagcctaaattaatattaaaagttcaggggtattttttgtttttaaattaatactttattgtttttaacaggtggttctcataatttacattcattaatttgatgcccttttacaaagaaacttcttaggtattataaaccatcaatgtaaaggatccacatggtatgtatccacattgctactctcaaatagaaatgggagataagaaatatatctgtgcaatattaaattgaaaaaaaaaaacccataaaaagtgtcaaaggcaaataatttgctctagatcacaaaactagttagcacaaggctaggattataaccagggtctaggaaaaaatcctgaaggtgatttaactgagtgttaggccctgtcaagccacctgctaaggctcatggtctttcagactagcttcaacattccaaatcaggcaatagctacaacggaaagataattggacggggaatcctgagatcagagtcctagtttggctttgtctcttgtagcaggattttttaaatcaggggcagctctcttctcccatcccagccatgaatctttcaaccttagtggtcaccaacttgactccattccttatatcaagacttgtcctgtcaattctcccttaaatgttagttgcatccatttctaaatatatccatggccatcaccctagtaaaaagactattacctcacaccccgcacttgatcttcccccaactttaagtgactcagttccttatatcactgccacaagaattaacaaccatgtccatctttcatttttctgctgaaagattttcagtggttcccactgaataccaaataaagttcgaatcccttagattggcattcacagccttctacgttctggccccagctttatctcttgaaactcactactcaccatctgacaatgccactaaaaatccacaagagtgattttaaggtttttctatggtgaaggttcaaactggtaataaaccatgtttacatttttctggtctaaaataatttctatattactttataatagtcagctgggggttatttaagctcttggacgagcctaaaacttgtatcctgaagaaaatatttttttccaccagaagaaattgctttcaatttcttaaccttcaaaacaatgtcagtgttgtcacctgtgcatttgatagccacagcacaagtattcttcaggagcataaatcctccagccttgaatggaccattgtccagctcctgtgaaaaacttaatatttgagaaagacattcaatggtacatgttttctgtacacttcatgagtagttgagattttcttgtattaaggttaatcactaaaaaggtgtttacttgggtttcgttaactaaaccccctaaagatgttttccattttattgttaaacacttggtgttagcaagggtcagcacgagaaaaggcccaatggcaagaatttctgcaaactctgtaaagcttactgaattcatttgtcatttattacattgctgagtggtgcttgaataaggaaacatgcaataaatttacttatttaaccaacaaa

SEQ ID NO: 820 - DNA, 7777 bp, Homo sapiens
agaggggaaaagaacgtcaggagagtgaacgggagcaaataaaacgctgtccattctgactggaagggccagagccgtgtctaagggcgggggccgggaggtggcccgcggtggtgtctctaccaggacgaggcctggggtatctgaagaggggatgacgtccaggcgctttgctaaagggaagccagaagggtatgagttgctagggtcagagatggggctttcggctcgagtctttccctgcagggcagagagtccgaagagcccgagaaggcagggaggacagtgggcctggtccttccccggccggcagagggagtcccgagatggaacgtccagctctcctctaacgaaaagcgtttgcatggctgtctcgccaattctgtacctcccggggctgaggaagagccgaggtgactagaagctagcgacaagtgccggccacctccgacgccaggcgccgggcttggagcccgacgggccgaattctcgcgagagcggccgccgccatttttccattgattgcagcgggctgggggaggggccgacgacgaaggcggctgtggtagcggcggcggcggcggcggagccctgggtcggtgtctgcgcgctggtgtctgaggcccaggctgaggcctccgctattgctggagcgcaggcggcggagaggatgactgccgctgccattctctcttgagctagcgagccgccgccaccctccaccctcccccggcagggcggagaggagcggccggagtcagcgatggtgcccggcgaggagaaccaactggtcccgaaagaggcaccactggatcataccagtgacaagtcacttctcgacgctaattttgagccaggaaagaagaactttctgcatttgacagataaagatggtgaacaacctcaaatactgctggaggattccagtgctggggaagacagtgttcatgacaggtttataggtccgcttccaagagaaggttctgggggttctaccagtgattatgtcagccaaagctactcctactcatctattttgaataaatcagaaactggatatgtgggactagtaaaccaagcaatgacttgctatttgaatagccttttgcaaacactttttatgactcctgaatttaggaatgcattatataagtgggaatttgaagaatctgaagaagatccagtgacaagtattccataccaacttcaaaggctttttgttttgttacaaaccagcaaaaagagagcaattgaaaccacagatgttacaaggagctttggatgggatagtagtgaggcttggcagcagcatgatgtacaagaactatgcagagtcatgtttgatgctttggaacagaaatggaagcaaacagaacaggctgatcttataaatgagctatatcaaggcaagctgaaggactacgtgagatgtctggaatgtggttatgagggctggcgaatcgacacatatcttgatattccattggtcatccgaccttatgggtccagccaagcatttgctagtgtggaagaagcattgcatgcatttattcagccagagattctggatggcccaaatcagtatttttgtgaacgttgtaagaagaagtgtgatgcacggaagggccttcggtttttgcattttccttatctgctgaccttacagctgaaaagattcgattttgattatacaaccatgcataggattaaactgaatgatcgaatgacatttcccgaggaactagatatgagtacttttattgatgttgaagatgagaaatctcctcagactgaaagttgcactgacagtggagcagaaaatgaaggtagttgtcacagtgatcagatgagcaacgatttctccaatgatgatggtgttgatgaaggaatctgtcttgaaaccaatagtggaactgaaaagatctcaaaatctggacttgaaaagaattccttgatctatgaacttttctctgttatggttcattctgggagcgctgctggtggtcattattatgcatgtataaagtcattcagtgatgagcagtggtacagcttcaatgatcaacatgtcagcaggataacacaagaggacattaagaaaacacatggtggatcttcaggaagcagaggatattattctagtgctttcgcaagttccacaaatgcatatatgctgatctatagactgaaggatccagccagaaatgcaaaatttctagaagtggatgaatacccagaacatattaaaaacttggtgcagaaagagagagagttggaagaacaagaaaagagacaacgagaaattgagcgcaatacatgcaagataaaattattctgtttgcatcctacaaaacaagtaatgatggaaaataaattggaggttcataaggataagacattaaaggaagcagtagaaatggcttataagatgatggatttagaagaggtaatacccctggattgctgtcgccttgttaaatatgatgagtttcatgattatctagaacggtcatatgaaggagaagaagatacaccaatggggcttctactaggtggcgtcaagtcaacatatatgtttgatctgctgttggagacgagaaagcctgatcaggttttccaatcttataaacctggagaagtgatggtgaaagttcatgttgttgatctaaaggcagaatctgtagctgctcctataactgttcgtgcttacttaaatcagacagttacagaattcaaacaactgatttcaaaggccatccatttacctgctgaaacaatgagaatagtgctggaacgctgctacaatgatttgcgtcttctcagtgtctccagtaaaaccctgaaagctgaaggattttttagaagtaacaaggtgtttgttgaaagctccgagactttggattaccagatggcctttgcagactctcatttatggaaactcctggatcggcatgcaaatacaatcagattatttgttttgctacctgaacaatccccagtatcttattccaaaaggacagcataccagaaagctggaggcgattctggtaatgtggatgatgactgtgaaagagtcaaaggacctgtaggaagcctaaagtctgtggaagctattctagaagaaagcactgaaaaactcaaaagcttgtcactgcagcaacagcaggatggagataatggggacagcagcaaaagtactgagacaagtgactttgaaaacatcgaatcacctctcaatgagagggactcttcagcatcagtggataatagagaacttgaacagcatattcagacttctgatccagaaaattttcagtctgaagaacgatcagactcagatgtgaataatgacaggagtacaagttcagtggacagtgatattcttagctccagtcatagcagtgatactttgtgcaatgcagacaatgctcagatccctttggctaatggacttgactctcacagtatcacaagtagtagaagaacgaaagcaaatgaagggaaaaaagaaacatgggatacagcagaagaagactctggaactgatagtgaatatgatgagagtggcaagagtaggggagaaatgcagtacatgtatttcaaagctgaaccttatgctgcagatgaaggttctggggaaggacataaatggttgatggtgcatgttgataaaagaattactctggcagctttcaaacaacatttagagccctttgttggagttttgtcctctcacttcaaggtctttcgagtgtatgccagcaatcaagagtttgagagcgtccggctgaatgagacactttcatcattttctgatgacaataagattacaattagactggggagagcacttaaaaaaggagaatacagagttaaagtataccagcttttggtcaatgaacaagagccatgcaagtttctgctagatgctgtgtttgctaaaggaatgactgtacggcaatcaaaagaggaattaattcctcagctcagggagcaatgtggtttagagctcagtattgacaggtttcgtctaaggaaaaaaacatggaagaatcctggcactgtctttttggattatcatatttatgaagaagatattaatatttccagcaactgggaggttttccttgaagttcttgatggggtagagaagatgaagtccatgtcacagcttgcagttttgtcaagacggtggaagccttcagagatgaagttggatcccttccaggaggttgtattggaaagcagtagtgtggacgaattgcgagagaagcttagtgaaatcagtgggattcctttggatgatattgaatttgctaagggtagaggaacatttccctgtgatatttctgtccttgatattcatcaggatttagactggaatcctaaagtttctaccctgaatgtctggcctctttatatctgtgatgatggtgcggtcatattttatagggataaaacagaagaattaatggaattgacagatgagcaaagaaatgaactgatgaaaaaagaaagcagtcgactccagaagactggacatcgtgtaacatactcacctcgtaaagagaaagcactaaaaatatatctggatggagcaccaaataaagatctgactcaagactgactctgatagtgtagcattttccctgggggagttttggttttaattagatggttcactaccactgggtagtgccattttggccggacatggttggggtaacccagtgacaccagcactgattggactgccctacaccaatcagaagctcagtgcccaatgggccactgttttgactcggaatcatgttgtgcactatagtcaaatgtactgtaaagtgaaaagggatgtgcaaaaaaataaaaaaaaacaacaaaaaaagctaaccttctattagaaaaggggacaggggaatgagtaaacttcttttattgcggacaaatgtgcacatagccgctagtaaaactagcctcaaacaggatgctcatagcttaataataaaagctgtgcaaaggccatgaatgaatgaattttctgtttatttcactgatgcacacattacctcattgacaattcagaagtaaatccaacgtgtgttgactcttggaaagcagcaaaaacaggagctgaagaaaagaaattcttggaaccagccgtaacccagtaaggaattgtgaagttgtgtttttattttgtttcattttttgcagagtattaagaacattattctggaacatcagaacgtttcccttagaccgatcccagcaggtggcagctcagattgctgcagtgttgtaattataactgattgtacttaagttatggatgtagagaatatgtttcattcatttattcagcatgtaaataaaattgatcctgttgagttatcataattgcagttcaactatctgccatgattattcttttcacgtatcattcattctgtacatttgtgtacattgagaagtatagcaatctatgtaaatgtaatcctcagtgaggttcctcagtgctaggtcccataggattgtcgttgcccttgttaatgaggtttctctgttcagcggcttcaatttttttctctttgtacatctagttttgaagatttacttcaagtttgaatcttctagaatgcttgtaagtccagttttaatttttagagtcaatttgtagttacatgtagtttaacttttgggaaacgtcttaacattgttctgaataaacttgctaatgaggtcaggtcatggtacagactgatgcagtcaacatgatttcattgcagagtttattagtatcagcaagtttttgctttgctaaataaaagtactcaatgaacacaattctacataaattttgacataccatctaatttataaaaatcaataaaaaaggttttggtaaaactttttcatgccagatgctgtttacaacaatgaacatgccaataaaacatttgttcattctgttgtgttattttagtcattaaacttctgtggatgaagaatctgggttaagaatagatttgtcatctttaaatatgacattttgtaatgtgtattggatatctcatttctatgataaaggtatatttacagtaaagttctcataagagaaatgaaaagctgtgttaatatctaactttggggaaccctgtcagtatttcagatccgatttttaccctttttttcttataagaaagataaaattagaaaatactgttagcaaatgtggctctgccatttgaatataatcaccgagaattccatgtcttaaaagtctcctggaatccacaatgaaaaaaaaaatcttttctaaggtatttttctggctaatttttatttgaagaaagctatagcatttagcgaaatttgactgaagtaatgttctgagtttgcattagtgggattggtgatgttctcagaagaaaattggaaacacttgtgatgaattgtctttcagatcacttagattttctgatgtaagaggacagctgtttggttctgatacaggcctgcttacttgggatgtagggttagtaaatggggtttctgctttaaaggactgacttgctatcacacaaaagaggcagacttgtaaacacaatgggctttggagtttggtctgattgggtttggtttagtattcctatgagcgtaaatggtaaaattcttctgatacccactctttagactgtgccttctgctctgttctttgttttatgtttaactgctgtttctaattgcaggtgtattacagatacaaataagagtaaagaaaatatatttcattatagaaaagaaaaaattaaaagcttcttgcttttcagtgcctgatagagtgaaaacacaaagttgcactttaataatttcaataaaagctaatctgtgtcagcctccctctgcttcagagagtcaggtgagcatccataacctaacaggcagagccctagcgatgtggatcaagtttcctgagcccgggggcggtggagcctcatgatctcttatcttttgaggctgaggcaggtcacatgcaacaaattgtgaccctgctccccacaagtcatgcaaaggttttgaagagcttttaccgtggggcagatgaacttgtgtcaaccatgcacaccctgtgagaaccaagtacctgtgtttctaaggcgggcactcaaggtgaggggtgcattctggccaaagaaacaaaagctgtggtttcaggaccatgccgtgtgtagctgatctgtacgggacgtgtatgtaaggaagagcaatcatgatagataagaacagtgtgtgaagcagccttcacactagagtgtttggtcatctcttataatgtaagggaaggtactttaaaattctgggaagatgcgatgaactcatgtcccagtcagaaaataatccaatgaaataagcattggttgccaggccacagttaggaattgtattgtgatacatctagaggccaagagagcaggagagagctaccaacttacactgtggtttaagctaaatgaccgcacagcatcatagcattgcagtgttgttactaaatctggaagtgacctgtgaatgtatggaatacaataaagtcttttattctggttcatttgctagtacttcctttttgattggatactgtagttcttcctctggattttattttgttcagcgtcaaggccctaattttgcaaatgtagtctaaaccacattacgtggactagaggatactctgaattagcaagttttttgtttgctgaataaaactattccatcttaa

SEQ ID NO: 821 - DNA, 7999 bp, Homo sapiens
cagtgatgagttctagaaggaaagaaaaggctgatgtgacagtgaggaagggatgagtggagacttctctgagacttcagtgattcctcttcctctgagctgagccaagctgagaagctgagaagagtaagatagggccgggaactcaggtccgttagtccgtcctccgaggtggggcgggccagcagaatggatttccgatctactctgtgagagcctcgcccaagaaagcccagagccacttccaagatccgcgctcccacggcgatgagaagcgttttcccccgggactgcttggcttaggactggggacccactggctttggagtaagccctggcacgggcctcgagggaagaaagaactcccgcgctccccacactccacagggcctgcgatcatctcagatgttccggttccacgtgcagaaaccccgccggtccgaggccccggttctaaaacggccctaagagtcaaggcttccacagctcgcctctgagggtggcaaagaggccgcgggggcggtgcctcgcgagacccaaacaagcccacgtggcaggggcggggctccgcgaaggcgtcacggcgcgctcgtgcgctgctgaggtcacgcgccggcagtacccttgcccgggggccgtaaagcgcggaaggtcgcggtctcggcttccccggaactttttgctcgcttcgccccgcccccttcccatccccgaaccccgctttccggcccgcggcgaccccaggcaactgttgtggctgccgcattgctcccgccgggctgtagctgagcgcggagcccgtggggaccggtgagatggaactgttttcccgcgttgagacgtgcggtccgcttgtgcttttagaactaaagactgctgcagagtccggaggaagaagtcacctagaaaaatctgggacagggcatttgagttcctgagatctagttggtgagagacatgatgttctaccggttgctgtcgattgttggaagacaaagagccagcccaggatggcagaactggtcctctgcaagaaacagcacgtcagctgccgaggcgcgttccatggccctgcccacccaggcacaggtggtcatctgtggaggtggaatcacgggcacttctgtggcctatcacctctccaaaatggggtggaaggatattgtccttttggagcagggcaggctggctgctggctctaccaggttctgtgctggcatcctgagcactgccaggcacttgaccattgagcagaagatggcagactactcaaacaaactctactatcagttagagcaagaaacagggatccaaacaggttacacaaggacaggctcaatctttctggcccaaactcaggaccgactgatctccctgaagcgcatcaacgcagggctgaatgttataggtatcccttctgagatcatctcccccaagaaagtggccgagcttcaccatctcctcaacgtgcacgacctggtgggggccatgcatgttcccgaggatgcagtggtgtcttccgctgacgtggctcttgccctggcaagtgctgcctcccaaaatggtgttcagatctatgaccggacatctgttcttcatgtaatggtcaaaaaaggtcaagttactggagtggagaccgataaaggacagattgaatgccagtattttgtcaactgtgctggccagtgggcatacgagctgggtctgtccaacgaggagccggttagtatcccgctacatgcctgcgaacacttctacctcctgactcgccccttggagacccctctgcagagcagcacaccaactattgtggatgctgatggaagaatttatattcggaactggcagggtggcatcctgtctgggggctttgagaagaacccgaaaccaattttcactgagggcaagaaccagctggagattcagaatctacaggaagactgggatcactttgagcctctgttgagttcccttctgaggaggatgccagaattagagactctggagatcatgaagttggtgaactgcccagagaccttcacaccagacatgaggtgcatcatgggcgagtctcctgcagtgcagggctactttgtcctggcaggaatgaactctgctggcctttcatttggtggaggagccggaaagtaccttgccgaatggatggtacatggttatccctcagaaaacgtttgggaattggacctgaaacgttttggagccctccagagcagccgcacctttctgcgccaccgggtcatggaagtcatgcctttgatgtatgatctgaaggttccccgctgggacttccagaccggtaggcagttacgcacctctcctctctacgaccggctggatgcacagggagccaggtggatggagaaacatggatttgagaggccaaagtactttgttccccccgacaaggacctcctggcattggagcagagcaagactttctataagccagattggtttgacatcgtggagtctgaagtcaagtgctgtaaggaagctgtgtgtgtcattgacatgtcctctttcacaaagtttgagataacatccactggggatcaggcattagaagttctacagtacctcttctccaatgacctggatgtgcctgtgggccacattgtgcatactggcatgctcaacgagggtggagggtatgaaaatgactgcagcatagcacgactgaacaagcgcagtttcttcatgatctctccaaccgaccagcaggtccactgttgggcctggcttaagaaacacatgccgaaagacagcaacctgctcctggaggacgtcacctggaagtacacagccctcaatctgattggccctcgagctgtggatgtgctgtctgagttgtcctatgcccctatgactccagaccacttcccaagcctcttttgcaaggagatgagtgtgggctatgcaaatgggatccgggtgatgagcatgacgcacacaggagagccaggattcatgctctacatccccatagagtacgccctgcatgtatacaatgaagtgatgagtgttggccagaaatacggaatccggaatgctgggtattacgctcttcgcagtctccgaattgagaagttttttgccttctggggtcaggatataaataacctcaccacgcccctggaatgtggacgagagtctcgggtgaaattagagaagggcatggatttcattggtcgcgacgccctcctgcagcagaagcagaatggagtgtataaacgcctcaccatgttcatcctggacgaccatgattcagacctagacctttggccttggtggggagagcccatttaccggaatgggcagtatgttggcaagaccaccagcagtgcctacagctacagcctggagcgccacgtttgcctgggctttgtgcacaatttttctgaggacacgggggaagagcaagtggtgacagcagatttcatcaaccggggagagtatgagattgacatcgcgggataccgcttccaggccaaggccaagctctaccctgtcgcctccctcttcacccagaagcgccgaaaggatgacatggagctgagtgacttacatgggaagtgatgccaccagggcagcctcacctcctccccatcatcttgtcctagagtgggcgtcaccttggagcttctcttccttccgcctctgttcctcttctggagcctttgcctcccatctcttatctccttgatataattttgaacttgacctactttaaacttttttgctctgcagccttccttgcccttccacctcctcctcctaatattcactctgggctcttcttcccttcccacccctcactcagcttctcgtggtggcaggaggtatgtctgacaggacagaagcaagctccactgtggacatgagtgatggtgacagctgctttcaaattctgcatctcaaggcagggcaagccggggtggtgcaggtctcagggcacgagtccctctcccttgggttccattttcttggagcagcctattagttctggtggggttgccgtgtgtcggatgcagccctgaggggcagctcgtgcctgcagcccggcagctcgttctcctgttctgctgtgctgtgggctggcactcgatacctctggcaagaggatgattatctacctcactgataagaggcatcgcatggacgttctctggtctgtagtggagacaagcagttaacctagcaccatcctcatcctccctgcagaagccattagcagacctttgggccagggcagcctccctataattttcttcatctcttgctaatctctataataaggttgctttttctttcttagttgagtaaacaagtaagccacagtgtttgaaagggaaaaaccatattgccttgtgtgttgcttttcccagtcaaaagggtctgaccttagaaagtccccaccagtgatgctgagtgttctgctatggaaacaatgctgcttttctctcagctgtccaaagttcagccgttcctccttccccttctcccagtgcgtttgactttgtcaggtcagcctcacttgtccctttcacagttggcccataaagtcatgtttctctccctttagaatagggaggggaagggatcaggtgtgttgtcctgggcctttcaaccttgcgggctgtgctgagttccagagagctgccggaattccaggtttgactctccagcacagagcagagctacacagaggtgacccacgttagtccactgagagttctgagtccaaagggtgtacgttgcataaggctagagaccgcttttcctcctttccccccaggctctttgtttccctccacccacccttccatatcctctggagcaggagacaatgtgggtgcccagaagtgccctgcgctttcaggcagtgtctctgttttcccaaggtgaaacttagatatcatggactgttgtccagcctcaatgcttcattttccccttgcatatcaactgccctaatctgactttttttaagtgcaaataaactgctataagacattttggttagtaaaactctagcctttggcgtgttggtatcttggaagcattagctctgataggtctataagtgtattaagggacatccttccatttcattagagcagcttaaaatgctcaggtgtctgccttctctggtgtttctttgggatctctgtttacccacttacgctggctccttctagacatttcttgccacttccccaactagaccactcctagtgattactgactttagtgcctaaacctttttggaaggttctggttggcttgttagaggagcatatgattagaattctgtttgggggtctagttgtcttggagcaagtatgtacttaactagccgagagatgctgcctctaggcagagaggaggagaggtgttgccggctggagggccaaccagtgaacaccagctgtgaaggccttgggagaggaggaacaggcccttgggcagatgcaggcattaccagcagggagcagacttacctccgaagatggagacaggtgactgagagctgcaggcctcctctgctcttccaaacacgtagcatttgcacccctccaaagccatctttgtaaaggaaaacgtatttgtaattgaatccagaagaatttagttacacatagacataactcttcaaccttaactatggcaatacatttgtgctttaactgttacatagcagtatcaccacttaccaggatccaaatcgaaataataaaagctgtctccatagtttaaaatcgaatagtgccatcatcacagtatattagtcaaatagaagcttcatcagaaatgtatcccacatagagttttaagacttggattctcttctgcccttgttaatctccaactaattactacagattgacacgtttttaattagctgtcctttgtaagaagtcaggaaatctgatgctgtgtccaaaattatgcactgtttgttgaagtagaaccagaaatcctgacctcctgttaaatgacatcagtttccccctctgagcaacagactgcttgtcttgctaggagaggaggatggggggctgagcactcaggctgtccattgaaaccccttgtccatgaatagggtcatactcctaagactgatggggtgttgatcttctaggacatcacttgtttattcagtgccccaaacacagatttctcttctagcactttagagttgatccttgaagtctctcctggttcattcaaatacaagctgtgtgagtctggtggttttctgtgattggtctaatgtgagctctttgaacagacagatctgacagtgaatgactctcccctgcttctggcataactgctttgcctctgtctagtgtccaagcatcttagctgttcaagaggagagggcagcataacttcctgaccaccggtgtcagatatcagagcattctggactcctgagaggcagtggcctcttgagtgaacaggggaggccagtagatgccccagatccagagccgtggctgcaaatccagcaggaataaggagggacaaccacagcctcctcatccatgtgtcatttccaagggtttgccttgtgtctcagctcattctgggcagcacgtttgtcttctgtccctagagatttgaaggattttggactcttgtgaatgggtgactggacttggctttacagagttgggtgcttttttctctctgcaattacctgtcatagcattttgtgctcaccacgaaggatggtctctgccttctcttgtcggtgtatgccatctgaacctaggaacacaaagtatattggcctcaaacggagacccagggttgccagttttccgtgggccttcccctcccttgaaatgtctttaattacctccccttcatcgtcaggccacgtgtgacttctgttcttagcactgccagggtcattgacttccatctaagcttgcatcaggaagatgttccttctgtgatcattggtactgaagccagaaaagctctcattcaggaactctgaagagcaaaaagggacaaacactaactgctgagctgggccatttgatctcctttcaccttgcattgctgtcacagcaccttgtatgatggcaggacaggctccagcagagagaactgcacagtgaccactgtatttttcacgctcttccagggatccctgtcccccgacattgaagagatctcattcaggccagagacacagagaccacatagcccagtgattaaaccccggtttcactctggccccaggagtggagcctggccactcctgtttggttctcactgggaggcccactggccttggatcatctcctcatgcacacccggagttttacctgcttgcttgctttcctggactgctgtttgcaagaaagtaactaaaacatgaaaagtaaacctccagcttccacagtatattacctgccgttgcatgcatttgaaagttagcctcctcccttgccaccgtcttggtggcagtagcgatgcaagaatgatgggagctttccgagagcgttcagtgtttcactgaagacaggacccatagccttcatttctggctctgtgtctcctctggcatatggacacatttcctggcatttgcctgagtctacaccactttttgagaacctgaaatagaagggaatcttctgtggcccacagtctccatattggcactagaagactggcctggcggaggaatttgcgttggcttgctttcaggggttagctacaagattcagctttatatctctgttgcttcttggccagtgtagtcaataagggtcttctttaacatctaagatagaggtttggttggccgggcgtggtcgcttactcctgtaatcccagcactttgggaggcccagtgaggtgggagaattgcttgaacccaggaggcagaggttgcagtgagctgagattgcaccactgcactccagcctgggtaacagagtgagactcttgtctc

SEQ ID NO: 822 - DNA, 2335 bp, Homo sapiens
aggttcgaatctccgccgcttcgcggttgcttctcaacgtccgggccgcatctcggcggcggcgagggctgagcgcgggagctgcctccgagccggagccccagccctaggccctgcgcgagctgccccgccctaccccctccagcgtcctgtcgcctcctcgcccgacttcggcctgtccctctctcacgcgctcagtcctcgctcttcgccccccgcagctatcggcactcggtctcccgcgcctggcgggctccgcccgagcctctgggcccatggccaagcggcgtgcggccgagccggtgacgttccacgtgccttggaagcggctcctgctttgcgacttcgctgagcagccgccgccaccgcctctctggatccggccgcccggggtcgcgcatgctgggcagctcctcggcgtcccagagcagcaccgaaagcgcaaaatcgacgcagggaccatggcagagccctcggcttcgcccagcaagcgccgtgacagcggggacaacagcgccccgagcggccaggagcgtgaggaccacggtctggagacaggcgatccgccgctgccgccgccgcccgtactgccggggccgggggaggagctcccgggcgcccggctcccggggggcggtggcgacgacggggcggggcgcgcaggacccccgcggggagactggggggtcgcatcgcgccagcacaatgaagaattttggcagtataataccttccagtactggaggaatcctttgcctcctattgatctggcagacattgaagatttaagtgaagacaccctgacagaagcaacacttcagggcaggaatgaaggggctgaggttgacatggagtcctgatgtaaggagccgaagcagtgggattggctgatttgaggagatgtctctaagtgaattctcgtattcttaagggaaaagttattttccatacttgaagttatatttccaaacctgagaaatgaagaaagattgttctgacattaaatacctacagttactactgaacctcttaataaggatttgtcaaggatagagtacagttgtaggggaagtattttatgtatgcattcttagagcaaaaagttttgtttaaattctagaattgaaggtactgatcttataaaaagaaattctagcagttttagaaataggtgggaaaaactcaaatattcctcctatctgcaccaaaaagtttatttgtggtatataaaatgaatattgttttataataacttgttaataaagtactttctaatacattctattgactctgttagttgaacaaatagctgacttgaacatctatgcaaacttaagatgggcgggattgttgtaaaagctattgttttaaaagagctttctaaatgtaaagtagtgataatttcaatttgggtagcgtgtttgcaaagcttccaatatttgatgttggttaagctctactatgggcaactgaagatggataaagaaaaatgaaaactgaatcggtgcctgcttccccctgttttcccaggattagaggaaaaaatttattgtataatcagcttcttggttttgaattgcttcgaggcatggttttattccttattactttagacctgtagttttcaacactgacagcactttaaaaatctttgcctgggcctcactcttgagagattctcatttaatagttctgaggtgggtcttggatataactatttttttaaacacctgtcctgtttccctccattcctctcatgtgcagacagggttgagaaccagtagactaatggtcgtttttcctgtttaaaggagataactaatttgagctgaagcaatgcttcttaattagctttgtttttgttttgctctgttggtggctttgttacaactgaattattgtgttattactatttcattgttaaagaaataaagtaagcaatttgtgatgtgagtatcagtgattaagttaactaacttttgtactgcatccagaatgttggttttgcaattgagtaactggttcttgcttgcattttttgttgttgatgacattagatccaaaattcaagacaaatggtaaatgccattgagagggaaagagaaaaacttgattttttttgtgtaatgaaggatttaagaatgggttgacattaataagaatgctttagaacagaagacaaactgtattgcattgtggtcagacatggttcaaagtcttgtactgccacttcctacctatgtatctttaagccagttatttttcatctccaagcctcaaatttctcacctgtaaaatgagaaataataaatagtatctacctcaaaaaaaaaaa

SEQ ID NO: 823 - DNA, 2179 bp, Homo sapiens
tcctgcctcggcaaccccgggccctgagggcaggccccaaccgcggaggagcaggagagggcggaggccggcgggccatgccctggtcgtcccgcggcgccctccttcgggacctggtcctgggcgtgctgggcaccgccgccttcctgctcgacctgggcaccgacctgtgggccgccgtccagtatgcgctcggcggccgctacctgtgggcggcgctggtgctggcgctgctgggcctggcctccgtggcgctgcagctcttcagctggctctggctgcgcgctgaccctgccggcctgcacgggtcgcagcccccgcgccgctgcctggcgctgctgcatctcctgcagctgggttacctgtacaggtgcgtgcaggagctgcggcaggggctgctggtgtggcagcaggaggagccctctgagtttgacttggcctacgccgacttcctcgccctggacatcagcatgctgcggctcttcgagaccttcttggagacggcaccacagctcacgctggtgctggccatcatgctgcagagtggccgggctgagtactaccagtgggttggcatctgcacatccttcctgggcatctcgtgggcactgctcgactaccaccgggccttgcgcacctgcctcccctccaagccgctcctgggcctgggctcctccgtgatctacttcctgtggaacctgctgctgctgtggccccgagtcctggctgtggccctgttctcagccctcttccccagctatgtggccctgcacttcctgggcctgtggctggtactgctgctctgggtctggcttcagggcacagacttcatgccggaccccagctccgagtggctgtaccgggtgacggtggccaccatcctctatttctcctggttcaacgtggctgagggccgcacccgaggccgggccatcatccacttcgccttcctcctgagtgacagcattctcctggtggccacctgggtgactcatagctcctggctgcccagcgggattccactgcagctgtggctgcctgtgggatgcggctgcttctttctgggcctggctctgcggcttgtgtactaccactggctgcaccctagctgctgctggaagcccgaccctgaccaggtagacggggcccggagtctgctttctccagaggggtatcagctgcctcagaacaggcgcatgacccatttagcacagaagtttttccccaaggctaaggatgaggctgcttcgccagtgaagggataggtgaacggcgtcctttgaagcaggatcagacccagccagcagagatggagagtgactctgttggcagaaggcaggcgaggataagctaacgatgctgctgtggcctctatgcactcagcaagagcgggacgcctgtgctgggccgggcaccagggatggtgctgagtcgggcagaggcctcctttcaaggagttcacagtgaacaagatgagaagggctgggccctggagggtcaagagccccaattatgtacaagacactttgggaggaaagaagactaccttttccccctgccattggtatagctggtgccccaaaacttccacctccctccctggccacctctaaaatgactggtataggtgctgccccaccccttagctcccctatcctgggctaggaggccacaggggctgtcctctagaattcttccttccctcccccacaccattcattcaattcatgaaacaaatctttgccaagagcagtttatgtgccaggaacatcattctgtccttgcaacctggaacaagaccagctaccagcctagcttcatccgctacttgcaccaaccagtcccgggttagatcccaaatgctagaagccagggatgcccaactctgggtggccccagtcagaacctctgggatctcagtgaagctggcctggcctctgctcctgctctcaaggggctgcttttcaaccaagagccttgtgagcctggtctgagccttgcacagccactgagtattttttttgccttagccagtgtacctcctacctcagtctatgtgagaggaagagaatgtgtgtgcctgtgggtctctacaagtgacagatgtgttgttttcaacagtattattaggttatgaataaagcctcatgaaatcctcaaaaaaaaaaaaaaaaaaaag

SEQ ID NO: 824 - DNA, 3711 bp, Homo sapiens
atcttgttcccaggggcagttggcggaagagatcgagctccctggctgccggctcgccttctgcgtggagttctcgcggtctgggtttcgctgtctgctcttggcccggggtcattttgtcggcgtcgggtgccctctcttgcccagctggggcacagcgaggcggccccttctcccgacgacgttcgatggagtagggtcccagaccgttgtcccgaagagcgagatcgagcttggccccctcccccccctccttccctccctccttccttccgccgcaacatggctaacaacagccccgcgctgacaggcaactcgcagccgcagcaccaggcggctgcagctgcggctcagcaacagcagcagtgcggcggcggcggcgctaccaagccggcggtctccggcaagcagggcaatgtgctcccgctctggggcaacgagaagaccatgaacctcaaccccatgatcctgaccaacatcctgtcgtcgccttacttcaaagtacagctctacgagctcaagacctaccacgaggtggtggacgagatctactttaaggtcacgcacgttgaaccatgggagaaaggaagcaggaaaacagcgggccagacagggatgtgcggaggggttcgaggtgttggaacaggaggaattgtttctacagcattttgcctgttatacaaattatttaccctgaagttaactcgaaagcaagtgatgggtcttataacacacacagactctccatatattagagcgcttggatttatgtatataagatatacacagccccctacagatctgtgggactggtttgaatccttccttgatgatgaagaggacctagatgtgaaggctggtggaggctgtgtaatgaccattggagaaatgctacgatcttttctcacaaaactggagtggttttctaccttgtttccaagaattccagttccagttcaaaagaatattgatcaacagattaaaacccgacctagaaaaatcaagaaagatgggaaggaaggtgctgaggaaatagacagacatgttgaacgcagacgttcaaggtctccaaggagatctctgagtccacggaggtccccaagaaggtcaagaagtagaagtcatcatcgggagggccatgggtcttctagttttgacagagaattagaaagagagaaagaacgccagcgactagagcgtgaagccaaagaaagggagaaagaacggcgaagatcccgaagtattgaccgggggttagaacgcaggcgcagcagaagtagggaaaggcatagaagtcgcagtcgaagtcgtgataggaaaggggatagaagggacagggatcgagaaagagagaaagaaaatgagagaggtagaagacgagatcgtgactatgataaggaaagaggaaatgaacgagaaaaagagagagagcgatcaagagaaaggtccaaggaacagagaagtaggggagaggtagaagagaagaaacataaagaagacaaagatgataggcggcacagagatgacaaaagagattccaagaaagagaaaaaacacagtagaagcagaagcagagaaaggaaacacagaagtaggagtcgaagtagaaatgcagggaaacgaagtagaagtagaagcaaagagaaatcaagtaaacataaaaatgaaagtaaagaaaaatcaaataaacgaagtcgaagtggcagtcaaggaagaactgacagtgttgaaaaatcaaaaaaacgggaacatagtcccagcaaagaaaaatctagaaagcgtagtagaagcaaagaacgttcccacaaacgagatcacagtgatagtaaggaccagtcagacaaacatgatcgtcgaaggagccaaagtatagaacaagagagccaagaaaaacagcataaaaacaaagatgagactgtgtgaaaatattttgtaaaagtggatcacattgaatcctataaatgattaaatctgcttttttcccccacgttgagattgtgcagtagttcgcactcctcaagctctccctgtaggctgcattttcatttcctctttcgtgtagggaagtgcctttgtaattccatttattgcattggtgttttcacccaattgttaagtttgatacatgatgcacagattgttcttgcatttttattgtttgtttttgaaatgtacagtctgtacatatgtcctgaaaatgttttaattcctttggcatggttgccatgttggttaaatttgtataaggcaataaactgccactaatctatttttgttttgtaggtgtgggattatggtttgtgtactgaagttagcatggctgtgcttttcgtaatagaatgctaaagactttgagaatggatcttggatgtctattataggagaagtatgtgctgccaatgtacaagaaggcagcattgtaggattaacattcttgtctactgtatattatcttggaaggctcttgttaatatgttacacttaatattctccacagttacctttagagagaatttatgagaagttagtttctgatgcagaggtttttaggctgtgatttcatcaaaagtccttttagcattctacctcaaagggacacttagtatgcctaaaatttattcacttagttttccttttttatttgaaaaaatacatgacatgtaatctttttttcttgaattctttctcagattttaaagtactatattaaagaaaaaaattaatgtctaaagcctagcattcttgcagaaccctatactaacatgtaatggggagagggtggggcagatgagtagagaaacagattcaagcctcaagcttccaaagcatttttataaatggaaaatccttaaattatgaaacagcttgatatagtgtcctttttttaaaattcagaactttttttattgataatggagattgctgtttgagtttttaaacttaatctagaacagaggagtattaaaagtaatgctgtgctgcattatttaagactatcagcaaattatttgatagattgttcttacaacttgtattctgattacagaaccatcatgagtgtggaataaatactggattaaatcctttatcctgggtcttggcttttcccccatttgttaaatttttttagcatatttatattgtggaaattgatgaaacgtcagtagagtcacactttgtgtacagggatgtcttagtgcccagatgacaagtgaattttggagaaatgcatagactgggattgggcatgtggtaatcaataatctttattagaatacttgataatggcagttccctttgtcagtggttgttacatgtgtcatttgattactttgttccatgtcaaagacgtttattgggataccttttacttggacaatatgttagcattttttaaaatttggacttgaaattctttaagataattcacccaattctttttagaaaagaaaatagaggcccaaagtaatgatgtcagtgctagggctaaaactcagtattctgacagtgtagtgaacctggcacgcacattgaggtttgttttatctcactggttatactggccaactaatgcgcactcagaagccaccttgcaaaaatgttaaatggagcaaacgagtacacttgcaagagtcctccatatgtgggcttaacatatgtaccactccattttagaaaaatctcattaaatgaattcttctaaaaaaaaaa

SEQ ID NO: 825 - DNA, 11416 bp, Homo sapiens
attcggtggcgggtcccggccgcggggctggcgggctgaggggagaaaagatggcggcggcggcggcagctggtgcggcctccgggctgccgggtccagtggcacaaggattaaaggaagcgttagtggatacgctcaccgggatcctatccccagtacaggaggtgcgggcggctgctgaagaacagattaaggtgctggaggtgacggaggaatttggtgttcacttggcagaactgactgtagatccccagggggcactggcaatccgtcagctggcatcagtcatcttgaaacaatatgtggagactcactggtgtgcccaatcagagaaatttaggcctcctgaaactacagaaagggcaaaaattgttatccgggagctattgcctaatgggttgagagaatcgataagcaaagtgcgctccagtgtggcctatgcagtgtcagccattgcccactgggactggcctgaagcttggccccaactcttcaacctgctcatggagatgttggtgagcggagacttaaatgccgtccatggagccatgcgtgtgctgacagaattcactcgtgaagtaacagacacacagatgccacttgttgctcctgtcattctcccagagatgtataagatcttcaccatggctgaggtgtatggtattcgaacccgttcccgagccgtggagatttttaccacttgtgcccatatgatctgtaacatggaggagctggaaaagggtgcagccaaagtcctgatctttcccgtggtacagcagttcacagaggcctttgttcaggccctccagataccagatggccccacatctgacagtgggtttaagatggaggtcctaaaggcagtgacagccctagtgaaaaacttcccaaagcacatggtgtcctccatgcagcagattctgcctattgtttggaacaccctaaccgagagtgcagctttttatgtgaggacagaagtaaattacacagaagaagtagaagatcctgtggattctgatggtgaagtcctgggctttgaaaatctcgtctttagcatttttgaatttgtccatgctctactagaaaatagcaaattcaaaagcactgttaagaaagccttgcctgaattgatttattatattatcctgtacatgcaaatcactgaggagcagattaaagtatggacagccaacccccaacaatttgtagaagatgaagatgatgatacattctcctatactgttagaatagcagctcaagacttgttgctggctgtggccacagatttccagaatgaaagtgcagcagccctggctgctgcagccactcgacatttacaagaagctgagcaaaccaaaaacagtggcactgagcactggtggaagatccatgaggcatgcatgcttgccctaggctcagtgaaggccatcatcactgacagtgtgaaaaatggcaggattcattttgacatgcatgggttcctgaccaatgtcatccttgcagacctcaacctctcagtgtctcctttcctcttgggccgggcactttgggctgccagtcggttcactgttgctatgtcccctgaactgatccagcagttcctacaggcaacagttagtggtcttcacgagacacagcccccatcagttcgaatttctgcagtgagagccatctggggttattgtgaccaactgaaagtctcagagagtacccacgtgctccagcccttcctccccagcatccttgatggcttaattcacctagcagcccagttcagctcagaggtcctcaacctggtgatggagaccctgtgcatcgtttgtacagtagaccccgaattcacagcaagcatggaaagcaaaatctgccccttcaccatcgccattttcctaaagtacagtaatgatcccgtcgtcgcctcactggctcaggacatcttcaaggagctgtcccagattgaagcctgtcagggcccaatgcaaatgaggctgattcccactctggtcagcataatgcaggccccagcagacaagattcctgcagggctttgtgcgacagccattgatatcctgacaacagtagtacgaaatacaaagcctcccctttcccagcttctcatctgccaagctttccctgctgtggcacagtgtacccttcacacagatgacaatgccaccatgcagaatggcggagagtgcttgcgggcctatgtgtcagtgaccctggaacaagtagcccagtggcatgatgagcagggccacaatggactgtggtatgtgatgcaagtggtgagccagctcctggacccccgcacctcagagttcactgcggcctttgtgggccgccttgtttccaccctcatctccaaggcagggcgggaactcggggagaatctagaccagattcttcgtgccatcctcagtaagatgcagcaggcagagacgctcagtgtcatgcagtccctgatcatggtgttcgctcatctggtgcacactcagctagaacctctcttggagttcctgtgtagcctcccaggacctactggcaaacctgctctagagtttgtgatggctgagtggacaagccgacagcacctgttctatggacagtatgaaggcaaagtcagctctgtggcactctgtaagctgctccagcatggcatcaatgcagatgacaaacggctacaggatatccgtgtgaagggagaggagatctacagcatggatgagggcatccgcacccgctctaagtcagccaaaaacccagaacgctggacaaacattcctttgctggtcaagatcctaaagctgatcatcaacgagctctccaacgtcatggaggctaatgccgctcgccaggccactcctgcagagtggagtcaagatgactccaatgatatgtgggaggaccaggaggaggaagaggaggaggaggaggatggtttagctggccaacttttatctgacattcttgctacaagtaaatatgaggaggattactacgaggatgatgaggaagatgaccctgatgccctgaaggatcctctctatcagattgatctgcaggcatatctcacagatttcctctgccagtttgctcagcagccctgctacataatgttttcaggccaccttaatgacaatgagaggcgagttctacagaccatcggcatctaaaaaggggagcctttctacatttgctccttctgggccagccgcaaaccattttgcagccctcactggccttgagatgcactttcttctcaacctaaagtggcatcttgacccttggcccttggcctcggcagtgacactgatgacaattcagaccaggctcaccggtgccgtcacttaggaatgctggaacaaaggacatttctcaaagttcccctgaagacatgccatctctagaaccttttttctccccgactctacccccacctctgttcctagagccctctgctggcgagtccagaaacattattgcccagaaggattatgtgtttatggattattttgccccgcctcaggagcgcaggaagtcactaccatttatattctaaaacagacctatctatgttcataggacttctgatgtgttcagataggaatcctcatgagagatcattatgctttgtgccctggaccactgctgctctgggttctcaggaggaacaggcaagagcagcttcattctaagcctttccagtgacctcagccttgcttctcttctacaacactaaggctcctctgtcagaggaggtcgtcttgtttttgcttcattgcatgacataacccttcccctcaagctgttcctatatatacatgcacacacaaaataagccagacagatggcaatttgatcttccttttttagaaaaaaaaaaaaaaatggggaaaagggattttttttaaatccacctgacccaactatatttaatatgcctctcccacacattaccacagagtctgatattcaaaggttatcccctttccctcaggaagcctctaaagtgcttaagttgtagccctcaaatttgcaacatgtatttttctaggacagtaaagtaatctttacaaatgaatttagttgcatggtataaggtgtctcagcacctgtttgccttctattccctttagaaggtaagtaaaagtaatgggggaaaggattaggtggagcctgtctaaacattctagtgtgtcttggcaaacatagcctgaaatgattcttaaagaactggcattgtttaatcaaatatttttaagggagattccttaattgggaagtttagtctgtttggggttcaaagagtaaatgaggattagaaaatcatggagagaggctgggcgcggtggctaacgcctgtaatcctagcactttgggaggctgagatgggcggatcacttgagatcaggagtttgaggctagcctggccaacacagtgaaacctgcatttctactaaaaatacaaaaattagctgggcatggtggtgcatgcctgtaatcccagttaacttgagatgctgaggcaggagaatcgcttgaacttgggaagcagaggttgcagtgaaccgatatcacaccgttgcattccaaggcaagactcaatcacacacacacacacacacacacacaaatcatggggagaaagatgaaacctgtgttcccctttttttggtagtgcccacatctggtgccccatttttaataaccacaggatatttctttagattgatattctcacaaagaagaaatagaatataggctgggcgtggtgtgtcacacctgtaatcccagcacttacggaggccgaagccagcggatcaccagaggtcaggagttcgagaccagcctgaccaacatgatgaaaccctgtctctactaaaaatacaaaaattagccaggcatggtggcatgcacttgtaatcccagctactcgggaggctgagacaggagaatcgcttgaacctgggaggcagaggttgcagtaagccaagatcgcaccattgcactacagcctgggcaacaagaggagcgaaactctgtctcaaaaaaaaaaaagagaaagaatataaagtgaatctgaatctccactcaaggggatggccccaaggatattgtagctggtaatttcttcatgccactaggtgtccccagtgttcaacctccatgactgagattggaagaagtagagttaaaagtttttactacctttgagaagcctgcgggcatgttcacagtcgtcccatgccagccaggttctgaggctaactgcttgtgcccctgctgcttcacatggcattgtgggagttgctgatactggggaaatgatggcagatctgaccaagtggtgctgagaaaaccaccctcggccttgcagactccatagtttatctcaaggcagtgccagtcggatttggtgctaaaggcataaggccaagtcagcctctgatattggcacaaaagaatggtctcatgccagtagcattgaactgctgagcttgggaaggcttaaggctcccacacacagactgagaatgatgggggtccctctgcgtctgctaattagacaaacattctatatctagtgccaaaagtggtcctaaatcctttggcaagggtcctttctgctctcatgctgatttgggggaggactgggcatcctgcctcaggagaacttgagtcctgaggaaagggccctagtaacacttaagggctacccctggctaacagatactcggctgtgggtgagagcagaaggtcttggacccctcgatgtgcaggtacttaattgtgtttccagtgcattttcatatacattatcccatttaacctttataacaggttcacagagtggatattcccattctgttgatgagaaaaagagtggagagactgtgtccagtgtcagcaggaagaaaaaagatctgttggaggccagtacatgttgacagaaactctagaccatattttgtctcctgtctttggccaaagagaactagcttcagtctgaaaagggcagggctaagtggttacaaggaactaaaaagttcaaggtaagacaaatgaggtaaaaataaaaaagagcacttagctgctctgagacattttagtctcctgactggtaaacagcagctggggcaccaaggggctcccaggagtttgtcgagcttttattggagtgaactgaaaggaaaatggaaggaatgctataagactgaaaagaagttaaagccctaggaaggaagctgataacacaagttacagacgtatatgtgacattgatttgggagaatgaacctacaacaaatgacccaaaagcacctaaataagagtgacgagagtttaacagacattcattatggacttcagagaaaatgatgctaaactggtcttagaatcttctttaattttgttaactaggtaaataatctggacattttagtcaaagcattagacagacagagaagttggtaactgaccactaactaacaaactataaattcacccattgtgggttgacctggtaagttcccccagggctgtgtccttggcccctcctttgatattagtgacagatgactttttttatgccttacccattccacaaaagaatttgaagccatttacacaagagatagtactagtaaattaggagtgctgatcaaatttttagataataagaaacccttaggaaggatgacaatttagaatccaaatttaggatccaaacaaataccattacaaactataaaaatgagcagaatctaaatgtaacatttcaataaatgcagattgataataacatctgtgcagagttgaggactatagagtactgtgctgtcactaacagtattgtgtgctactaagagtttaatggctgggtgtggtggctcacacctgtaatcccaacactttgggaggcctaggtgggtaaatcagctgagatcaggagttcgagaccagcctggccaatgtggtgaaaccccgcctctactaaaaataaaaaaattagctgggcatggtggcacgtgcctgtaatcccagctactcgggaggctgaggcgggagaatcacttgaacctgggagacagaggttgcagtgagtcgagatcacaccattgcactccagcctgggcaacagagcaagattctgtctcaaaaaataaagtttattatgccaggagggccaggtgtggtgccacacccatgtaatcccagcactttaggaggctgaggagggcagatcacttaagcccaagagtttgagaccagtctgggcaatgtggcaataccttgtctcttaaaatttaaaataaaaaaaaagtttattatgccaggaactgttaatgtgtccaaaaaaactccagtgtggttctaggatgagataataaaaacaggttgtctagggtagtgtggaaggtcctttcagtcttcctgtgcctatcagtgatcctcattgccatgttcccttctggtgctcaaccggaggctccctgacagatgagtcctctgccagaggaaggctaagatgtagaggacaaatcgtgtcaaggaaaagaagcttgaaggagctaagaatgcttagcttagagaagacaagaggaaacaggacatggctttgggaagttcaaggatggtccagtgaaatacatactatacttttgcaccccagctaagctgacccatgatcagtaagtaggaaataaaaggccaatttctggctactcttgcccccaaccccatttcagtgaactatgaacctctattagatatgcaaggccggtgctaaatgctggagggctttggccctttccctcaaggagctagtctagtagggggtcagaaatacagatgggcctgaacataatgatggtttgacttccagtttttcaactttaggattgtgcaaaagctatacacattcggtagaaacagtacttcaagtatccatacaatcagtacagtattcaataaattacatgagacattcaacactttattataaaataggctttgtgttagatgagtttgcccaactgtaagctaatgtaagtgatctgagtaggtttaaggtagcctaggtgtattaaatgcatttttcacttaacggtattttcaacttttgttgggtttattgggatgtagccccattataagctgaaaagcatctgtagtataataaatgtggggagtgctgtgagagaaataagtgtactgggtttagttcccactgcccaaaaaaggaactggctaatggtaacctgggggaggaagtcgggtaagttgcatggagaaggcaacccttgaacacttgcaaggagctaacaatacctgcttctggagtatttaaacgccagtgggtatgctaaatacttttacctcagaccacctactaaccttacaaagtagtccactttgctcacccagttttacagattgatgaaactgaagcagacagatattgttaacctatcaaaggtcaccctgcaagtgtgtgattatagtccaagcagcttgtacttgttgcctatttgttttgcctttcctgtgcatttgccaggcagatgagagtggggtaagacattgcagagaaaaagtaagaaaaggccgtcatgaaacaatttcattttcagaccttataagcacgttacaagtactgatatttatgcttaagttcacgggagtcctggccagaaataaagctggaaggacaagtggggggcagattgtgaaggatccttcaagacctgcttcctctagagaatgggagactacccaagataactaaacagggaagtgatcaggttttgtgtcttagaaaagtgttgcagtgttgatgcaaatgtgactagaagggtgacttggaacctggattgaaggggtgggagatgggagaaaggaatgcagtctggcagcagctacagcagtccaggtgggaaaacccagagcctgaactaaggttgtaactagaggggatagggtggaagagctggattagagatgttgacaagataaagtcagtaggacttaaagactgacaagtaaggattttccaaaagtgagagctgtggaatgaattgtcttaaaatgttgcagtgagttcctcctcatcaatccaagtgctcgatcagaggctagacctttagttagcagtcacgggaaaattccccattctcacggggatttagactaggtcttaaccatactttaccaagattccagtagcaaagcacccaaaagtaatcgcaataaaattccaatttttgtaggccgggcatagtggctcacacctgtaatcccagcactttgggaggccgaggcaggcggaccacgacatcaagagttcaagagcagcctggccagcatggtgaaaccccgtctctactaaaaatacaaaaaaattagctgggcatggtggcgcatgcctataatcctagctactcaggcagctgaagcaggagaattgcttgaacccgggaggcagaggttgcagtgagccaagatcatgccactacactccagcctgggcgacagagcgacactctgcctcaaaaaaaaaaaaaaacaaaaaaaaaaacaagttttgtgaatttaagtttccctaatggatggtacaggtcaacatttgccatctaatgacacttacattccagttttttccttttttgagtaactgggaaaagggtggcattactgctggcttcctaaaattgaaaagtatactagggtttttaaacctgtgtagaatacatgatatggtagcaaatgtgctgtaggaagaaaagcaatgaggaactactggcctgactaggaggcctagaagtccctcccaggcttgagttgttctgacttggcatgattacatagctgcggcaagtgacgtttccttcaagccttggttccctcatctgtaaaatagggaactaatacctacctcacaggattgtagttagaattaaggatgacttcattaaagcacctctagtggtggaagatgtcccatcctatcccccacccatagctgggagctatgtttggctcattcttcctgactcactggattacactgtgactcagttcaatttcacacatgctgctgctaaattagggtcttggtgagcctttgggaggacagctctgaggaatgaattgtagcactgcagccctgcctgaggaacatgatagaaacaggtggtaggcccagctcttgccttccacctactaagcagtttttctgtggttagctgtgtgacataaactatcggtgtattaatttgctttcactagattcccccccccccaacaacttagtccaagaacatacctgaattctttgcatttccttgccttagttgcttttgtagggtggacagcaggactgcatgagaatagctgtgcttctggaccctatggtgaaagctctagtgaactgcaattaggcccagggtcccggaggaagaaggggagagaaaaaggggggtagttttccaaaagataagtaggggacaaaaaagtccacggggcctatgagcggtgagactcctgccctgattgtggcaaagcacctggagatgatagaacttcctagggaaaaggctgcatggagtccccagggatgctgggccctggtcaccaaggctccctgggaaggtctcttgtacctggggcacacagaccaacacttctgaatttgcaagcttaagagcatgtatgagcagaacctgtgcagaccaaggcttagagggctcacctcaatgttttgcactgtgtgagaccccaggaccttttcgtgattctggagaggggaacaaaccataataacaacaaaccaggtagcaggatagagactcattctcatctattttggttaaaagaaaataaatgtatttcttccacacctgattttgtgattgcaaattcataactaatatccctcgtcagctccgctgactcatccctgccacagggaggttcacagcaagagcacagaaactagggccagtgcccggttgtgtgaccttgagtaagttctttttcccttgaacagggagagagacacaatggatcagagtgtctctgccagttctaacttggggattctagtgggttgaaccgaacggtagtccgtttccaaaagaggaagccaagaccagagggggagtggttccttcaagtttgcagaaccagtaagtggcagagcaggactcatatctagttagtggttcagagcatgggctccggagctagactgcctggatttgaaccctggctttgccacttgcctgttgggtgactttggacaagctgcttaaattatgtctccatttcctaatccacagaacaagtgtaatactagttatctgtttcatggagtgattgtgaggattaaataaagttaatataacacaaagca

SEQ ID NO: 826 - DNA, 4535 bp, Homo sapiens
gggtttgaaattccaacatggcagaggctgcagtccgtcttcccttcaaaaacttggaatgatttcaaatcataggcaccttcacttaaccctagcttccattcatcagcaaacacatcggatcgatgctacgctaacctatcgggttctctctccgcgcgttcaggttaaatgaatacctgacgaaagggcccacgtttcaaggcagtgacatttgatagctgagaggaaaagtggctttaatgaaaagcaacctttggaattcctgcttgtgagaaatccaattcagctttttgtgctgccagcaagaaatgatcagtagcaccagtgtttatggcttgaagatgcagtggacgccagagcatgcccagtggccagaacagcactttgacatcacctcaaccactcggtctcctgcccacaaagttgaagcctacagaggtcatctgcagcgcacctatcagtacgcctgggcgaatgatgacatatctgctctgactgcatccaacctactaaaaaaatatgcagagaagtattccggcattttggaaggtcctgtggaccgacccgtactcagcaactattcggacacaccatcaggactagtgaacggtcggaaaaatgaaagtgaaccctggcagccttccttgaattcagaagctgtttatcccatgaactgtgttccggatgttatcactgccagcaaagctggagtcagttcagccctccctccagcagatgtctctgcgagtataggaagctctcctggggtagccagcaacctgacagaacctagttattcaagtagtacctgtggaagccacactgtacccagtcttcatgcagggctcccatctcaggaatatgccccaggatacaacggatcatatttgcattctacttatagtagccagccagcacctgcacttccttcacctcatccgtctcctttgcatagctctgggctactacagcccccaccaccacctcctccgccaccagccttggtcccaggctacaatgggacttctaacctctccagttacagctatccgtctgctagctatcctcctcagactgctgtggggtctgggtacagccctgggggggcaccgcctccgccttcagcgtacctgccttcaggaattcctgctcccacccccctaccccccaccactgttcctggctacacctaccagggccatggtttgacacctattgcaccgtcggctctgacaaacagttcagcaagttctctcaaaaggaaagctttctacatggcagggcaaggagatatggactccagttatggaaattacagctatggccaacagagatctacacagagtcctatgtacagaatgcccgacaacagcatttcaaacacaaatcgggggaatggctttgacagaagtgctgaaacatcatccttagcatttaagccaacgaagcagctaatgtcctctgaacagcaaaggaaattcagcagccagtccagtagggctctgacccctccttcctacagtactgctaaaaattcattgggatcaagatccagtgaatcctttgggaagtacacatcgccagtaatgagtgagcatggggacgagcacaggcagctcctctctcacccaatgcaaggccctggactccgtgcagctacctcatccaaccactctgtggacgagcaactgaagaatactgacacgcacctcatcgacctggtaaccaatgagattatcacccaaggacctccagtggactggaatgacattgctggtctcgacctggtgaaggctgtcattaaagaggaggttttatggccagtgttgaggtcagacgcgttcagtggactgacggccttacctcggagcatccttttatttggacctcgggggacaggcaaaacattattgggcagatgcatcgctagtcagctgggggccacatttttcaaaattgccggttctggactagtcgccaagtggttaggagaagcagagaaaattatccatgcctcttttcttgtggccaggtgtcgccagccctcggtgatttttgttagtgacattgacatgcttctctcctctcaagtgaatgaggaacatagtccagtcagtcggatgagaaccgaatttctgatgcaactggacactgtactaacttcggctgaggaccaaatcgtagtaatttgtgccaccagtaaaccagaagaaatagatgaatcccttcggaggtacttcatgaaacgacttttaatcccacttcctgacagcacagcgaggcaccagataatagtacaactgctctcacagcacaattactgtctcaatgacaaggagtttgcactgctcgtccagcgcacagaaggcttttctggactagatgtggctcatttgtgtcaggaagcagtggtgggccccctccatgccatgccagccacagacctttcagccattatgcccagccagttgaggcccgttacatatcaagactttgaaaatgctttctgcaagattcagcctagcatatctcaaaaggagcttgatatgtatgttgaatggaacaaaatgtttggttgcagtcagtgataacttctttagaaaaaaaaaatgtaatgaatgttggcacacacacataaaacctgctacatagggaatagagcccctttccagtagagtttaaattgcaaagggtactggggaagatgacgattaagttgcatctttagagtcagggtagatttggaggaaaagtgcatcaaatgagagcttctgatttgaaagccccagatgacagaaagcatatgtggatgctcagttctgttcaagctagacaacactcaccaaggagcaaggtgcaagtgtgttgatttcagaaggacatgaacctcgtgtgttgattccattctgctgttctcgagatttagttgctgtcaagtgcctggagtggtgctttattttttgtttgcctcacaattacattggtggcatgtgctaatataaagagctttaacttcaaacattattggactaaagagatgaacagttgtgttatgacagaaaaccagatttttgccattttaagagcaacagtattcctcaatcctgtctgttctgcagtattaagctaagaacaggtaaaacagggtaacggtaatctggaccttaatttctgcagttcatttcttttaatgttcttgtctgcaaaaactcaggaaagtgattgtgatttgtacagtacctcaaaggaatgtgttgaaagcactatgtactgctgagagtaataggataggcttcaatgttactttatattaaaatgtatgtttacctcaacaattggaaaatagcaaggaaaattactttgaatgtatccagaaaaatactgaagtgtgatacaactgaatatttacagtttaaagtagaaatggaaggatttttttaagttcttttactaattatggggaattaaccagagcagaataattctttatgtcaataactgcaagagttcttagtacattgctccttgataattaagtgaaaatgttcttaaaaggtacactggttaattgaaagctacttattcagtttgtgttagtgtctagacctgtcagccacaagacctgtttaggaccctgaaagtcacagtacctaaaaactatgactgcctttttattgcataggtggtagtggtggtgatggtggtggtagtttgcaagttatctcttaaaactgctgggaatggtgtcattctattcactaatctagcttatagacttgccgtgctgtttgatagaatgcagaggatagcaaccaaaacaaatacacaaataaataaaaacaaaaaccaaccaacaaaccaacttacatacacatatatatatccacaaagaacctctccatctcctccccttctttttgactccactcttgtcagtgcaattttgcttctcattttgaaatctgggctgtagtgctcctgctttatttctacctcagttttgttacatttctcttggaaagtaaagtagaaaattggaagtggacacacacactgcaatgtagcttgccaaacatgttactttgttttcttccatctttcaccgtaaatctagtttccaaagacatcagcatttgtgcttacttccacctcagtctaccagccccacccctacccatggcataagtggcatttttcttaatttcctatttttctcctgctctctgtcaagttgttctttgtatcctttaatgctttatgtgcaacctttcattgatagtgggctgatgtttggcaatgcttctgaactgtcacagagcaggctgtagctttccacagccactgcccatgcataagcagaacagcctggccttttgaatgtattttcctgggttttttccccttttctttttttagtttagagatgcagtaacaaaactgttgcaaagcactggcattttatgtattcaataaataagtgatgtacatttttaaaaaaatttaaataaatgcaatgagaagccccaagaaag

SEQ ID NO: 827 - DNA, 2405 bp, Homo sapiens
attgggcggaagaccctgggccggcaggaacttgcttgtgattggatgttgtgggacggcggcttctcattcgtcagcctgtgactgtggagtttgaattgggtggcggttgactgtagagccgctctctctcactggcacagcgaggttttgctcagcccttgtctcgggaccgcagcctccgccgagcgccatggctcctaggaagggcagtagtcgggtggccaagaccaactccttacggaggcggaagctcgcctcctttctgaaagacttcgaccgtgaagtggaaatacgaatcaagcaaattgagtcagacaggcagaacctcctcaaggaggtggataacctctacaacatcgagatcctgcggctccccaaggctctgcgcgagatgaactggcttgactacttcgcccttggaggaaacaaacaggccctggaagaggcggcaacagctgacctggatatcaccgaaataaacaaactaacagcagaagctattcagacacccctgaaatctgccaaaacacgaaaggtaatacaggtagatgaaatgatagtggaagaggaagaagaagaagaaaatgaacgtaagaatcttcaaactgcaagagtcaaaaggtgtcctccatccaagaagagaactcagtccatacaaggaaaaggaaaagggaaaaggtcaagccgtgctaacactgttaccccagccgtgggccgattggaggtgtccatggtcaaaccaactccaggcctgacacccaggtttgactcaagggtcttcaagacccctggcctgcgtactccagcagcaggagagcggatttacaacatctcagggaatggcagccctcttgctgacagcaaagagatcttcctcactgtgccagtgggcggcggagagagcctgcgattattggccagtgacttgcagaggcacagtattgcccagctggatccagaggccttgggaaacattaagaagctctccaaccgtctcgcccaaatctgcagcagcatacggacccacaaatgagacaccaaagttgacaggatggacttttaatgggcacttctgggaccctgaagagacttcttcccttcaggcttattgtttgagtgtgaagttccagagcaaggagccatgttcctctaagggaattcaggaattcagacgtgctagtcccacaccagttaggtagagctgtctgttcaccctcccatcccagctgatcccagtcactgcttgctggggccatgccatggaagcttcccatcagtctcccagctgaatcctccctgctctctgagctgctgccttttgcctcctgcaactcaacatcctcttcaccctgccctgcctgcagttgagggggcgaagaagaaccctgtgttctcaggaagactgcctccaccaccgctacccagagaacctctgcatctggcatttctgctctctatgcttgagaccgggaggtttaggctcagataagtgagctctgggccatgagagggtaggtccagaaggtggggggaactgtacagatcagcagagcaggacagttggcagcagtgacctcagtagggaacatgtccgtctaccctctcgcactcatgacacctccccctaccagccctcctcttcctcctcctcctcctcctgtgggaggtggtcagtgggacttagggatctttcacctgctgtgcccagtagttctgaagtctgcttgtggagcagtgttttatgtttatccctgtttactgaagaccaaatactggtttggagacaacttccatgtcttgctcttctacctccctagttagtggaaatttggataagggaactgtagggcccagattctggaggttttatgtcattggccacagaataactgtctctaagctatccatggtccagtggtccctgccaagtctgtagacttcagagagcacttctctcttatggggttcatgggaacaggggtgggtgtgacttgcttggtggcctcattccatgtgtgcctgtgcctggggcatggactttgttaagcagagtcagcagtgaggtcctcattctccagccagcctctctgccctggagaatcatgtgctatgttctaagaatttgagaactagagtcctcatccccaggcttgaaggcacatggctttctcatgtagggctctctgtggtatttgttattattttgcaacaagaccattttagtaaaacagtcctgttcaagttgtattcttttaagttcttttattctcctttccctgagatttttgtatatattgttctgagtaatggtatctttgagctgattgttctaatcagagctggtacctactttcaataaattctggttttgtgttttcttttgtaaaaaaaaaaaaaaaaaa

SEQ ID NO: 828 - DNA, 7291 bp, Homo sapiens
caattgtgtgacacaggaagcccaagtgttggccatcctcaacgaaggcagctgccgggctccggtttgcttcagcaaaccctcacccctcgccttcaaccaggcgggtgtcgtcagctgtccgccagctgctgcccgcgcctttccgcccccgcgcgccggccaaggccgaggcggccgggaccagaggcgcgcgccctcagtgcatgtgacggggtgggagggggaggtttcttcctcccccgtccccaagccccgccttctccagagaggctgcggcttcctattgcgccaccaccgaaatgaccaccgtgccagccaatcaagacgtgattcatgaagtaagacccgccccttactggtccccaggttccttcccgctcacgccggagtcacttccgaagagagaaccgccatgaagagagaagggggtgccgcccacctctgctccgacagcctcccggagtcccagcagcaagacggcaaccacgcacccaacttctccagccacggctcatgccgccgtcgccagcggcgccgacatgacaaggcgctgcatgcccgctaggccaggtttcccctcatccccagccccggggtcgtcgcccccgcgctgccatctgagacccggtagtaccgcccatgctgcagcgggaaagagaacagagagtcctggggacaggaagcagtcaattatagatttcttcaaaccagcttcaaaacaagacagacacatgttggattcaccacaaaaatcaaacatcaaatatggaggaagtagattgtctatcactgggacagagcagtttgaaaggaaactatcctcaccaaaagaatctaaacccaaaagggtgccaccagaaaagagccctattatagaagctttcatgaaaggtgttaaagagcaccatgaagatcatggtatacatgagtcacgtcggccttgtctgtcactagcctccaaatatttagccaaaggaacaaatatctatgttccttcttcatatcacttgccaaaggagatgaagtcactaaagaaaaaacatcgatccccagagagaaggaagtcactattcattcatgaaaataatgagaagaatgatagagatcgaggcaaaaccaatgcagactccaaaaagcagaccacagtggcagaagctgacatcttcaataacagctccagaagccttagcagcaggagcagcctgtccaggcaccacccggaagaaagcccactgggagctaaattccagttgtcactagcttcttactgcagagaacgagaactaaagaggttgagaaaggagcaaatggagcagagaatcaactccgagaattctttctcagaagcaagcagtctttccttaaaatctagtatagaaagaaaatataaaccaaggcaggaacaaaggaaacagaatgacatcatacctggaaaaaataatctgtcaaatgtggaaaatggacatctctcaagaaaaagatcctcttctgattcatgggaacctacttcagcaggctctaagcagaataaattccctgaaaaaagaaaaaggaactctgtggactcagatctgaaaagcacaagagaatctatgataccaaaagcaagagagtccttccttgagaagcgtcctgatggaccacatcagaaagaaaaatttataaaacatattgcactgaagacacctggtgatgtgttgcgcttagaagatatatccaaggaaccgagtgatgaaactgatggctcttctgcaggcttggcaccttcaaattctggcaattctggccaccattctaccaggaatagtgaccaaatccaagtggcaggtaccaaggagactaagatgcagaaaccccacttacctttatctcaggaaaagtctgcaattaaaaaagctagcaaccttcagaaaaataaaaccgctagctccacgacaaaggagaaggagacaaaactacctttactttcccgtgttccaagtgctggttcctctctagtaccattaaatgctaaaaattgtgctcttccagtttctaaaaaagataaagagcgttcctcatctaaagaatgttctgggcattctacagaatccaccaaacacaaggaacacaaagcaaagactaataaggccgattctaatgtatcttcagggaaaatttctgggggacctttgcgctcagaatatggcactcctacaaagtctccccctgctgctttggaagttgtgccatgtatcccaagccctgcagcaccttcagataaagccccttcagaaggagagagttcaggaaattccaatgcaggtagcagtgcactgaaaagaaaactaaggggtgattttgatagtgatgaagaaagtttaggttacaacctagacagtgatgaggaagaggaaacattaaagtcactggaagaaataatggctttgaacttcaatcagactcctgcagctacaggaaagcctcctgctctttccaaggggcttagatctcagtcatcagactatacaggacatgttcatcctggaacttacacaaataccttagaacgtctagtgaaggaaatggaagacacacaaaggctagatgaactgcagaagcaactacaagaagacataaggcaaggccgaggcattaaatccccaatcagaattggagaagaagacagtacagatgatgaggatggcctcttagaagagcacaaggaatttctaaagaaattttcagttacaattgatgctattcctgatcatcatccaggtgaagaaatatttaatttcctcaattctggaaaaattttcaatcagtataccttggatttaagagactctggttttattggacaaagtgctgtagaaaaacttattcttaaatcgggaaaaacagatcagatttttttgacaacacaaggtttccttacgtctgcttatcactatgtccagtgtcctgtccctgtgttaaagtggctgtttcggatgatgtcagttcatacagactgtattgtgtcagtgcagattttaagtacattgatggaaataacaattagaaatgataccttcagtgactcaccagtttggccatggatcccatcattgtctgatgtagcagctgtgtttttcaatatggggattgattttagatctttgtttcccctggagaatcttcagccagactttaatgaagactatctagtttctgaaacacagacaacatcaagggggaaagaaagtgaagattcatcttataagccaattttttcaacacttcctgaaaccaacattttaaatgtggttaagtttctaggcttgtgtacatctatacatccagaaggttaccaggatcgtgaaataatgttgctgattttaatgttatttaaaatgagtttggaaaaacagctgaaacagattcctttagtagactttcaaagcctcctgataaacctgatgaaaaacatcagagattggaacacaaaggtgcctgaactctgtctgggcataaatgaactctccagtcatccccacaacctcctgtggttggtacagctggtccctaattggacatcacgtggaaggcaactgagacagtgcctcagtctagtgattatttcaaagcttttggatgagaaacacgaagatgttcctaatgccagtaatctgcaggtatcagtcctacatcgctatcttgtgcagatgaagccttctgatttgttaaagaaaatggtcttgaagaaaaaggctgaacaaccagatggcattattgatgacagtcttcatttagaacttgaaaagcaggcatattacctgacctacattcttcttcatttagtcggtgaagttagttgttctcattctttttcttctggacaacggaaacactttgtgctactctgtggggctttggaaaagcatgttaaatgtgatattagggaagatgcaagacttttttacagaactaaggtgaaagacttggtcgccaggatacatggaaaatggcaggaaataatccagaactgtcggcctactcaggggcagcttcatgacttctgggtaccagattcttaataggagttgcagcagcaaaaatatgaaccaagagaaattcaataagagcctttcatagaggagtagaaaggattattacagaatccaatgaatgccaagaaaatgtacagcaaatgtgccacttgaatatctagtatgaagctggtaatgaagaaattgccatttctgaagcagatatgaaatatgatctgcttaattgttaaggcaactgacctttcaaaagtgcagagtcttattaaaagaggggaggggtagaagcagaataatagtcatatgtctaacctgccccagttaactcctcttgttaaattataagccagttatcttttttagatagtatttttgtcacttggataatcacaggaaatatataagaaaagagcttggactaacttgagaagttggacatggaaagcaagaccaagttccagttgggtttaattttccctcttggttattttcggacacaaagggaatgcttaaaactgagtttagtaataaaaagcataaatctcttctgtaacttttataaaccacagggaggtttcaatccatgcattttccttcattactcaagattataaatctgtttttaaaatacatctaaacaaacagttgagaaacaaaagtttggcatgttgtcagatccccttaagaggaagaggttaagctgtaaagtagtggccctgttttgatgccagaacattcatatgctgtttgttctggatttcttttaaatgcatgtattttaaatactggttaaatcttagaatcttggctatatcttagaattctggctcttggtaaccatattacagaagtctatattgtaaaagcctaaagatctggacaagtttccaacaaccttgtttccatgagtatataattttggcagacacctgaattctttgggacactgtgtctgtgtatgtgtgtgtgtgtgtgtgtgtgtgtgtgcgcttgtatcttgaagttgttgcacttcaaaaccacagctgctgtaaattcttaaacactggagagccatcctttggtttaaatggtagagggttagtggaagtgcacacgttgtttttagcccaggggtagtaacaaactcttactagccaactagaaaattattttgttgacgagatgtcccttttaggagggtttgtttcctgaaagaatgccaactttttttgttgttctttcagtattggcttgagtgacctgttctcctgagtgctctagtgtctccagttgtgggggggaaagatgatggaggggaacagaaactggacttgatgtttgcggtttgagaggcaagaaaataaaataactttctacctctaaattgaggcttaggagtaaaaagcattttgtcctaaatttatcatttaaaatagcatcagtaacttttgagctcatgtcaatcaagcattggcagtcagagattttatagggaagactaagtaaatccagtttccaagaacctaaactgattgaggctccaagagtcagaccaacaaaagttttattctgtgttgtttactggtaagaatattattatcttgatactacctctcaagggtattgttacaaaatgccacttatggttaaagagatagatacaaagagttctatttgacagaagcttgaaactctggcatctatctgcccaacgatgggggctttcgttctgtaatttaatcctttgtagatacattatttgtgtgtaattttatacgtgttcatatttttctcattttgcattgtgtaaagtgtacaaaatctcaaagtataaaatactgcttatattgcttgtaatttacagtgtgtaaatattttctaattgtgtacattgatgggggggacaagtgggttattcaggtttttttttaatgacccttttgtattgcagtttcaacagataactgtccatcaaatttaaaaccactttgatacatttttatttaacagttccaataagaaaaaaatctctatttttaattatatttctcctttagaaaaaaaatacttcatggtccctctaaaataaatggccagacctcagtttaggcccttgtatttatgactctggtagaggtcttcagactccaggtcatagtccagtcagtatttgcatttgggttctcatgaaaactttgtgactctcttttagcacaagtagcccatggtttttcttccaaatcaagtattttacttctcccttgagtccccatgctttgtctccctcctgctgctattgcccggtgaatgggatggtagagagggagaaatgttcattgcacagagaatgtcaggccactttggggacttggcaaacgaagcttgcactgagtggtggtgtgtttggcaatattactgtgccaaaaatcaccttgtctaattttatggatatgtatggcaaacttattacccttcttgcaagctgcacattaaggtacttgtaagtgtttatgcttttgtgtgtaactgtttgccttttctaactgcttttcttgttactgaaaatataattctactagttttatcacattaagaggctctccatgcacaaaatgcattgatgtagccgtaaagtaacagcatttgtacattttctatctcctgatggcagtggtgcctttgtcaccttttggaaggtttgcattttgtttctgctttcaagcgcaaatagtagcttgctttcagcttcacaaaaatctcctcaaatgtaaaagatacaaaatggcgtgttatcatccaggcttagttggagtatttgcatttttatttttatcaaaacaaatataattggtggggactggccagtaataatgtgtggcgtctttaagccaagagtaatttttaaattaaaaatgaaaattttaagaggtagcccattaaacaagctactgagttggagaattaggggatgactgtggtggtttgtcgctaaggaggcaacagtagggtccaggcggcggggcacgtagagcagttagcatgatccatggttattccttactcatgaacagtgtcggcgcacctcattatctgtgcatttgtttttcctgggcagtcctgtcagccagttaatccaccagctcttaggaagtaaatacagatttttttctttccttttttttttttttaaagattttatactacatcttgttaaagtcctatgaatgtgtgtgtgtgtgtgctattaaaactgctttttctcagtttgaaaaaaa

SEQ ID NO: 829 - DNA, 2947 bp, Homo sapiens
ccccgcgcgccccgccccgccggctcggaactcgcctggggcgccgccggcggcggagggagcgtgactgcgctgcgcagggcgctaggaggcattgtcgccgctcaggcccttttgtgagaagcagaccagcctgggggctggcggcaggacacctgtgtctgcatgctgaagaagatgggtgaggccgtggccagagtagcaaggaaggtcaacgagacggtggagagcggctctgacactctggacctggccgagtgcaagctggtctcctttcccattggcatctacaaggtcctgcggaatgtctctggccagatccacctcatcaccctggctaacaacgagcttaagtccctcaccagcaagttcatgaccacattcagtcagctccgagatgtgcccgtggagaagctggccgccatgccagccttgcgcagcatcaacctccgcttcaacccactcaacgccgaggtgcgcgtgatcgccccgccgctcatcaagtttgacatgctcatgtctccggaaggcgcaagagcccccctaccttaggccaccctcctcatgcccacccagcaagggacagaggccacaggcctggaaccctggaagggagggaggcccatgggaggccaagcctgggggctgggggcgggtgggccgagcagcacgtggtgggtggggtgcagctggtctggatagatagcttacagcagtagtgggctctggaatgcccaagggaagaggcaaggtggggcctgcagcctggactcggcactcacagctgctgtgcaaactcaggcagatctcctgccctctctgagccttgtcacttgaaaaaaacaggaccctttccctcctttgggctccctggaggtttttaagcagtacgtgcctccaagttacctccagatcagcaggcacaggtgggcattgccaggtattttctgagcccctgcgggtttgaggccttgtttttagtgctgagagccagttgctgccctgagaagagaagacaacctccatctatttattgcttcctgagaactgacctggatgcggccctctgcagggcccagtcttcagtcctgtggtccctggactggtgggaacctgaactaggagtcctgggagagctgtggtgggaatatgggctggcactgctgcagggcaagaacattcatgtaggagcccgaggaccagcaggctgggaatggggagcaagtcacgtcagctctgtcattccccacagttaacaaattggcggggtgggaagtcctgagtgctccgtccctctagcatcactcctgagctgcgggagaggtggcccagagaacagcagagtcagttacacctgcagctcttgtctaaagtgattagatggccaccctcaccactgtccagtccagcagcagcctggctgccttgtcatggcctcctgggggcagaaggcgatgtggaccacgggatttgtagccagccagctcccaggccaacgcccaaagccctgatgacctggttcttctgaggccctcaacctggcatcttagggtatggtcaggcaacagggtgaccagctgtcctggtttcccaggacatggaactttcaatgctaaaactgggacagtacccagcaagtggggatggttggtcccctaccaggagagggcctggggctcttgcttcccgagaacgcctgtggcttgaagaaccttgactgcttggtcctcaggtatctacctcccaccttctcctcatctgtggagcaagccaactcagtgccccagaccccacctgatctgcatctttgtttgcatctccagagacacctgaggccccagagcttgaggcaaagccaggccgtccaaatcctgtgtgccgtggacgagtggccactttactactcctaaggctaagatgttgagagctcagaccactgctcagagcagtaatccctgctcagaatgctcccagttccctcgtccctgcccaggtctcttgtctcttgggaaggaactgataggtcgggccattgttgggccatcactgagcgctcagtatctcaagagactctgttcattctgctcgtatcccaaggcctggttggtcaaactctgggcaaagggttttcaggatgaggaggtcaagacaggatctccagagctaccgagttcatctgtgggtgttgggggcaagtgggggctgaagtcctgtgcaggctgcgctggccccacctgccttgtgccctggagtggggtttctccttgttgaagaagaggcatccttctctgatgtgcacaaacacaatgtatgaccagagccttgcaactcaaagtgtggtctgtggaccagcagcggcagtgacacctgggagcttgttaggaatgcagagtctaggcctcaccctatacctcccgactcagaccctgcattttagcaagacccccagctgattcctataagcactttagagtttgagaagcaaggacctaggctggggatgtcctccgagcagagggtgaagtttctctcagttctctccctgccacttccagggatctgagcctgtgctcagcctcctccctaacccaccctgggagacacttggcctgttagattgttccagagtctgcatggcactcctgaagaagggagtgtgacctgcagtcaccaggagatgagggttaggtgtgcccagccctccagacccggcctttctggttaacccctgcatgccaagctgcctgctgccccaggtcctcacctcaggcctttgaaggggcagcttctggaagttgttttctcctctgcttggagagtttgcccttgtctgtcttggaaagtgtgggcagccacagatgcccccaaatcagagctcacagtgagtgagcccctaagcttcagtctgcaataaagaatgcattggtttcatctgcaaaaaaaaaaa

SEQ ID NO: 830 - DNA, 2648 bp, Homo sapiens
ggcgtcgcccccaccccgcgctccaggtagcggcggcctcagctgccggcggtggctggctgagctccccagcggcccgcgggccggggcgggggcgggccgggggcgttcccgcgggccaccgcccgtgatgtcacaatcgcggcgggccgcggcgctccggggtcggcggtgggcggcgggccgcgagccggcgatcgaagcgggcagctcgcgcctgagtcatggacttcccctggcccctcctctaccactcccactccctcgccggacccccccgccggggctagcgtctgccgcggctccgagggggtggggctgctgggaatggctgtgcccccttcggcccctcagccgcgcgcgtcctttcacctgaggaggcacacgccttgcccgcagtgctcatggggcatggaggagaaggcggcggccagcgccagctgccgggagccgccgggccccccgagggccgccgccgtcgcgtacttcggcatttccgtggacccggacgacatccttcccggggccctgcgcctcatccaggagctgcggccgcattggaaacccgagcaagttcggaccaagcgcttcacggatggcatcaccaacaagctggtggcctgctatgtggaggaggacatgcaggactgcgtgctggtccgggtgtatggggagcggacggagctgctggtggaccgggagaatgaggtcagaaacttccagctgctgcgagcacacagctgtgcccccaaactctactgcaccttccagaatgggctgtgctatgagtacatgcagggtgtggccctggagcctgagcacatccgtgagccccggcttttcaggttaatcgccttagaaatggcaaagattcatactatccacgccaacggcagcctgcccaagcccatcctctggcacaagatgcacaattatttcacgcttgtgaagaacgagatcaaccccagcctttctgcagatgtccctaaggtagaggtgttggaacgggagctggcctggctgaaggagcatctgtcccagctggagtcccctgtggtgttttgtcacaatgacctgctctgcaagaatatcatctatgacagcatcaaaggtcacgtgcggttcattgactatgaatatgctggctacaactaccaagcttttgacattggcaaccatttcaatgagtttgcaggcgtgaatgaggtggattactgcctgtacccggcgcgggagacccagctgcagtggctgcactactacctgcaggcacaaaaggggatggccgtgacccccagggaggtgcaaaggctctacgtgcaagtcaacaagtttgccctggcgtctcacttcttctgggctctctgggccctcatccagaaccagtactccaccatcgactttgatttcctcaggtacgcagtgatccgattcaaccagtacttcaaggtgaagcctcaagcgtcagccttggagatgccaaagtgaccagccaccccatccctcccctacccatctgtctggccagacctgttctccagagctcaattctgcactctgggatccacacccttggacagggtgggagaggggacacatgggtgtccagggagaaggctctgtccctgccgccagaccccagtggttgccactgaagacctcattctcctgtctggaggggctgataggacccccttccgggggtccccttcaccccaccaggcttgggaggaagtgcctgcagccaggtcctgaaccataaccacccctgggaaacacatcattcccagcctcaggccctgctggaattggggctgccttatatgtgtgtttaccccttcctggcctggggaaggaggcggggagggctcctttctacctccagtgccctgagcctccagtccgtctccccctgcatgccccatgtgggaggtgctgagctccaaaccagcatcacaccaactctgacacatggatgtacctatcttggtgatgggtgggggccaagaattgagcatgacatcttccccagcagccacctcctctgagatccctcaccttctccaaaccagatccaatcaaacctcagcccgaggaaacatgctccccaacgtgctctcctgtgcttctgttttgtccccctgctggggggacaggagagggagtggtgaggccctgggcctccagagcctggctctgctttgtgctgtggcttagccggaggggacgtggccaagggtgaggtggccaaaaccagaaccagcagtctcctgccttgttccctccctggccctcaggccctccttccagggatgtctctccagctctactttatgtcctgaagctgacccgaggtcttcctatctggaatgactagagggagccaagaggatggggtgggggccagggccccccagggcctatcgtgggagagcctgggcaggatcccatcagaaaggtgctgactaaactggttgcccggacactcaacagcctccacctccctttctaccctcacagctcctggggccttcctggctctggcccagaaagtgattcatttgtaaattatcatggttttctttctgcattaaaatgctcatttccggaaaaaaaaaaaaaaaaaaaaaaaaaaaaaaaaaaaaaaa

SEQ ID NO: 831 - DNA, 2265 bp, Homo sapiens
ggaggctcaatgacagtcgagctttggctaaggctccggggaaagggtctagccatgctgcatgtgacccggggggtctgggggtccagggtccgagtatggccactgttgcccgcgctcctcgggcccccccgggccctctcatcgctggcagccaaaatgggggagtatcgcaagatgtggaaccccagggagccccgcgactgggcccagcagtaccgcgagcgcttcattcccttctccaaggagcagctgctccgcctcctaatacaggaattccactcgagtccggcagagaaggcggctttggaggcgttctcggcccacgtggacttctgcaccctgttccactaccaccaaatcctggcccggctgcaggccttatatgaccccatcaaccctgacagggagaccctcgatcagccatcactaacggatccccagcgtctgtctaatgagcaggaggtgcttcgggctctggagcccctgctggcccaggccaacttctccccgctgtctgaggacaccctggcctacgcgctggtggtccaccaccctcaggatgaggtccaggtgacagtaaatttggatcagtatgtctacattcacttctgggccctgggccagcgagtcgggcagatgcccctgaagtccagcgtgggctccaggcgtggcttcttcaccaagctgccccctgcggagaggagatactttaagcgggtggtcctggcagcccggaccaaacggggacacctggtactgaagagtttcaaggacacgccgctggaaggcctggagcagctgctgccggagctgaaggtgcgcacgcccaccctgcagcgcgccctgctcaacctcatgctggtagtctccggcgtggcgatcttcgtcaacgtgggcatggtggtgctaaccgacctcaaggtggccacctccctgctgctgctgctcttcgccatcttcatgggcctgcgggcctccaagatgttcgggcagcggcgcagcgcgcaggcgttggagctggcgcacatgctgtactatcgcagtacgtccaacaactcggagctgctcagcgccctggccctgcgcgcgcaggacgagcacaccaaggaggcgctgctggctcacagcttcctggcccggcggccagggggcactcaaggctcgcccgaagagacctccaggtggctcaggtcggaggtggagaactggctcctagccaagtcaggctgtgaggtgaccttcaacggaactcgggccctggcgcatctgcaggccctgacccccagcatgggattgtacccacccccgggtttccccaaactagacccagtggctccgatcacttccgagcccccgcaagccacgcccagcagtaacatctcctgagtagaacctacctccctgcccagtcagcaggctaggaactaagccccgcctccttcacgacaggctgtcaattacggttattatacttttcactccaacttccaataactgacaggtgattatttttgctgcactgtgtgcttaagcaaagcagccaatcaaagcagctagcagttgttaagtcttccccgccccttcgatgaacagccaatcaaagcgatttagctctgcttctgttctatttcttagtcccaccctcaccataaatatccaagtgtggtttggctgaggagctgagggtgtctgccaatcacagctgctcagctctggcttctgtaaaccgccaggtagaagagttaaagctgcgccctcccgagactatatatcattgtcgttttcagcccgctccgggcaaactgcccatcatgtgcaccaaggccgttagccctgcctcctggcaaacgtccagtgacagctgctgggttccatcaactttgggcagccggttgtcgctgcagggaaggaaccaataagaatttctaaaggaaacctgatcttgctatcaattgctgctgcttaaatggcaggccaactggtcagctgctgatcagggtgtctaggctgaaggagttggagaccttgtgctaggtaggtgaaccagaaaccaccctcgccaccaagactcgctcccaacctggctcccggcaacctcaggtgccttcctcgcccaggtctttcaccctttctacagaaactacctcggtctggatctccccaccaccagcagcctgtgcaatatttattggtctatcaatttctcccgtctcctgtcccaaagtaataaatcatgtttaataagtaaaaaaaaaaaaaaaa

SEQ ID NO: 832 - DNA, 2007 bp, Homo sapiens
ccgtcgcgctggccggaagacgggggtgcaaccctttgaagtgtcccctcctacttcttgctgcctcacggttgctgttgcagacccaggagtctctgaaggcttccgcggctttggggccggttgtgagatgccaggcagaggccgctgcccggactgcggctccacggagctggtggaagactcgcactattcgcagagccagctggtgtgctccgactgcggctgcgtggtcaccgagggggtccttaccactaccttcagcgacgagggcaatctccgagaggtaacatattcccgaagcacaggggaaaacgaacaagttagtcgcagccagcaacgaggtctccggcgagtgagagacctttgtcgagttctgcagttgccaccaacatttgaggataccgcggttgcctactaccaacaggcatatcggcactctggcatccgagcggccaggctgcaaaagaaggaggtgttggttgggtgctgcgtcttaatcacctgccgacagcataactggcccctaacaatgggggccatctgcacgctgttgtatgcagatttggatgtgttttctagcacttacatgcagatagtgaagctcctgggactggatgtgccatctctgtgcttggcagaactggtgaagacctattgcagcagcttcaaactgttccaagcttcaccttctgtgccagccaaatacgtggaagacaaagagaagatgctgtctcgaacaatgcagttggtggagctggcaaatgagacgtggctggtgaccgggaggcatcccttgcccgtcatcactgctgcgactttcctggcttggcagtcgctgcagcctgcagatcggctttcatgttcccttgcccgattttgtaaattggcaaatgtggacctgccctacccggcgtcctcccgcctgcaggagctgctggctgtgctgctgcggatggctgagcagctggcctggttacgagttctgagacttgacaaacggtctgtggtgaagcacatcggtgaccttctccagcaccgccagtcactggtccgctctgcctttcgggatgggacagcagaagtggagacccgagagaaggagccaccggggtggggacaggggcaaggagaaggggaggtgggaaataattccttaggtttaccccaggggaagcggccggccagtcctgcccttctcttgccaccctgcatgttgaagtccccgaagcggatctgccctgtaccccctgtctccactgtcactggagatgagaacatttctgatagtgaaatagaacagtatttgcgtacccctcaggaagttagggactttcagagagcccaggctgctagacaggctgccacgagtgtccctaaccctccctgatggatatccactgggagcacttcatcctgttctgacagcttgataacattcctgttataaccaaggatggaagtgtacaccagtccgtaggtattgcttttcttgtttgaaggaaccaagaggggctctgccattagttggaccctgggtcctggagtaaagtcaggagtgcagggatgactataggtaggagagattcccatcccttggtgtgggagagcaagttgcctatgtccatgttctgtgagatggctttcctcatagatggatgggaaaatgtcaggctctttgctgctggtttgaattggacacactgctgcggctcctcctgcaggcctgagggggcttccctctgcttgtggagtggttggcattcccagcagtatcaaccctcagaggagcgggaactggggaattctggccctacgtgcattcacaggcaatgatgggtttgtgtgtatggtgtcatgagatcctctacctcataacaaaaggacagtgggtagactaaggcagtagctcaaagggctttgcaaaattttaatatattaaaacaagaggcatctgctagaaaacattctattgtataaaacccgagttcttaaaaacaaaaaaaa

SEQ ID NO: 833 - DNA, 2918 bp, Homo sapiens
cgaggttagggcccgcgttgcgacgtggtgcagcgcatattttcacaagtgggtctcccttgtccgggactatggccaccgactcgtgggccctggcggtggacgagcaggaagcggctgtcaagtcgatgaccaatttgcagatcaaggaagagaaagtcaaagcagataccaatggtattatcaaaaccagtaccactgccgagaaaacagatgaagaggagaaagaggacagagctgcccagtccttactcaacaagctgatcagaagcaaccttgttgataacacaaaccaagtggaagtcctgcaacgggatccaaactcccctctgtactcggtgaagtcgtttgaagagcttcggctgaaaccacagcttctccagggagtctatgccatgggcttcaatcgaccctccaagatacaagagaacgcattacccatgatgcttgctgaacccccacagaatctgattgcccagtctcagtctggcactggtaaaacagctgcctttgtcttagccatgctcagccgagtggagccatcagacagatacccccagtgtctgtgcctctccccaacatatgagctggcgcttcaaacaggaaaagtgattgagcagatgggcaaattttacccagaactgaagcttgcctatgccgttcgaggcaataaattggaaagaggccagaagatcagtgagcagattgtcattggcacccctgggaccgtgctggactggtgctccaagctcaagttcattgatcccaagaaaatcaaggtgtttgttctggatgaggctgatgtcatgatagccactcagggccaccaagatcagagcatccgcatccagaggatgctgcccaggaactgccagatgctgcttttctccgccacctttgaagactctgtgtggaagtttgcccagaaagtggtcccagacccaaatgttatcaaactgaagcgtgaggaagagaccctggataccatcaagcagtactatgtcctgtgcagcagcagagacgagaagttccaggccttgtgtaacctctacggggccatcaccattgctcaagccatgatcttctgccatactcgcaaaacagctagttggctggcagcagagctctcaaaagaaggccaccaggtggctctgctgagtggggagatgatggtggagcagagggctgcggtgattgagcgcttccgagagggcaaagagaaggttttggtgaccaccaacgtgtgtgcccgcggcattgatgttgaacaagtgtctgtcgtcatcaactttgatcttcccgtggacaaggacgggaatcctgacaatgagacctacctgcaccggatcgggcgcacgggccgctttggcaagaggggcctggcagtgaacatggtggacagcaagcacagcatgaacatcctgaacagaatccaggagcattttaataagaagatagaaagattggacacagatgatttggacgagattgagaaaatagccaactgagaagctccaccagccactgatgccagccctggcactgcccctgcacaggagacaagtgcatttagggcacaggccccgacatcaccccaaggacaacggcagaagtagagagaaactacctacctcacttcaaattatgtttggacttgacaaaaataggtgcaaatgatggggggcaatagaagaaaaaatttgcattttggaaaattgggtcctttccccacttttttaaagccacattcccccatctttataataatctggtcacagtggtagtcgctggccccaggaccccctcctgattttggctaggcatcgtggaaccagctccagcccctgaagaaacgatagatgtgcaggttgtgcggaagaggctgagtggaaaatggtgtgagccccaccgctgtgcatcgaatgagggaagtggcagcagagaggccagagctgccccctctctgtctcttcaatggacccttcacaagtgtttctcctgcccttggggctgtcttccttctcctgaaatccagagactttcttgctcatcccttctccctttcacttctgttctctgctgcagaaagcagacttgcatatccctgatgagcagctcggctacttttgtaaacttcagatttggagagaaacacgaaagtctgaatcctgaccccttgagagagagtgatctggcgagggccgatgaaggggctgggcctggtcttgccttctcttctctcggttgctccctctgcctaggcccctggtactcagtcacggcagccaggagaccccaggtgagtttctgagcgcatacgtagttggttcttacccccaggtgtcacacggggccgagagctgagcaagaatttggaatggaagttatgaccaagggaattatgctgttcatttataatagtggacattatggagagctctgattcctacataatatgaataaggatggataggccgggcgtggtggctcatgcctataatcccagcacgttgggaggctgaggcgggcggatcggttgagctcaggcgttcgggaccagcctggccaacatgatgaaaccccgtctctaccaaaaatagaaaaaaatatagccgggcctggtggcgcacgcctgtagtcccagctactcgggaggctgaggtaggaggatcgcttgagcctgggtagaggctgctgtgagctgaaatggcgccactgcactccagcctgggtaacagagcgagaccccgactcaataaataaataaggatggataaattgtagcgtatgcaccattcattatgctaagacattttaaagtaattatgagaaacgctctactaatgatttgtttttatttgtatttttctgcttattagacaaatatatactcattttaaaaaaaaaaaaaaaaaaaa

SEQ ID NO: 834 - DNA, 9288 bp, Homo sapiens
agtgctcgcccgcccgaccccggcggctcgcgcccgggagcgccgcagggtcgctagagtcggccgcgtcctttgtgtggcgctcaggctgcgccgcggggcggcgggacggaatgtgggcgctgcgggggcttttctctcctacccgaactgtgggaacaatggactgaaaggggaagatggattgaggggccgagcggggaagcgagctgcaccggggaatcatgacttctgcagccgagataaagaagccaccagtggcccccaagcccaagtttgttgtggcaaataataagccagccccacctcctattgcacctaaacccgacattgtgatttctagtgttccacagtcgacaaagaaaatgaaaccagcaatagccccaaaaccaaaagtcctgaagacctcacctgttcgagagattgggcagtcgccatcaaggaaaatcatgttgaacctggaagggcataaacaggaattagctgaaagcactgacaactttaattgtaaatatgaaggcaatcagagcaatgattatatttcaccaatgtgttcctgcagttctgagtgtatccataagctgggccatagagagaatttgtgtgtaaagcagcttgttttagagcccctggaaatgaatgaaaatttagaaaacagtaaaattgatgagactttgactataaaaactaggagtaaatgtgatttgtatggtgaaaaagccaagaaccagggtggggttgttttaaaggcaagcgttttagaagaggagctcaaagatgccttaatacaccaaatgccaccttttatttctgcacagaagcacaggcccacagacagcccagaaatgaatggtggctgtaattcaaatggacaattcagaattgaatttgcggatttgtcaccttccccatccagctttgaaaaagttcctgatcatcacagttgccacttacagcttcctagtgatgaatgtgaacattttgaaacttgccaggatgacagtgaaaaaagcaataattgctttcagtcatctgaactagaggctctggaaaatgggaaaaggagtactttaatatcttcagatggagttagtaagaaatcagaagtcaaagaccttggtcccttagaaattcatttagtaccatataccccaaaatttccaactcccaagcccagaaagacacgaactgctcgtctgttacgccaaaagtgtgtagatactcctagtgaaagcactgaagaaccggggaattcagacagtagctcttcctgtcttactgaaaatagtttgaaaatcaataaaatcagtgttctgcatcagaatgttttgtgtaagcaggaacaggtggataaaatgaagctaggaaataaaagtgaattgaatatggaatccaacagtgatgcacaggacttagtcaattcacagaaagccatgtgtaatgaaacaacttcctttgaaaaaatggcaccttcttttgataaagactctaatttgagttctgacagcacaactgtagatggttctagtatgtcgcttgctgtggacgaagggaccggttttataagatgtactgtatctatgagcctgcctaagcagctcaaattaacttgcaatgaacatttgcaatctgggagaaacctgggagtttctgcccctcaaatgcaaaaggaatctgttataaaagaggaaaattctctacgaattgtccccaaaaaacctcaaagacatagcttgcctgctacaggagtgcttaaaaaggctgcctccgaggagcttttggaaaaaagttcttatccttcaagtgaagaaaaaagttcagagaagagtctagaaagaaatcaccttcagcatttgtgtgcccaaaaccgtggtgtgtcatcctcctttgatatgcctaaacgggcttcagaaaagccagtgtggaagttacctcatcctattttacccttttcagggaacccagaattcttaaagtctgtcaccgtatcgtcaaacagtgagccttcaacagccctaaccaagcccagagcaaaatcgttatctgctatggatgtggaaaagtgcactaagccttgcaaagactctacaaagaaaaactcttttaaaaagttgctcagcatgaaactgtccatctgtttcatgaagagtgactttcaaaaattttggtccaagagtagccaactcggagacaccaccacaggccacctctccagtggggagcagaaggggattgaaagtgattggcaaggcttgttggtaggagaggagaagagaagtaaacccatcaaggcatattccacagaaaactatagcctggaatctcaaaagaagaggaagaagtctcggggccagaccagtgcagctaatggtctgagagctgagtctttggatgaccaaatgctctcccgggagtcatcatctcaggcaccttacaagtctgttacaagcctctgtgcaccggagtatgaaaatatacgccattatgaggaaataccagagtacgagaacttgccatttattatggctatacggaaaactcaagagttggaatggcagaattccagcagcatggaggacgctgatgcaaatgtgtatgaggtagaagagccgtatgaagctccagatggccagctgcagcttggacccagacatcagcattccagttcaggagcatcccaggaggaacagaatgatcttggtcttggtgaccttccctctgatgaggaggaaatcatcaacagttctgatgaagatgatgtcagctctgagtcaagtaaaggagagcctgacccactggaagataaacaggatgaagataatggaatgaaaagtaaagttcatcatattgccaaggagatcatgagctcagagaaagtgtttgtggatgtgttaaaacttttgcatattgatttccgggatgcagtagctcatgcttccaggcaacttgggaaaccagtgattgaggaccggattctaaatcagatcctatactacttgcctcagctgtatgagctcaaccgggatctcttgaaggaactggaggaaagaatgttgcactggactgaacaacaaagaattgctgatatctttgtaaagaagggaccatatctaaaaatgtattccacatacatcaaagaatttgataagaatatagccttgctggatgaacagtgcaagaaaaatccaggttttgctgctgttgttagagaatttgagatgagccctcgctgtgctaatctggccctcaagcactacctgctcaagccggttcagaggatcccccagtacaggctgttgctgacagattatttgaagaatctcatagaagatgctggagattacagagacactcaagatgcccttgctgttgttatagaggtagccaaccacgccaatgacaccatgaagcaaggagacaactttcagaaacttatgcaaattcagtacagcttaaatggacaccatgaaattgtgcagcctggtcgggtttttctcaaagaaggaattctgatgaagctgtctcggaaagtgatgcaacctcgaatgtttttcctgtttaatgatgccctgctgtatacaacaccagtgcagtctgggatgtataaactgaacaacatgctctcactggctggaatgaaggtcagaaaacctacccaagaagcctatcagaatgaattaaagattgaaagtgtagaacgttccttcattctctcagccagttctgccacagaaagggatgaatggctagaagcgatttccagggcaatagaagagtatgccaagaaaagaatcaccttctgtcctagtaggagtcttgatgaggcagactcagaaaataaagaagaagttagtcctcttggatcgaaggctcccatctggattcctgataccagagccacaatgtgtatgatctgcacaagcgaattcactctcacctggagacgacaccactgccgggcctgtggaaagattgtatgccaagcttgttcgtctaataagtatggcttagattacctgaaaaatcaaccagcaagagtatgtgaacattgtttccaagaactgcagaaattagatcaccagcactcccctaggattggatctcctggaaatcacaaatctccttcaagtgccttatcatcagtcttacatagcattccatcagggaggaaacagaaaaaaatcccagctgctctcaaagaagtatcagcaaacacagaggattcttctatgagtggctacttgtacagatcaaagggcaataaaaaaccctggaaacacttttggtttgtcataaaaaataaagtactatatacatatgctgcaagtgaggacgtggccgctttggagagtcagcctttattaggattcactgttattcaagttaaagatgagaattccgagtctaaagtatttcagttactgcacaaaaacatgttattttatgtattcaaagcagaggatgctcattcggctcagaagtggatagaagcatttcaggaaggcacaatattgtagcagtattggtttcatctcttctgtgattccaaagaggtggaatttcatcagaatggagtaaatgcaattcaaaaattgtataaaaatgaacactgccaagataaagccaaccagacccttcatcaaagaaattgttttgttaggtataagcaatttttaaaaggtgtttgttttttcatttatgttatttattaaaattttgatgtttacttaatggtcagaattatttctgagacacactgaattctaaagtaccatttctttagagaccagaaaaactatcttaatactgtatactgtattaactattcgtgacatagttcacactgttttcttaccttacattgtaacaatcttactggtggaaagtctttgtaaggaaaaaacacatagcaaggagcaaatttccacaaagtgcttggtttaggaattgtgattattataaaactgctgatgaaaaaaatgcatgtctttgaatcaataaacttgggtgaatatttgtatcttttagtggaaaaacatggccagcttctacctcagtaactgtgaactgaaatttcagtaaattatctaaagtatttctgttgttaggtacctctttggcaggagttaatattacatcatcaaagaattatagcaaagagatagaatctgaattttttaaaactgtgagtaggaatgaagatgtttttatttgcagaataccacaaataaccaactcttccggcttttaagtccaatcttttaaaaaatctaccacttcgaaacaaacataaatgtatcattttttaaaatagcaaaatatagcaagcattatgtcacataatattccctgctattataagagttctgagcccaagtcaatgatgatatttgtatctataagtaatgttacatttccaaaaatattgtgcattacaaatggaactggaattactatatcagaaaagcataattataagccagtaataactgaaattctatagtattcattttcaaaaggtctttttctgccagtttgtgatatcctccctcctaattaaaaaaaaaaacaacaaatcctttctctataagcagctatcagcacacctccttaggaaagatttagattcataattctggtgcacttactgtttaacatatgaactaccttgcacatacaattgttgattagcagaagaaaatgaaataacactgtgataaaagccatccctgatgttcacaatacacaatttattaactaagtttaaactataaattatcttaactgccatgagcggtggctcacacctacaatctcagcattttgggaggccgaggccgttggaccacctgaggtcaggagatcgagaccagcctggccaatatggtgaaaccccatctctattaaaaatacaagaattagccggtcgtggtggtacatggctgtagtcctagctattcagcaggctgaggcaggagcatcgcttgaacccaggaggcagaggttgcagtgagccgagatggtgccactgcactccagcctgggatgacagagcgagactccatctcaaaaaaaaaaaaaaaaaaaaaattgaacagcaaggttatccatataatatttctttaaagggtacaagaattttcctttctgcctctaaataaaggatttcctaattcagtgtgatccttaacagcaaccatgaggattactgagtgcctttctggggccttttgaatgctgtttggtacagcaccagagtccctactagatctagagttggctgctatagttttttgtggcgattttttgccatggagtcatttgaacctcatacacaatcctaacatgccatcccctttctgtcatagcaggtacactaaaatttctttgtagctcaattttatataatcaagatcacataaataaggcttccatgttagaatcgttgcagtttttagtgtattcctttttggaggctaaagttgtaccttataaactgtttctgcgtctggcatttagcaagacaagttatttgggttttctttccctcctcttgagctctcagccttctgactacaaggtttggcttaagccttataatctaaaaaatatcagccaggctattctatcttctaagacctggctgaatcatgagccagttctaaatctaaagagagtgagagagggaagaaatctggcacaaacttacagtctctttaattacatgtaaaatgcatgtgactgtattacctattggcttagccccatggagggtttagaaaaatgtgtagtctttgtggaagctatccaattatccttctcccaaaaagatgttttaaatgtggaatagtattacattcccctgcccctttatgagtccttcataacttactaaagctgaccaattgttatttatgtaacctggctcattcattgtcaactaagaacctaattatatgcaatttattgtaaaaaaagctataaaaatatattttgctagtattttagaggaaaaatgatattgggcacagtctataaatggggagaaaagttaagtagtatctagattccaaggatactatatttattatacagatatgtgtgcctgtgcttccatcaaaccctttttcaggtatctccttttaattcataaggaggaaagagtagggcatttataaagctaagctaaaaatgatgctaagcataacgtagatgagacgccaggctgaaccaggggaaggctggcattgttagtgtccccaactagcagtccacctttatctgtggcagctataaatgtacaggacccatcagagtcctaagaaaatgagagtaattatctctggcatcatccacatttccgactctttccaatctcttttccctttttctgtaatgtacccagcatccccctattgtattttggttgcccaagattcttgattctttgagtgtgtagtagcatttcttaaaatgagatcatcagaccaacccttgattcacatgaaagctgtaatgacacaacaaagagaaggcgacagttttaaagtataattgtcagccaaatgtgtattttatatttggttcatagaatatatctagatgtggggaaagtctcctatttggtaatttagttaaaatgtaaatgttatatcacagcatatgttggtatgttttggagtgtgcttccattgtgctcagcttttgaaaagtttgaaatccactttagtcaaatgtagtcaatgggatttccagagatacatattgtttttcttagtgtaccacacactccttgaaggcagatactgtacttaatatatcactgtcttccataatactgccctaggtctttttagtttttaagagaccgggtctcgctatgtttcccatgctgaactcaaatgcctgggcttaagcaatcctcccacctcagcctctggagtagctgggactacaggggcatgcaccaccaggcctggcttcctaggagggtctttaaagagaaaatatttgttcaattgaaaacaggattcttgtcatctacaactccaacacagcctgaaaatatccacattataacctggaccttagacctactttctccactatcctgcaaagctacatctgtaactacctattggctatctatatgagtcctcaagcatctcagactttacatgaataaaactcaacttccttcccattcaaatctgtttattttcttctgtaagagaaagataccatttgagactccagaatctgcctctaactctcaacaagactctgcaattactcaagtatcctttccatcctcattgccctgctgttattacataggccctggttcaagtccttgttacttgttcccattattgcaataacttctaattccaatgccgttgtgtgatcccattttaaacacggccagagcagtcttccaacaacatagctctaatctagtttcatccccacttttacatgcctcagtggctttcccagtgacttggcatggaacacgtcctcagttgccatacattccagctaactcttacccaacctttctttgttcacacagtttccttttccttcctcattgacccatccgcatctctgtttatccaagacttctctgtgatagctgacccttagtctttctctcccctattcctccagactagatcctgtctccttcctgcagccccgacacagccttcagttcatatcttttgcatgatgcttagcaccttctatccctaaggacaacttactcatttgagatttctggcagggtaccttgcatgcagtggacactcagtatttgctgaattaaattccttcctatggatcccttctgattttttttaagtgcctctaatacacatatcattctagggctcatgccacttttaatgtcattttctaaaggaaaatcttatctatgatattttcccttataagagatagttgttttgagtagggttttttaaaagataaaggtagtaggaaattttttaaagcctaaatatcaaattcctttccctttggagttgggggaaggaatgaagggggagcaacttgctctttcatatgagttggtcatagcatgtaagaaccaatcttgaaatatcgttttttttttaatggcttataatgtatttctagaaatactttgtacttaaaatgataacagtttgtatctttttgtccatatatactttataaataaaaaaattagcattgtaaataatgttaatatgtatttatacaaaataaatttactataatata

SEQ ID NO: 835 - DNA, 4387 bp, Homo sapiens
gggcggggcgcgagcgagcgcgcgggctgggccggagccggcctggtcgccagcctaacccggcacagtgagcggagcgcctgggcggcggcggcggcggcgtgatggctccggccgcggaccgagagggctactggggccccacgacctccacgctggactggtgcgaggagaactactccgtgacctggtacatcgccgagttctggaatacagtgagtaacctgatcatgattatacctccaatgttcggtgcagttcagagtgttagagacggtctggaaaagcggtacattgcttcttatttagcactcacagtggtaggaatgggatcctggtgcttccacatgactctgaaatatgaaatgcagctattggatgaactcccaatgatatacagctgttgcatatttgtgtactgcatgtttgaatgtttcaagatcaagaactcagtaaactaccatctgctttttaccttagttctattcagtttaatagtaaccacagtttaccttaaggtaaaagagccgatattccatcaggtcatgtatggaatgttggtctttacattagtacttcgatctatttatattgttacatgggtttatccatggcttagaggactgggttatacatcattgggtatatttttattgggatttttattttggaatatagataacatattttgtgagtcactgaggaactttcgaaagaaggtaccacctatcataggtattaccacacaatttcatgcatggtggcatattttaactggccttggttcctatcttcacatccttttcagtttgtatacaagaacactttacctgagatataggccaaaagtgaagtttctctttggaatctggccagtgatcctgtttgagcctctcaggaagcattgatgaatcattccaccaagaaaacaaacaagcacctaccatagacctggcagaataaataaggaaatccttaaagatctacaagttcaaatatgtcatgaccatcacagcagaggagtgactttctgactaatgctgccacccacacagagaataaggagtagggcctgctgggtgtttagctcatggctttatcttatttgtccccctcctcctttcacgctccagtttataaagaaacagagatgatgtgtgtgtatgcctcaaatgcagaaacagttgggcttttcttaacaggttaacagtttgtgctggttataagaaattaaccttcttttctttttgccaagggttgcatgtgaattatacctttcttaatatttgattaaataatgcagtcagctaagagccaacaaaaccccatatccagatagttagctgtgagccagcactcagctgtgtcagatttgattaatattgtattaatctcatggatggttctcaaaggtaaaaaaagagagagaaagagagagagctagctgtgggattctgtgtagttcttcactatctgttccagggctagtcggaggatcataagcaagctcagacctgcccccagttcagtacttgaccacatcccaggatttatggtgtctgtctatggccacagccaaccagaatgagtgggtcatcttataacctttctgaagctccatgaggacatgtatagaatgctgcaccttcagccagctctgctctgatctttgcagatctttaagttgtcactgtttctacggctagacaaatatgactggtggtctagactacccatagttcatcctcctcacataacttatttgaagttgtcagggaatgtcattacactctgatttttaaaattatgcagtattttccagttctcagagaggtcatggttgtgcccagggaagtgtgttgcattaactaaagctaaaattatcagaatcctatttacataaagcatattaaaatatctgctccttaattttctgaaggaaatagatgtaagtttctgctacttgaaacctacagaaccgacaaaaattagggtgctaaaaaaatgacagtgaaatctcatcgtaaggcagctagttctaatttgcatttgaatgtataacaaattgcatcacttttcacaaacttaacacctgcctggagtaaaaatctgatttgacccctctgctcatgtttcatcatatttgtagctctgcatcatttagcatttttatgactttttttgctttatataaattattgtaaaatccagattgtttttaccacatgatgacgtgactcaggattaaatcctgagctacagtttcaaaaggaaaatcatttttttcttatgcaaagatggtaaaacactgttgtcattttttccagtattcaataagtagcctttgtacaaatttaaaaccaaaaactattctgttgtttttcttcacctactagccttagtttttaaccaagtatccaaggatgtcaacttgacatccttcccttagcatgccaacaagccattagactgattcttccacctatttttatgaacctccaggaagaaaaacacttgccaaaacattaagagaactttgattctgccttaagagggtataaaactaaaccatttgaaggcacagcccataagactatacttgattttgccccaagattctgacttctggctacatttcacctgcagttacctgggctatcggccgtgatacattttttaattcatttgttttccaccattatatttttatacttttcagttagatatacttctgcataaagagtatatatacagtgtaggataaaggcatatcgtacatggcaatgctgttaaacatggtaagactgaggttctgcaggattaaagtcagattaagggtacagaaagcacaccttgatactgaggccatttagagcaatttgtttaatgagtggttcagccatcaccaccagtggccacctgttcaataaaattgcctagcaccacagtggagagtcatctacaccccaaggtgagctgtaagactggccaattctttgaagacctttttttctgttgggagaatggaaagcagaaagggaagccaggctctttaatgttccaagtcagctgtgcctcacacaaggctctctttttagctactaagtaacatactcaagactttgtatctgtgcagcattttatggaaatcactggtgacctataggatattactaaattatttcaatagctttatttttttcctacttggattctaggtggacattacagagttgaattcctcactaccccctcccgctgtcatttgttttattggaaaacttcatgttaactagagtgtacaaaaagtctgtttcctgctgagccaatagtgatttgtttgcatatcacctaatgtgaaaagtgctcatctgtgaactctacagcaaattatattttagaaaatactttgtgaggccgggcatggtggcagagcgagactccgtctcaaaaaaaaaaaaaaaaaaaaaaaagaaaagaaaagaaaatataaggatgtaaaagaagcaatttgcttgcacatctgaatatccttcttgtgcctccattttcactcttgaaaactgaaagcaatttgacttttatttttgtttttctaaagaacagctaggtgaaaggaggttaagctgattgtcactctgcctgcccactacctactccccaccatggtgtttcatgaaacatccccaccacctgaagtgatctttttaatccttgtgatagtaaatgcattgataattaacaggaaaaacatgtttttaaataatctacaaatgagaacccaaatagtagtgttttgtttgacagaagtaaatcaaatattatggtttaaatataatgcaaaatttcaggacagttaatttggacttcccttaccctaagagggtttttcttataataaggagaagaggtgtggttcaaagaaaattaagagacaaaaccttcaggtacataatgcatgaaaatctttaaatgcctgcaaaaattaagttctgttataataccagccaattctgaattagccaatgccctaaaagcatctaacaatttaaggttatcttatgagtcctatgaaaacaattatttgttgctaaatttgagttttagctaccaacgccatgtttacgtgacaagaaattgttttggccctgtggtttatgacgtgctgctggataagcatttatgtaaaactgagtatttcaaagagaaccatttacaattggaatttccacctgtgtggctgtttgcagacctacctctgtcttccattttgcatcctgtcagtgctataattagtttgatcactttgtcttgtttttcagtgtctacaattatagcttattcactatgttctaactatttaaaaataatgggccgggcgcggtgg

SEQ ID NO: 836 - DNA, 7074 bp, Homo sapiens
cttttccgggtctcgaggctgctgaaaccgaaaccgctgtgctgtgggcgcagcgccgagattgattcaccttcacctgtgctgcactccagctgacccaagtaggaagccagacgagctgtaaaacatgaacggaagagtggattatttggtcactgaggaagagatcaatcttaccagagggccctcagggctgggcttcaacatcgtcggtgggacagatcagcagtatgtctccaacgacagtggcatctacgtcagccgcatcaaagaaaatggggctgcggccctggatgggcggctccaggagggtgataagatcctttcggtaaatggccaagacctaaagaacctgctgcaccaggatgctgtagacctctttcgtaatgcaggctatgctgtgtctctgagagtgcagcacaggttacaggtgcagaatggacctataggacatcgaggtgaaggggacccaagtggtattcccatatttatggtgctggtgccagtgtttgccctcaccatggtagcagcctgggctttcatgagataccggcaacaactttgaaaaacttgctctctttcaatactcccaatgaagatacatttcactcaccctccacccctgctattctgccatgtctttccctctctctgcatagccagatttgaagtgactgatacccaccccaaaccttgctgttcacagtctccaattcttcatattctaatgggaaagtaaaggtattgtttgaaggaaaactgaagaaaagacttggcttagaacaaatgaggagttatatattttactaggacttttgatagaaattcagctacaacccaaagagagaaagattgagtcttcctgtcaccataggcaataccttttttcttagctggcatgccataaaggccagctatgtgatattagaggaagaaaggatttttctttttaatgatcttccttgggaaattattgtggcctttatttaatttctaactacgtacctgggtgcctatatcgacaaagagtgagaagagcatttttacttttttaaaaaagcaaatacatatatacacatacgtatgcaaatattatagtataatagtgatccctatggagaattaaaggtgagaaagctactttgtggtgtctaggtttctgataaaagggatgatcttaactgaagaatttaaagagatacttaaacagagcaaatgtagtaggaacaagggagtgagccttataagaggacgttcagtctcatttattaaaataataactgagactgggagaggtggctcatgcctgtaaatcccagcactttggtagcctgaagtgggagattgcttgagtccaggagaccagcctgggcaacatagcaaaacctcatctctatttaaaaaaaaaatagaaaaaaatgtaataactgaagcaactaattaaaaatcttagaagaacaatatttattcttataacagccaactatggtgagttattataaggtaaattgccataatccagcgctgctcacatctaaaaaactttgaggtgtaaaggtaaatcgtaccaatctctgggctgccctagtgacttttttgatacctcagagtcctattgaagaaccaggtggaatgattgtggtaagggctatagtgctggagccaaacaccccagcaagaaaactctaaaaggacaaaagataaggtagtgcctccaaggtggcacctgaaccctctcaggctactttttggtttctactaacaaacctgagggaaggaactgcctccctggcaggatgggcatcaaatcaactctggcttcagatttagttaaaatgaggccgggtgcagcggctcacacctgtcatctcagcactttgggaggccgaggcaggcagatcacaaggtcaggagttcaagaccagcctggccaacatggtgaaaccccatgtctactgaaaatacaaaaattacctggacatggtggcgcgttcctgtaattccagctactcaggaggctgaggcaggagaactgtttgaaccaggacctgggagacggaggttgcagtgagccaagatcacgccactgcactccagcctgggctacagagcaagactccatctcaaaaaaagaaaggcatggattgctagtatttttgaaaggctttatacactacatacggcttttaataaacctttttgcagcaagagggaggaaaagagttttgtttgctttaggaggtagggaaatgtggtaggtgtttcatgcggcctaggaggaggatatgaatgaatggatactatggaatgccagtgatctcgataaggtgggaaccatcctgttcatgttcttttaaggctggttttaagcactatgggtagctgaattttctggctttaagaaaatcatttccattagccaaatatattggccatactataggccttttataattttgttagcaagattatcaggactcaggcaatcaactgtatttcatttctagcttggacagtctggtaattaaatgttgattggacatcagctttgtcaagacacttttacaaagaagtacagtgcatatcctccatcccatagggcttttgggttccaactgcgaagacaacactcttattggccacataggtaggacagtgtaagtaggggtcatgtttatattacagacagcaaaagagaaaagttactgagaactggggcgtttgagaaagttacgtggaggaaagggacaagttgaagacccttaagggcctcacagcctagttaagagaattcataaacaggtgagaagttaaaagtatatcagcaggctaagtattgaaaacaatattaaaggggtaccatgcaaaacacgatgcagcaacaaagaagatatgcaggtaatcatcacattttcttttagaaattcagggaaaaaaagatgtcacataatggcatcaggctcaattggaaagggaaggcttttgaaaataagaggtccggtaagaccttgcctctgggtcactactggtatagggagaaacttgctttaaacagtcctgacataaagtgccttttgacatcaactattcaatacctttgagactcacttagacaactggactcattgtaggttccacagaaaaacacggacaacattctagttgtcactccaaccagccacactaggagggcacagcctctggtaccctttctgttcctgaaggcatgtacagcggcttctacagcaagcttgcttacctcccaggattcacctcatggtttggacactgattcctgagagagccttgagacacacaaagtgaaaaaaatgtcaagcaggaatgaaagctctagttttttgcttgttggtatatgtaaatttgtttaaaaagtatccattctgtcgttggtagaagttttgctttggttgataatagagattctgatgtactcttataacttaggttttctcagaaattaagtagcattgaagatcaatgtaatacagttttaagcaggtacactaattatattattgattctatagaaaactaaaattatagatgaggtatcaggatccattataggttgtaaaaaaattcatgttcttcatagattgagtctaatatttcttctatagattgcatctaatgttcctactacctaaattattacgttcaaagttttgaaaattgaacgaaggtatttttaagtacttaaaacatttctctatcattctgtattacatgtataattataagatattgtttgcttcaactagctgtactttgttttcctgtgaagtttcaacttatgtgttatcgatttaacttaattgttccatctagccatgtataatggaaaaaggaagttaatatttgttattgtgttctatgccagggactgtaccaaactctgattggtacattatttcatgtctcataactctgggatctaagtattgtcacaaagagactaaaaatgagagaaaaaattacttgactaggattatgtaggtggtaataatagaatcaggatttaaactcaggacttcagatgccagcatcaatgatattctctcactggaagtggttctcaaagcaaggtcctgacaaaagcatcagcgttactggggaacttgttagaaaagcaagttcataggctgggcatggtggctcatgcctgtaatcccagcactctaggaggcctaggcaggtgggtcacttgagctcaggagttttgagaccagcctgcacaatgtggtgaaaccctgtctttactaaaagtcaaacaaattagtggtgcattcctgtaggcccagctacacgggaggattgcttgagcccaggagactgaggtgcagtgagccgtgattgctccacttcattctagcctgagcaacggagtgagaccttgtctcaaaaacaaaaaaacaaacaaacaaaaaacaaaaagcaagttcccagaagagaaaaaagaagttccagacctagtgaatcaaaaactctgagcgtggcatctcacaatctgtgtttttgtaatccttccaggtgactgattcatgctaaagtttgagactcattgctctatgccagtcatcattccctttgctcaggttagaatcatctggagagcttataaacgtccccatgcccaggctgcacacagatcaattaaaaggaacctctgagggtgggactcaagcagcagtaaaataaagttcattgagtgattctggtgtgcagccgcagttgaaaatgttatatagcatttaaacaagacactatttaattaaacactatttaaattattaaattacatacattgcttcaggcaaaacaacaacaacaacaacaacaacaaaaacttgggcctttagagcccagcttcctgagcttctgcacgaagtaagtggaacattcatttcttcctgatttgctaaggattgatcaacctccagcaaaatgtatgattagtgagtgtttcagttggtgcatcaattaaatgagaaccaatcatagaacattgaagctaaaaaggaccagagagcttctaggatgaatctgtcttagagatgagaaaaataaaggctcagagagggaagctaacttaactctgatcagacttagtttgttgcagaagtgacctttctgtctcatatttatgtcttgaatatattcactacatgaatacacagactacccattttatcttagtctacttctttcttctctctttgggcctgaataaagaccagaactgatagacagctaaaggatattgcaagcatcattattggaattgggagattccacagaacaatctgagaatgatctcatatcaaatccaatcagatgagttattctgagactaattccaatagttctagagacttttttttttatggtggacattgtttttattgtgtaaataagcaatttttaaagtatatttaaagaaatgaaacataaggaagtgtataggctgtcaggtatgtggggaagtgaagttcatgtagttttcatgtggagcccatacagattttattatagtcaattttagtgaaatttatcgttggtcagatgaaggtttttttccttcattcagcaaataactaatgactgcctactatgtgctaggtgccgaagatagagagataaataacacttagtcactctaagctgaaattgctcagcatatgaaagtggaggaatatttgtaggtgattttgatgttaaagtatttttttaacatcacctggtagtagaagattgagttatgaagctgtctacctctcacctgtaatagttttagagttggttgctattttggtgtaagtcttttttgctgttcctcttttaactgcaaatctttttgagaccagcactcacatccaaaagggcaattgtgataaaaaagaagacagtattttaaggattctgatcagaaccagattcttttcttttcttttttttttttttttttttttttttgagacggagtcttgctctgtcgcctaggctggagtgcagtggcacgatctcagctcactgcaatctctgccgcccgggttcaagcgattctcctgcctcagcctccccagtagttgggattacaggtgtgtgccacaacgcctggctaatttttgtatttttagtagacacggggtttcagcatcttggccaggctggtcttgaattcctgacctcgtgatccacccatctcggcctcccaaagtgcagaaccagattcttaactgccacagactcttgtattatgtaatttatatacagaacacaaagcacttgatttgcttaactgatgtacttgatgatactataaaacctatattatgagaaagcattgctccttcaaaggaatcaagtgatagcaaacactcggtcctgtttccaggttttcctcactgttcattttgcctttgttcttgcagggggagaatgaaaggggcgagagctaaagtgtgttgtcaatgcaagtcaatccttaaccaacaataatttacaaaagaactttatatttgctgtaatcattaaatttagttactaatcccaggaaaagggttagtccttcctcctagtttgtagatttgcaaatggagatgaataattgaatcctattttaatcttttatctgcagtaatctgggcttcttattaccggatatatttgcattttacctccaggccatgttagttcttagaagattattttcctcatgaaccctgttttgttttgcttcctttctgcttcaattctaatgtcacattgcatacctggatgtaaacagcagtcagtttctcagatcaaatagagccctgtagcaacttggaagacacagaagacacacggacataaaactgtatttattatccagggaatgtcactacggattaattatgttaatgaggccatcaaaatctatggtaatctttcaggctttgttgtttgataccagatacagcaaatgagataataatgtgtctaattgtgcctagccagtattggtatttaataaaactttgtcattgaatctttacaaaaaaaaaaaaaaaa

SEQ ID NO: 837 - DNA, 10759 bp, Homo sapiens
attctccgcggcgcggcggcgagtgctggctgcggtaccctcccgctcgcttgtccgtctgcgcgcccgcgatgtgaccagccgactgggggcgggctggcggctctgcctgcggcagcgcatcggtttttctcctggcaggtccctaattgagccgtgattcccttggagccagagacacccaccaggggctcggagcgccgcgctccggggctggaggcagctgcagcgctcgggtccgcgcggccgggtgcagtagcctcagtcccagccgccgcctcgctgagtcgtgtgccctggcgaatgcccggcgcccggcacagctgagccaaggcgactggtgcagagcggcggcgcctggtcctgcacttgccgctgctgccgggctgtgccggggcggcggcgctgcgcgccggagtttgcagaggctgcctccgagcgccgtccgccaggaagactccctgcctcctgagtcccaaaaacacgagatttttctcctatttcagcagttggccacaacttcattgctgggaaaaggccaagaaagaagagagaactctcaccacaacatttcaaagggaatacattgccagaacttggaatactctactggacaaacatttcctccaaggacacagctctctgcctccatgtcaccacctttgaaggactgactgattccctcggctggtgccagtgcctgctcctgccatggggcccgcggggagcctgctgggcagcggacagatgcagatcaccctgtggggaagtctggctgctgtcgccattttcttcgtcatcaccttcctcatcttcctgtgctctagttgtgacagggaaaagaagccgcgacagcatagtggggaccatgagaacctgatgaacgtgccttcagacaaggagatgttcagccgttcagttactagcctggcaacagatgctcctgccagcagtgagcagaatggggcactcaccaatggggacattctttcagaggacagtactctgacctgcatgcagcattacgaggaagtccagacatcggcctcggatctgctggattcccaggacagcacagggaaaccaaaatgtcatcagagtcgggagctgcccagaatccctcccgagagcgcagtggataccatgctcacggcgagaagtgtggacggggaccaggggctggggatggaagggccctatgaagtgctcaaggacagctcctcccaagaaaacatggtggaggactgcttgtatgaaactgtgaaagagatcaaggaggtggctgcagctgcacacctggagaaaggccacagtggcaaggcaaaatctacttctgcctcgaaagagctcccagggccccagactgaaggcaaagctgagtttgctgaatatgcctcggtggacagaaacaaaaaatgtcgtcaaagtgttaatgtagagagtatccttggaaattcatgtgatccagaagaggaggccccaccacctgtccctgttaagcttctggacgagaatgaaaaccttcaggagaaggaagggggagaggcggaagagagtgccacagacacgaccagtgaaactaacaagagatttagctcattgtcatacaagtctcgggaagaagaccccactctcacagaagaagagatctcagctatgtactcatcagtaaataaacctggacagttagtgaataaatcggggcagtcgcttacagttccggagtccacctacacctccattcaaggggacccacagaggtcaccctcctcctgtaatgatctctatgctactgttaaagacttcgaaaaaactccaaacagcacacttccaccagcagggaggcccagcgaggagccagagcctgattatgaagcgatacagactctcaacagagaggaagaaaaggccaccctggggaccaatggccaccacggtctcgtcccaaaggagaacgactacgagagcataagtgacttgcagcaaggcagagatattaccaggctctagcaacccagaagacaaccctgggtagcctgtgatcagtgtctggagacgtttcttctgtggaagagaagaagtgacacaaacctatacttcatatgctgctttagtcacctgaagatggttggagaggccctgtcgactgttctcccagttgttcagtttctgagacagagaggtacggactaggctgcacctgagtgtgcccctgcctgccagatggacaggtacacccaagcacatctccctgctgcaccctcaccacccacaaaagatcccagctgtcagtggtctcatctcattagtgaggaaagccaagctgtatggaaaagctgcactcaccaaggaccacaatgcccccggcctaaagtactgccattcagaaaagcaggtttttcttcctctctttccttttctctgtctgctactgactttaaggctttttcccccttgaaatgtccagattcctgtggttcatcccaaggaaattttcacacaaagcttggcctttgccctcaatataggtgttttaggatggtgacaaaccatggctgctgctttctgcccagctcgccagtcctccccaaagagttgcgcatcagcacctggggatctggaccctgcgggtgaagggatggggagggacgtccctggagtctcttctgtctttgttccttcttattttggcattcgatatcagcagcctctccccaaagtacttgaagtcagttttagatgctttattttatttttctagtcaaaaacgtgtttcccccagtgtttgaaaactcgtccgaatcttttcagtattttccatgagtattgtggtacttctagacttgtttaagcccagaactcattccttcaaaacagagagccttaatctttatgttgggacacagaccacatatttggacggcagccatgcatccatcgctgaagggctgtggacatgaatgtgtatttcccatggtctccgctgcccacaccaacagtgtggcatctcataagttaactgctaccctaaggtaatctaagattaaaatgtaaacatttatttttgttatgtaagtttataagatgttttatgttcaatgcctaatttctcaaaagtgccagaaaaaaatgtatattagctattttgattttatgtacaatgatttatactctccttttgaaaagataccataaagcacataagctagatcactacaaggagctgttatcttttttctaatcaagtgtttaaaacactgatggtttttaaagactcacctttttaaatggtacttggagctcctgattcaaattacctagaccccctagagaaataaatggaatatacataaataatcattttcagtggtttatggtgggcaatattgcaatatttgaaatggtaaaaatggaaagaagaacaaaatatgatgagaggtggctgtgaattataaacctcataaaagtgtcataattccattaaggtttaattatattttttcagaaaacagtgatgaattctgtagtccagtgcttgccaatgcaaattgcctattggaatcttcttcctatattttacaaacatcagtggctgaaatagctcagagtaagagctcagcctggtttgaatttaatcatctctttagatcttataaggccagcattaggaaacttgttcacttttcattttcaaaggagcctagttgaagtgctattatgagtgtgggctatggaaagacagcttttcctacactgataaagaaaaaaaatgaggaaattatttcatccccttgtgacatctgtgactttttggatttaataatcttgctgtttttcctctttatgacaaagaatataattgggaggatgaagtgtcttaaaaattgtagagaccagctcactggaatgtttttccatccctgtattcatggcttgactttgtgactgctctacactgcatgtctgacattgcagagtgagctatgttgaggtaaactggttggttgtcattattttgcaatcagcctggtctctcccatgaagatgtcgtgtgcataagcacaatcatcactgattagaagatcacagcagaatacccttggattagagagaagttcgtaccttgcatttctctgaattctagtctctcataagcactgctttgctggatgattttcactgctttgtgttaatgactttgagcgatctctcacatgatggggttctttagtacatggtaacagccatgtcatcttacacacctagcattgtgaatgctgtagtgacatcctttataggcaccttacagctcaaaacttttgtttcatttcatgccttacttatcaaaaaggcaggaaagtaggtatgatctctaaagtaaaaaaaaaaaaaaaaaaaaaactttttatagaaagctcataaataatcatgtcattttgcaattttgttaccaaaatttcccccaagagttttcaaatattagttctgcaatgtggctatgaaatatgcactgaaatataccttttaatttgagaaccagtggttagaataagctgtgatataaagtattttcagtgtacttttaaaggaactataaggccctccagcataaacgctaaaagaatagatggtagcacaggccatgagggctgggggagagaagcagagtgaaccttagaaagatggctcagctatttggagcactggatattttactgaagttatttactgaggcaccatcactgttttgactgtacagtatagtttttcataaatttcatcacatttactttgttcagaatctgggcttgaatctttgagttggacaaaagcctatggtttcttttaaaaagtttcatcttgagctaatgctacagtttaaataaaatgtatgaaaggtagttatcaaaaacaatttgtatatttaaaattctattttgacatccattttttacagcgaattatagcaggttatgtgaaatttaaaaataaattttaggaaatttttttatcttgtaagtaagaattataaatctatctcagttaaaagtaggatctttgtttttattcagatattttgaaagtttagaagcattttgtatgctactttggtatttcttaagtatagtcagcaggaaagggtaacctgttttatgcaaaatttttttaatttgtcaaatgtttttagtgtgtctactttctgaaatagtctcaatatcctgtctgtatcctaggcagataactacacaagaacaaaacgctatatagaaaagaaaatatttgaggaaatcttaaattccataagaaagtaattcttgcaagaatgttggctacatatttttttttctgtcctgaataaattacatcattaggtctgttgaagcttttgaagctaccactattctttctgggataaaggctaattactgatttatctgccctcaaaatcccagagttaattctaattgagtactaaattaacagtaagtagttaacacagagaactaaaatttaaccgcattatatcactgtatatatttctcatgatttttgctaattagagcatttacttaaccagtaataaactacacacacacacacacacacacacacgtatacgtgtgtgtgtgtatatacttggctctgacacaactctggtgcttaattaggatatgttctattatgtattttgaatgtttatcctgctagtgtgatgaacttttgttggaaaagcagaattagaaggaacagtttttcaatcagtttcatttggtaattacaggaaaaccttgagttgctctaatttaatttttccaattaatacatttagactttaaattgcatccgtaattctcttggctgaaaaacagtggtattttaagacagttttgttatacatgtgacttacttttgactcagcctgagaggaggaaatgtaaagagataagagatttggcccaaagcagcaagagactagtaaccttgagccaggacgaagccaagacaacgtgactcccaagtagcaggagcagaggtcggtcacctgtggcattctgtttcattcccttttaaaattatgagactttataggcagtgtaaaacatcagcaggcagcgatgtgataggatgtgcgaaaaagctggtctgataccatggctataattacagagctttagttcaattaggattttgtaaatgagcaaatgacctttttttccagtgccccttgtaatagttaatatgagtccatgcaatcttgtgatgccattctcctgaaggtgttgatttctggtacccagccagcttagctttggctgctggaagcacagtaggtactgatgattacttcctggaaatcttgacaggcttattgtactgtgtaatggggaaaagttaaagtataatgtttggtgttaataaatgactgatgtgaaaataggaacatgtgtctttaatatcaaatatggctttatttgcagtgaaatctaaattccttattctacagtagtattttcttgccctgtgttgtatattttcctaaatacatttttcctgacagtggctttaggccagttgaacacacttagactgaaagtgtttaacttaaagagatcagtccagaaaccatgataaattagaatctttatctggaattaccaaattaaaatttaaaatcatggtccagaagagaacaaacattcatggttttttttatcctactgctcatttttaggtctgtgtttacatctagtctctactatttgtgaagtatgtcattatttttttcaagttcttctttgacttaactgaaaaataatattccaaattcttaatgtaacatgaaaagagaaatacaatttttgcttaaaagacattttttaaaaagcgttcaattcagtaatcatttctgttaatacaggaagtttttttggcttgccagttatatactgtgggtattttttaaaatgtgctacccttgggttgtctcatatcaccttgcgtaatcatgtattacaaaggttgataattgtcatttctcagatgtctgtatgttacattggcagcagtaaaatgttttaatgttgttaccttttaaataattgtgttgtattaacatgcctcatattttctggggaaacttgaaatatatctaaacaaaaaaggtctgttataaataggaattggcatttcattgttaatgttttttcctcataaaaatagttacaccaaaagtgacatattgtctattacatgggcccaatcagtattaaagtactccccttactcaaaaatattaaaaaataattcatgacacttagtagcattttcattgattgtttcaaaagatcttcataatggtcaaattgtccaattcacaaaagagtgagaaagttgttttcagtactgggaatttttaaaccttagttttaagaccaaaaatatctcttattagcttgaacattttgtgattacttttccctccccggatctagtccttttaaggagtaagtctaaagaatgaggccatgaagtcactatttcctcccacctcagtttgtctcctggtacttagctggcctatcgctttgtgtggcaatacccctgggtcgcttccccactcagccttctgtatctgctgttcacaggacatgccattatgtctttccagtacggatcacagtgctgccatatcacagaccctgccagccggcacagaaccatgcctcgtcacagctctgcccaactcacaggctgccaagatgaggccacaggtccacctagggcggcagatgctggtgctatttgtcacgacttttgccaaaacatgtacactgttgctcacatctttcgtaagaatggttgacactaaggggccatggaaaagcacttttaaaaaattatgtggtggaatcaaactcacagaggcagaaatgttagtgccgtgctctaaccaagtaagcttagtgttccccacagtgatctgtatctggcctgagtctcctcaagcagcaacccccactgtccagcatgtggaaggtagatccttatgacaacaccagacccatagttaccaggaaagaaaaaggaagctgagtgttgtgaaggggaagaaatcctttttataagaagtaatcatttttaggccgggtgcagtggctcatgcctgtaatcccagcactttgggaggctgagacaggtggatcacttgaggtcaggagtttgagacctgcctggccaacatgatgaaaccctgtctctactaaaaatgcaaaaaaaattagccaggcatggtggcatgtgcctgtagtcccaactactcaggaggctgaggcaggagaatcacttgaacctgggaggcagaggttgcaatgagctgagatcgcaacactgcactccagcctgggcgacagagcaagactccatctcaaaaacaaaaacaaaaaaaaaacctttttaaagtaaattgagtgtaaaatgttttcaccatgaagccattgcaccctctcccccaggaaacagtgcctaaggatgatgtcaagttacagccagtttgctctgatcccccaggacctaagaaaactgtgagtgcttcagcatgcaaaggtagagctaccagataaggagaataacttggccatttatagcaaactgcctgactttggagtgagaaaccaagcaccttctaggtcctaggataggtgaattggaggtgcagctgctgaagttcccattttctacatacttcaggagccagggtgtttcatttggttttgtaaaactttgctgtaagtcatcacagttaattctttgaatggacattttagagtgtaactttttttcaaaattagcagaacagatatctctgctcattctctttatacatttagttttttaaagttcccctagtatacctgttaggcactctaaataggacacagttaaagctaaaagaaggaccagttgctccctagagcctacagttcagaactatcttgttgtcatgtcctggtttggtttggtttgtttttaactcaacaagttggaaaccatgagtttaaagcaaactatttccttttcttaagcttaaagagaattttttttttaatctttagctcctcatttaggtagtgaaggcttccctgaaagacagcagtgcccttctctggaagaagaggctgggaccaaaagcctgagtctatgggttgaggattttgagcattcctttgacaagcttctatgtatttttaatataagactcataaatgaacctgatgtggtgttcatgacccatcccttaagcatgcttgctttttttaactttactttttgagtatagtacttgtcttgtttttcctggagccatgctaggatttaattcctatgtgccactacccgcccatgtcctggaagatggccatgcctgcagcaatgctcatgtcttgaggagaagcaatgtgaaaagcatcaggaaagctgaaccttacgttcaagtcagcaaacatttgtgagcattctagtatgcttgcgaccttgacactttttaaaaattatctttttatttgcttcgagtatcaaccgtatagttgactctagtggggcgaagggagcagagatgagagcaaaattcagacttgctgcccctgtgtgtctcagttctcatgtctctctgagaaatgtgttggcccaattccctatctgccactctgagtctcttgagtaaatgtgtgtaaatgagaaaaattatctcaaagatttaacttattatttagatattttcttctttttaaactcaggaataaacctggtttgtagataatataatatggctactagagctataattgagtaggtgactagaagcattttttcaaatatatttcttgtaaagacatctactttgttttaactaggaaaagaaactcctcatattaaaataaacatttccataagcactttctagaagagtgtagcatccatctaccatccatcccagaatgtttgtatcttgctcatagtatttcaaaaatttttatgggtgaaaaaaatgcacttttttatttattggaaaagtgtagagttattgaattaaattctcaagtgggacaatttagtgtaaagggaaacatgggttttggagacaagagcacagggctgtggtccctgttccagcattgactttactatgtgacctcgagcaaatgatttaacttctctgtgcctcagtttctccatatacaaaatggggataatgatactaaccattgcctacctcatagagatgttatggggacaaacgaaataatagagataagcacgaatgctttcaactcttcggaagaaaggtgctatataaattgaagttgtgtttttaatgatccaattattaattatgtttagggtttaaataacaatactgttagtcatgttaagaataagttttgttttgatgcatatttccacttctcttctgtggccagatcttgatcattcaaccagtaatggtacctgaggaactgaaatgggtatttgttttcgtatgtttctgccagtagtatttcaattgaatatccagaaaagactggagtttaacttgtaatatcttatagtttacatgtaataaaacttattcaagctatatataaaagtatgattacatgtaaatagcaggtatgttgtaattaaaggcacttatcaaattgtctttgttcttttttaattgtaataaaagtcagttttacataaaaaaaaaaaaaaaaaa

SEQ ID NO: 838 - DNA, 2451 bp, Homo sapiens
gtcgccgacgcccgagcgccggagccccggccccgccccgcgagcgccgagacttgttggccgcggagactgcgaccctcttctctcagtctgccttactaccatgccgctctacgagggcctggggagcggcggggagaagacggcggtcgtgatcgacctgggagaggcctttaccaagtgtggatttgctggagaaactggtccaagatgtataattcctagtgtgataaaaagagctgggatgcctaagcctgtcagagttgttcagtataatatcaatacagaagaattatattcctacctaaaggaattcatccacatactatatttcaggcatctattggtgaatcccagagaccgccgagttgtgattatcgaatcggtattatgtccttctcacttcagagagacactcactcgtgttcttttcaaatattttgaggttccatctgtcttgcttgctccaagtcatctaatggctcttctgacgcttggaattaattctgccatggtcctagattgtggatatagggaaagcctggtgttacccatatatgaaggaatcccagttctaaattgttggggagcactacccctaggaggaaaagctcttcacaaagagttggaaactcaactattggaacaatgtactgttgacacaagtgttgctaaagaacagagccttccctcagtgatgggttcagttccggaaggtgtcttagaggacattaaagcgcgtacttgctttgtaagtgatctgaagcgaggactaaaaatccaagcagcaaaatttaatattgatgggaataatgagcgtccctccccacccccaaatgttgactatccattagatggagagaagattttacatatccttggatcaatcagagattcagttgtggaaattctttttgaacaagataatgaagagcaatcagttgccactttaatattggattcccttatacagtgtccgatagacaccaggaagcaactagcagagaatttggtagtcataggtggcacttctatgttgccaggatttctccacagattgcttgcagaaataaggtatttggtagaaaaaccaaaatataaaaaagcacttggcactaagacatttcgaattcatactccacctgcaaaagctaattgtgtggcctggttgggaggggctatttttggagcattacaagatatacttgggagccgttctgtttcaaaggaatattataatcagacgggccgtatacctgattggtgttctctcaataacccacctttggaaatgatgtttgatgtcgggaaaactcaaccacctctgatgaagagagcattttccactgagaaatagaagtttgattaaaaatcaaccttgcttcatatcaaatatttaaccaattataagcaaattgtacaaagtatgtaggatgttttgttatagaggactatagtggaagtgaaagcattctgtgtttactctttgcattaatatataattcttttgactttgtttctcttgtgtagtggtaaaatggtagctggtgcttattgagatttgctgtatttatatcaataaagtatagtaaagcagtttgattttggaagtttgttatgtggctttttttttttttttttttttgagacggagtctcgctctgtcacttaggctggagtgcagtggcacaatctctactcattgcaagctccgcctcccgggtttacgccattctgtctcagcctcctgagtagctgggactataggcatacgccaccccgcccggctaattttttgtatatttagtagagacggggtttcaccatgttagccaggatggtctcaatttcctgacctcgtgatccaccctcctcggcctcccaaagtgttgggattacaggcgtgaaccactgtaccagcctatgttgcttgtctttcaaaaagaacagtatttctccacagttcacataacctgttctgggctcattaattgtgtttccagcagttactccatttaaagcataaatagtgttaaccattaccagttatttcaaatactaacatgggtccatttaaaaaaaatatttattttggtacttgggtgtccatattataataatgttgtttttccagaaatatatttgatctttggactgagaatgtttggtaacatagtcaagcatttgttaagccaagtgtggaaatgttcactttttaactttacagtttttttaatgagcaattctacatttctaagaaaaaagatacttcatttttatataaggttacaactgctttataaaaatgtattcacaatgtcattaatctttgcgtttgtgctttatatcttctcagggcagaggttcttgaaatatgtactcaatcatttaacttttattttattttttcatttgtttttaatgaactacctcttgttgaaaaaaaaaaaa

SEQ ID NO: 839 - DNA, 5248 bp, Homo sapiens
gcgtgcaaccctagaagggaaaaggacgggaagagattgagccgcggctgggagacagcgagccagagtctgggtgtttgtgcgagagccacggcgggggctggggcgagtggccggcatggctgaaggctgcgctctgcaaccttgaagagccgctgcattgagaggccagggacagggagaccggtgcgatggcagagcgcggcccccgccgctgcgccgggccggcccggctggcctgagccgccggaggagcggggctgcctctgcgcgtccatggagcagcgggaagggcgaaactccggagcgccgcgtccctgcgccgctgcggcggactgctgaaggggccgagcccgcgcggaccgccgaggaagagacccccgctccagcccgcaggccggctgcccgggggcggcgggggacatcggagggcagcggagcgagcagcgccgcgggagaggccggcgcgggaggcggccgcagcaatgccgggcccgctagggctgctctgcttcctcgccctggggctgctcggctcggccgggcccagcggcgcggcgccgcctctctgcgcggcgccctgcagctgcgacggcgaccgtcgggtggactgctccgggaaggggctgacggccgtgcccgaggggctcagcgccttcacccaagcgctggatatcagtatgaacaacattactcagttgccagaagatgcatttaagaactttccttttctagaagagctacaattggcgggcaacgacctttcttttatccacccaaaggccttgtctgggttgaaagaactcaaagttctaacgctccagaataatcagttgaaaacagtacccagtgaagccattcgagggctgagtgctttgcagtctttgcgtttagatgccaaccatattacctcagtccccgaggacagttttgaaggacttgttcagttacggcatctgtggctggatgacaacagcttgacggaggtgcctgtgcaccccctcagcaatctgcccaccctacaggcgctgaccctggctctcaacaagatctcaagcatccctgactttgcatttaccaacctttcaagcctggtagttctgcatcttcataacaataaaattagaagcctgagtcaacactgttttgatggactagataacctggagaccttagacttgaattataataacttgggggaatttcctcaggctattaaagcccttcctagccttaaagagctaggatttcatagtaattctatttctgttatccctgatggagcatttgatggtaatccactcttaagaactatacatttgtatgataatcctctgtcttttgtggggaactcagcatttcacaatttatctgatcttcattccctagtcattcgtggtgcaagcatggtgcagcagttccccaatcttacaggaactgtccacctggaaagtctgactttgacaggtacaaagataagcagcatacctaataatttgtgtcaagaacaaaagatgcttaggactttggacttgtcttacaataatataagagaccttccaagttttaatggttgccatgctctggaagaaatttctttacagcgtaatcaaatctaccaaataaaggaaggcacctttcaaggcctgatatctctaaggattctagatctgagtagaaacctgatacatgaaattcacagtagagcttttgccacacttgggccaataactaacctagatgtaagtttcaatgaattaacttcctttcctacggaaggcctgaatgggctaaatcaactgaaacttgtgggcaacttcaagctgaaagaagccttagcagcaaaagactttgttaacctcaggtctttatcagtaccatatgcttatcagtgctgtgcattttggggttgtgactcttatgcaaatttaaacacagaagataacagcctccaggaccacagtgtggcacaggagaaaggtactgctgatgcagcaaatgtcacaagcactcttgaaaatgaagaacatagtcaaataattatccattgtacaccttcaacaggtgcttttaagccctgtgaatatttactgggaagctggatgattcgtcttactgtgtggttcattttcttggttgcattatttttcaacctgcttgttattttaacaacatttgcatcttgtacatcactgccttcgtccaaattgtttataggcttgatttctgtgtctaacttattcatgggaatctatactggcatcctaacttttcttgatgctgtgtcctggggcagattcgctgaatttggcatttggtgggaaactggcagtggctgcaaagtagctgggtttcttgcagttttctcctcagaaagtgccatatttttattaatgctagcaactgtcgaaagaagcttatctgcaaaagatataatgaaaaatgggaagagcaatcatctcaaacagttccgggttgctgcccttttggctttcctaggtgctacagtagcaggctgttttccccttttccatagaggggaatattctgcatcacccctttgtttgccatttcctacaggtgaaacgccatcattaggattcactgtaacgttagtgctattaaactcactagcatttttattaatggccgttatctacactaagctatactgcaacttggaaaaagaggacctctcagaaaactcacaatctagcatgattaagcatgtcgcttggctaatcttcaccaattgcatctttttctgccctgtggcgtttttttcatttgcaccattgatcactgcaatctctatcagccccgaaataatgaagtctgttactctgatattttttccattgcctgcttgcctgaatccagtcctgtatgttttcttcaacccaaagtttaaagaagactggaagttactgaagcgacgtgttaccaagaaaagtggatcagtttcagtttccatcagtagccaaggtggttgtctggaacaggatttctactacgactgtggcatgtactcacatttgcagggcaacctgactgtttgcgactgctgcgaatcgtttcttttaacaaagccagtatcatgcaaacacttgataaaatcacacagctgtcctgcattggcagtggcttcttgccaaagacctgagggctactggtccgactgtggcacacagtcggcccactctgattatgcagatgaagaagattcctttgtctcagacagttctgaccaggtgcaggcctgtggacgagcctgcttctaccagagtagaggattccctttggtgcgctatgcttacaatctaccaagagttaaagactgaactactgtgtgtgtaaccgtttcccccgtcaaccaaaatcagtgtttatagagtgaaccctattctcatctttcatctgggaagcacttctgtaatcactgcctggtgtcacttagaagaaggagaggtggcagtttatttctcaaaccagtcattttcaaagaacaggtgcctaaattataaattggtgaaaaatgcaatgtccaagcaatgtatgatctgtttgaaacaaatatatgacttgaaaaggatcttaggtgtagtagagcaatataatgttagttttttctgatccataagaagcaaatttatacctatttgtgtattaagcacaagataaagaacagctgttaatattttttaaaaatctattttaaaatgtgattttctataactgaagaaaatatcttgctaattttacctaatgtttcatccttaatctcaggacaacttactgcagggccaaaaaagggactgtcccagctagaactgtgagagtatacataggcattactttattatgttttcacttgccatccttgacataagagaactataaattttgtttaagcaatttataaatctaaaacctgaagatgtttttaaaacaatattaacagctgttaggttaaaaaaatagctggacatttgttttcagtcattatacattgctttggtccaatcagtaattttttcttaagtgttttgtgattacactactagaaaaaaagtaaaaggctaattgctgtgtgggtttagtcgatttggctaaactactaactaatgtgggggtttaatagtatctgagggatttggtggcttcatgtaatgttctcattaatgaatacttcctaatatcgttggctctactaatattttccaatttgctgggatgtcacctagcaatagcttggattatatagaaagtaaactgtggtcaatacttgcatttaattagacgaaacggggagtaattatgacacgaagtacttatgtttatttcttagtgagctggattatcttgaacctgtgctattaaatggaaatttccatacatcttccccatactattttttataaaagagcctattcaatagctcagaggttgaactctggttaaacaagataatatgttattaataaaaatagaagaagaaagaataaagcttagtcctgtgtctttaaaaattaaaaattttacttgattcccatctatgggctttagacctattactgggtggagtcttaaagttataattgttcaatatgttttttgaacagtgtgctaaatcaatagcaaacccactgccatattagttattctgaatatactaaaaaaatccagctagattgcagtttaataattaaactgtacatactgtgcatataatgaatttttatcttatgtaaattatttttagaacacaagttgggaaatgtggcttctgttcatttcgtttaattaaagctacctcctaaactatagtggctgccagtagcagactgttaaattgtggtttatatactttttgcattgtaaatagtctttgttgtacattgtcagtgtaataaaaacagaatctttgtatatcaaaatcatgtagtttgtataaaatgtgggaaggatttatttacagtgtgttgtaattttgtaaggccaactatttacaagttttaaaaattgctatcatgtatatttacacatctgataaatattaaatcataacttggtaagaaactcctaattaaaaggttttttccaaaattcaggttattgaaaacttttcattttattcatttaaaaactagaataacagatatataaaagtgttaatctttgtgctatatggtatgaaatacaatattgtactcagtgttttgaattattaaagtttctagaaagcaaa

SEQ ID NO: 840 - DNA, 6265 bp, Homo sapiens
ccgcaccgaagcgtcgcgataactgcaaccacccgcaacttctcgcgatgtttggccccgctaaaggtcgccattttggagtccacccggcgcctggtttccccggcggcgtctcccaacaggctgccgggaccaaagctggccccgcgggtgcctggcctgtgggcagccggaccgacacgatgtggcggctccgctgcaaggccaaggacggcacccatgttttgcaggggctgtccagccggacccgggtgcgggaactccagggccaaattgccgccatcaccgggatcgcccccggcggtcagcgaatcctcgtcggataccctcccgagtgcctggatctcagcaatggggataccattctggaagacttgcccatccaatctggtgacatgctgatcattgaagaagaccaaaccaggcccagaagttcacctgcatttactaaacgtggtgcttctagttacgtcagggaaactttgcctgtgcttaccagaaccgtggtcccagcagacaactcttgcctctttactagtgtgtactatgtcgtcgaaggaggagtcttgaatccagcttgtgcccctgagatgagacgcctcatagcacaaattgtagcaagcgatccagacttctatagtgaggcaatactgggaaaaacaaatcaagagtactgtgactggatcaaaagggatgacacttggggaggagcaatagagatatcgattttgtccaagttttaccaatgtgaaatatgtgtagtggatacacagacagtaagaattgatcgttttggggaagatgcaggatataccaaaagggttctgcttatttatgatggcatccactatgatccacttcagcgtaacttccctgatccagatacacctcctctgaccattttctcctctaatgatgatattgttcttgtacaagcactggaattagcagatgaagctagaagaaggagacagtttactgatgtcaaccgcttcaccctgagatgcatggtatgtcagaaaggattaactggacaagcagaagcaagggaacatgccaaggagacaggccataccaactttggagaagtgtgacctatgcatgaatgagggttgaagcctactacctcacacatccagaaggctctgggttttccaataagctatggtaaccctaaagaacaaaggatacaatgcttgaaccatccttttaacttaaaaccactaagacactgaaattccttgttaagattaaaattagtgtgcaagtttacagatgtgtgtctacagtggtaaactgtacatacatgcctctttctgctggagtgacagaataggtgatccttgccacctactgacactgacctgaaggttgagattgagtattataaactagcacccagcagctttaacttgtagaagaaagcatcacattttgggtaatgtggaaggcctcctgtgagtccactgggcatacgattgagattgagtattataaactagcacccagcagctttaacttgtagaagaaagcatcacattttgggtaatgtggaaggcctcctgtgagtccactggacatttaccacagtgtctccagtaactgagtctttttaaaaactctgaatgagttaagtttctaaattatgaattgattcatcaaatgaagatactcagaattgtccaaactgattttatattgcaatttggtagacattataaatgtgtgcttaaccactgataagtacatcacaagcaatttttacagggatgagtctcatccttgagaatgttatcacaaaacaggaactgattgtgccctgtttaagatctctagcatataaaacgtagaatgtatgagggaataggtgcctgagcagcttcctgaagctttaaaagaccgttggcctcgtgttttaatgcaattcatgtattggtctttgtcacattggataacattttaaagttaagcagggtacttttttaattgaaattccttgaaattcgagtcctcagttttttcttcatttgcgtaaagtttatcggggggaatttaattttctcagctttttgttaagagcacttcctccaaaaaatttttttcaagtaataatgctctgctttgggttggtttttgtaagattttttgcacacctaaagagtgtttgcttttgtgctagccttatccctccactaaagttattttaaataatttcacatttctgcaaattagcactttgcttatctgcaatcttttactttgatttttgaagttttaaagcaattggagtaatactgttgaatgaactagtttcacttccaaaatagaaaaaattgtaaatccttgccttatgcagctttctcagaattctgcttcttcctagtactagatgtgtagccatttgcttagtggactaatccgcaaggcacaccctctaaaacttagcttcactacaagatcttccagataaaagttttctacctcttttcttaattattctgatcagggatgctaaattataatttgttatgtattatctcacataatgtgaagaggcttaatgtgaagttttgttattttggtctcttttttattaagtatctcacttagaaattcagtggtatactttaaagcacttggatctttttcagcatatctgcctagcaaatgttttaaaattgacatttatttttagcactttcacttggtgaaggtggccatataaaattaaggaacatttgaacaatataagagaaaagaacttttaaggaacaattcacaaagtttgtttgaaattgtcagatgacatttcttgagtaccttttgtgtgcatagttattttagacaatataagctgttatggtcagcataacttaaaagtgtttagttttctattttactgagccttaaaaatagcactgatgagcttatgatacttaatgtttggcaatcataatgtgttcaaattaatgggattgaaaatctctccacacctgactctcatctgatctggatggttttggttttgtatcttttttacttctcccagaaaatactaaatttaaaactgtaaattaagaatataccactagataacaattatcaaattgagctttatgcatcattactcagaaagcttgccttcctttctttgctacttcaggacacagagttgacatttgcttactacagctttagatctagaagtttattcgtgcaacaaatatttattgagtaatttatactgtgccaggcatgttttgatatgtttctgtcatatgttttgatatgttccaacataagtttctgtcactttatattcagtatatattttctacagtgggtaaatttaacaaatggaaaggaatagaacactgatattttacagaattaaaccccttcattgtaagggctttgtttacatattaagtgtcaagtatttattcaggggatcttatttcattgtattttatctgttatctaggttgtccatttaccggttggacactgatactctgtcaaattcctttcaaaaatgactctttagtctgctgaaatttagcactagtactttagtgttctgatcctggaaaattcaaggtgaagctttatttgtggaccatctgatttaattattgaggattaaaaacctaaacctttgctcattctaaactcaagcttttaagcctcacagaatttacaggggtttgctttttgtttgtttgttttttcattttttactgtgcttattaaactcttggaattagttattaaagggagtaaattctcatcttgggaattttgaaaatctatggacttacaactttcaggaggattaaatgtcttaagttttgtactagagcagaatgaaatctttcctattcattgagtttttgcctgccatagaggaatttttttaaaaattaaaatgacagtttatattagtggcaaagtgaataaagacctcactttcccaccccacccttcttcctttctcttacttttctttggattaaaggtcaggtgtagtactatgaagattcactcctgaataaagtgatttcagaagctaaaatttaacatacctggaaattttgtgatgtgttagccaagtgaagacattagtgtgttccatcttttgctaatggttcatggttgatttcttcattgtttcccatgaaattagcatagtcaagtggtacccttgacgcttgactgctggtcagtttgaccctgtttttaacaactaatgtagtcatgccgcttgattattccatgaagtcccagcaaaataataatgaggaattaactaacattatgttatctatctaatttgtctgtgtccctaaatgcccatgcctaacttgcttctctagtttattccttctgtggagggattaaaacgtgggtgttgcaagttgccctaagctaaacatagttttcttacatctttttgggaaaaaaaatggaatgggaagtatgcaagattaagcaagagtgatttttttttttttttgacaaatcaggtggccttcctaaacatactaagaattatgttctttcatgtgtggagacacatttgtttgcagcactttaaaaaatatatatggaataaaagtttacatgttggccctctagggatctaattaaggacattaaagtacaattcttgagctactaaccatcagctcttcttaatcaaagattgccatcagtgtagagtgtatctattggcacaacattctggtgttttgataacagtagaactcaatttcagtaactattaggagcatggtctgtgccctagcattaaaaatgttacttattattatgtgaatatcttgtattattatacaatgcagtattcaaatttgtccttgtagtgcagagatgactgataatttctaaaagattcgatccttaaaacttgtttccaagcagacttataaggaagctgatttttgagtcagaggccttaaacgtgtcatatacaagtggcatcattttaagtccaaagtgaaacacttgatttgaataagctagtttataaactaaagctgttttcttatgttacagtatttcagcacatttcattccacataaaaagaatattaagtgtccctggttgtgggagagtgtttatttttctcaaaattatctagcattttgcttacagtgctttgaatgtttgacttaaaattattattgatgttgaattgtagggtgctgatttaggtcttgattcatacacatttaaaggaggttggtaaccccctcatggtagagtgaagggagaaaagggccaagaagacaaagtaccactgataaagaagagattgtcaaatagatgcattcctagtcatgaattacccttttccaaacatttttaaagcaatgcctttgtgtcaactcaacccttcttccccatttcttgtcatagaatgtagcatggccataggtgaaaaagcttatcattaaagtatgaaaccatgaattataagcattttgccatgatgcccttttatacatatgtttttaaaagtactaaccaacatataggagtttaggaatggtgaagatataatttgattaagttgtaggtaaacagaaaggatcatcttaggctcagaatttctaatatgattacatgagtctactttataaactggtataggctatgtaattagcccgtaagttacttaaaggaccaggggacctaatttttgtcagttttccagtcacattggtgccattcaggactccagctgtttacaggaaatatgtacttagcagaatagtatttttccttgaaaaaaatttgaattcagcctaaatacagaatgaatatgaatagtttgtgaaaagggttagagaacaacaatattcctatagtttctgtattaatgcagtagagacagaggttcctaacgcaaaaagaaaaccacaagtaaagaccgtcaaattagagctttagaatatgacttgaaaaagtagggatgggcaaaacagcataagaaaatattttttcttaatgcagatggacagtgttttcttgttttaaaaatgttttgcctatttgccagcattttttgaagtaatacactgctgctacctggaagatgtctaacttcattttctacaactcttatgtgattttgccattgtcattaagatgcattgattttatttatgaggtgtatgactttaaatatctaaatgctgtattaagtgacttgtttcaaaggaataaatgaagtgaaaacgt

SEQ ID NO: 841 - DNA, 2918 bp, Homo sapiens
gcggccgcctgcgcgctggccgcctgcgcgctgccagcccgcccgcccgccaggggctccgccgccctcgcctcggcctcgttagcccgccaggagccccgcagctcctccgggagcccgctggtaactcgcgtccctcgcgcttctccggcgcctgaggggcccgcctcgggccatggtgctctcccaggaggagccggactccgcgcggggcacgagcgaggcgcagccgctcggccccgcgcccacgggggccgctccgccgcccggcccgggaccctcggacagccccgaggcggctgtcgagaaggtggaggtggagctggcggggccggcgaccgcggagccccatgagccccccgaaccccccgagggcggctggggctggctggtgatgctggcggccatgtggtgcaacgggtcggtgttcggcatccagaacgcttgcggggtgctcttcgtgtccatgctggaaaccttcggctccaaagacgatgacaagatggtctttaagacagcatgggtaggttctctctccatggggatgattttcttttgctgcccaatagtcagcgtcttcacagacctatttggttgtcggaaaacagctgtcgtgggtgctgctgttggatttgttgggctcatgtccagttcttttgtaagttccatcgagcctctgtaccttacctatggaatcatatttgcctgcggctgctcctttgcataccagccttcattggtcattttgggacactatttcaagaagcgccttggactggtgaatggcattgtcactgctggcagcagtgtcttcacaatcctgctgcctttgctcttaagggttctgattgacagcgtgggcctcttttacacattgagggtgctctgcatcttcatgtttgttctctttctggctggctttacttaccgacctcttgctaccagtaccaaagataaagagagtggaggtagcggatcctccctcttttccaggaaaaagttcagtcctccaaaaaaaattttcaattttgccatcttcaaggtgacagcttatgcagtgtgggcagttggaataccacttgcactttttggatactttgtgccttatgttcacttgatgaaacatgtaaatgaaagatttcaagatgaaaaaaataaagaggttgttctcatgtgcattggcgtcacttcaggagttggacgactgctctttggccggattgcagattatgtgcctggtgtgaagaaggtttatctacaggtactctcctttttcttcattggtctgatgtccatgatgattcctctgtgtagcatctttggggccctcattgctgtgtgcctcatcatgggtctcttcgatggatgcttcatttccattatggctcccatagcctttgagttagttggtgcccaggatgtctcccaagcaattggatttctgctcggattcatgtctatacccatgactgttggcccacccattgcagggttacttcgtgacaaactgggctcctatgatgtggcattctacctcgctggagtccctccccttattggaggtgctgtgctttgttttatcccgtggatccatagtaagaagcaaagagagatcagtaaaaccactggaaaagaaaagatggagaaaatgttggaaaaccagaactctctgctgtcaagttcatctggaatgttcaagaaagaatctgactctattatttaatatcttacatacctccaccagactggacttgctttttgaattttaagcaagtttcctttccttttatacaaattgcaaatttcatatttttttaatcacatcctaggaatagcacaataattgggaaatagaacccttatcactagaagaaccattttctgccactaaatatctctgatgtttccatgagtctgagggcagagactctggtatatgaaaacgtctgaaagtcacatattgtgaaaatttgaagctatctcagtaaaaagcagctttggaaactgtgaatgatctttagcttgtacaaatgtttaaaaatacctcaggctatactgaaagggttgcagtttggttaggagtggaaatattttgtttgttaatgatgtcttcagttctggtacctctgttttactttcttatgctctttggaaactttttgcaaaatttaagcctgggttctagataataccagatctacctaaacctcaagtctatgttaaagttgctttcctgctgttaaataagctatgatattaagatattctgacttgctccagtgtcaagggaccttctgggagcaggtgctaacatagtgttcagaatcaatatgtgagatgaaaaggatcccctccaggaggatcctgagctgttcagaaatcatttaagtttacagcgttgttccctttgcgtttgcagtgcgttttactcaagtagccagaaacaccccacgtttctgaatttgtttaaactgtaacaataaagtaaaatagaatgcatgaaagatattctggcgattgtaacttagaatttttctgacttctggatttgttggcactagaacctgatatttaaagtcttactgagcagctatcaagtggcagttacaggcacaaattggtggaggctggaggatggggaggggagcaaaaccctttatatttgtgaagaaaatatctgtagctgatagaaataattgcttaaattggtttatgaaattaatgagtctgaaaaggttaaaagcacttataaaaagaaccaagtcctacatttccagaactttctggcaaaaatttgcactcatattatttatcctatgaacattcccattgtttttttttgctatttatatacagattatcataagaaagctctcagtttgaggacccaaaaaaaaaaaaaaaaaaaaaaaaaaaaa

SEQ ID NO: 842 - DNA, 7101 bp, Homo sapiens
ccagcgtcaggccagccccggcatgctctgcggccgcccgcggtccagctccgacaacaggaattttctccgagagcgggccgggctcagttcagctgctgtccagacccggatcggcaacagtgccgcctccagacgttctcctgccgctcgcccgcccgtcccagcgcccccagccctcccgcgagggcgccccgggacggaaggatccaccagtctgtcggcgcccgccgttctcgtggtcgccgtcgccgtcgtcgtggtggtagtctccgccgtcgcctgggccatggccaattacatccacgtccctcccggctccccggaggtgcccaagctgaacgtcaccgttcaggatcaggaggagcatcgctgccgggagggggccctgagcctcctgcaacacctgcggcctcactgggacccccaggaggtgaccctgcagctcttcacagatggaatcacaaataaacttattggctgttacgtgggaaacaccatggaggatgtagtcctggtgagaatttatggcaataagactgagttattagtcgatcgagatgaggaagtaaagagttttcgagtgttgcaggctcatgggtgtgcaccacaactctactgtaccttcaataatggactatgctatgaatttatacaaggagaagcactggatccaaagcatgtctgcaacccagccattttcaggctaatagctcgtcagcttgctaaaatccatgctattcatgcacacaatggctggatccccaaatctaatctttggctaaagatgggaaagtatttctctctcattcccacaggatttgcagatgaagacattaataaaaggttcctaagtgatatcccaagctctcagattctccaggaagagatgacttggatgaaggagattctttccaacctgggctcacctgttgtgctttgccataatgacctattgtgtaagaatataatctacaatgagaaacaaggtgatgtacagttcattgattatgaatattctggatacaactacctggcatatgatattggaaatcatttcaatgaatttgcaggtgtgagtgatgtagactatagtctgtatccagatagagaactacagagtcagtggctgcgtgcttaccttgaagcctacaaagaatttaagggctttgggactgaagttactgaaaaggaggtagaaatactcttcattcaagtcaatcagtttgcattggcttctcatttcttttggggattgtgggctttgattcaagccaaatactccactattgagtttgatttccttgggtatgcaattgttcgttttaaccagtactttaaaatgaagcctgaggttactgcattaaaagtgcctgagtaaagaagagatttaattattctccagtagctgagcaatgcttgtgaatcttttcttaagaaatcccaaaaagccaatattagttaaaattctgttgtttaatttggttatcttgctttataaattatgcctctaaacaatcaaatctatttttgaaatagactgaatgatgtcaagaaatatacctactgctatccgtatgtggtggattagaaatgtgttaaatctgcaaaaggtataaagatgtcagtttaatttctttgataatttaacctatgttgtatgtgaattatttattataaacttagcacgattctgtgactgtttttctctgtttcacgttcgttgagtgtaagcaatgaaaatgtcccaaataagttttttaagttttactttaataagattaatttcagtaaacattctagttgttcagtgtaacctttttatcttgatgcattgtaagtaaaatgaatcatttactcttgaaatgccagtcattgactgatgtagataatttaggattttcatataaaaatagctgtttaggaaggtgaaatacattcactgtctctgttggtggtacatcttgttgaattcaatattagaaagtatttctttttggggtaatataacttagaattaaatccctgtttctctatgtagtctggcagtataaatataaatatttaccatataatcttggaataagtattagttaatgttaccaaaatctgtattaaataatgttttcaaatgctaaatatggtcgttactattttcagttttaaaaattttatagtatcaaattgtttctaaccaaaaatttccttttacttctagagatgctttatgtttttgattattaaatagtcactagtattgctaatttttgaaacaaatacacaaaatttatcatatgtagaaataagaaaatattgtttaggttaattattttttacctatccagagtcattccttacatttcagtttcatgtttcattcctcacattttagtttcatgttttagtttgattctatgtttttagactgatagcaaatgattacttgatacatgtaagttcagcgttatatgttgaggcagttatataattaaataaggaacacttagggcattgatcttgtacacttaaaatctgacaaatgacaaaatgtgaattaagcataaatagtcatggcaggagggcttttgtttatttctcttgtttttgtttaactgtatttttaattttgtctggtggtaagagggaggtaattattgtatggaaagaagttagatctttcagatagataaataggcttcaggttttgaagtctgctctgtgtagttgagcagtcatggttaactttacttagaaaattagtctgacaagctttgcacttcggtcacataagtgcccatgtacaaagttggcttactggatctgcatattcaaaatatgcaactacaaatttatcctctgagaaatcttctgaggagtctaatgtattccaaatgacttaatattctcagacaaatgctttaaaatacttggattatctcaagatttttgaagctaataaagtaaatagaaacacaggccattttaaatggtaaattctagttacataaatataatcttaaagtatgtttgtatctgtaacagtgttagaccagatttggtttctacctccccaatgttataaatgttcacttttgtttttataaaccatattactgtaagatcaatagaactttgcctagttaagtgaatggaaccaattaaacaactagtagctttttataatgttagtgtgaacttgaaaaattgtttttggtggaatttttgtctgtggttagaacattttcataaaacagataaagaatgtgtaatactcttaattttttttttttttttttttttttttttgctttctgccttctaaagtgcaacagtatatatcttgtagaactgtgggaggagagaagataatttttctaccttactccatattcttacttcaaactattttgaatagaggttcactgagccattgctgatagactgtgcatagctactagctgtcacactattgtaggttttttggagagattcatagggaagtgaatgtaaccaggaataaaggctctcactttagctctgggactatgcagtggatcttgggaacaaaataagatatctaatctattttccccattctggctagattttggttgttgtgatgctcctacttcctgtataggtttttgggatcatggtgcaggctagtaataggattcagaattgcttcccttttatatcgaccatgtaagggattctaaaggagggtaaatctcaaagtgctctgaaatcatccctctaaaatctgtcctgtggtgtgctaagatgtctgttgcctttttatgttaagctaaggaacttgaatgccttacctaataactcaactagtagtaagctcattttgtaaatatgaaaatggctgtaagaagtggcattcatgtatattcaatgttagtcaatagaccatagtggcctggatgctttaacaagccaaattccgcaattttttttccttttttccccttcatacttgtatgatctcacctgaccagtgatttcttttcctcctaaccccatgctaccaccattttctggaaatcaaagagatgtggtagtaaatcatacagtacacacgatcatctgagatcaatatgagcacaaaactcatcaagtaggtctgcctggaatgtatataaaaaatgtaaataaaaatttgtaaattagtgtgaactgtatcttgcatatgagactgtgtattgttttgcattctcttcccttttgtagaaatttttctgtaaggaaatgattcagcttgttggttttagagtaaaaatagccaacagttgtggctacacagtgagatcacaggaactggaaatagggtttgtcggctttggttaatgtcagtactcatttatttagcctctcagtgcttaataagacttttctttattttttagttagccgttaggttttgtgaggttagattcctggaagcagtgaatttatacactgttatattaatagagctccgttctttgagtcatgattccaagctaaaggaaattaaaaatgtaatttaataatttcctatttttagggttgttaatttttttctacaaaaaaaccttgaaattttagatatcccaatgtgaatctaatttccatatatacagaaattagacaaataataagtctttagttcaacttaagcatatctcaaatgacttctctaaatttaaagttgatcatgataggatcataaaagacagaaaagacttaagtaatcttgtaatgacaattatttccatttttgctgaactaaaaatatttaacttcataaatatgttactacagcttccagatttaaagaaaaaaagtttcccccactctcaattaaaagttagaaccctccacttttaaaattatacaaatatttcttttttacattacacagaagccttctgtaccattttacgaatttctgtcttcataatataagtgaaaatactgtcatttcaattttctgctttaaattgtttttaataagcattccaaagtgatacagacttaagcttttaatcaatcagtcattcagttgatagacaaagttagcgatgctttatgctaggaaacttgttgacagtaacctgtgcgactttatgcagaagacaaatgctagtaattattatgcacagaggaaaaatcattttaagtatgtggtaaagcagcttcatctttcaaaattgatttgctctggtttttctttagtccattagattccagaatgtccttttactgggaatttagttatgtattaagataacctgttttcagttctttttgaaaagaagacattatttatattgaaccaccttattttaaaatttttaacttttatataccacttgtgtgattccagtgtcatgtcttgggtttgatgtcgttggacagaaaagtgtatcaattattttaaatgaatttttccccatgtttgaggcttagtctgtaaatgtgttgctgtaacagaaaatacttgggtatgcattacttgaatacttgaaaactgaaattaataagatgtattacataatgaattagatttctctgaacagtttttacactgaaaatcttcatttctggattgcagtttgaaatggaatgaagacctgaattatttgggtagaaaaaattatgatagtgcttataagaactgtaaactgttttaaactattttgtgtttgacgcatcaaacttcaagttttttgtaagtttctctcctgaaattttctttctcttctatactttatgcacttactatactactgatgtaataaaagagcagggttaaaaatattgtatctgtattcattgtgaatcctgtagcttttctagttaacaaaaaatcgctttctaaaatactcttaatcccattgttttggttaacatcttacccatttgttgtatttcaaatgccattaatcattttagtacaacacctatgtttataaaaatttgaaaacattacatattgtatttaaaactaattagtgaagagtaagaaaaaaactagccaacagaattgtaggtgatgcattagttaaatttcaaaactcataataaaggaactttcagagattggttgaaacccagtggtatccctgtaaattagctcctgtgactggaaaagaccccaaaaaggcagtagaggagattagtgtttacttgctgtggttgtggtgtgctgctacttaattataggtagtgacacactgaaattcttatttgtccaataatctgaagtagtttcctatatttatctgtactaaattgactataaattgagtctgcaaagaggaaactttttgactgtactgtatttaggagcctttgtacagcttggtcaaatttccatgatatgaagtatttgagttttaaaatatactgttattaaaaggaaaaagacatggccattattccatgtgcttaaatgataatttccttattcagtttcagaagaaaaagaatgaaattgggtaactgtcattgcgttagctttatgttgaattgggaaattgtggcataaagcttaaattcgtgtttatcaaatgtgaaccatagtagtataatgctgctttgtatataatgtaagtgctacaaatagtctcagcactgaaaatgtattgatacctcttaaatgaatgcaacttttgatgtaggtgttttgctatgcctcagaaaatatctgtctgagaatttgttaatctgtttgataatgaagatacttcctgttttcttgtttcatattttcatgttcaaaatttaagttttacatttttactactgttaatttaaataaaatttgttctgtggataaaatgaggttggcagtgaagaaaattaaaaacagcctcattcatgtaactggttaagtaaaaatacattttcactatgtgttcataaacttttaatgaagctgtttgtctttcagttcaaatataagtgatgtttaggctttatttctgttaataaggctttttaccattgattaaatgaaggaatgtatctttttgaagagatttatattctgtaaataaaaattcgttgtaacaataaagttgagttctaactacagtgtattca

SEQ ID NO: 843 - DNA, 3534 bp, Homo sapiens
ggagggagccgcacgcggcccagggcagcggtctaggggcgccggggccggggcgtaggggccgttgcccgcgatggaccgcaccggagacgctccggactcgtcgccgcaggtgtccaccccccagggttcctgacccctgcccctggacagcgaccccttctcagactccagttgggccggactctccaaacctgcttccgcaatgggtgggttgtgagtgctggtaatgaggagccgtgggtgcagccagccttggagatgccgaagagacgggacatcctagcgatcgtcctcatcgtgctgccctggactctgctcatcactgtctggcaccagagcaccctcgcacccctgctcgcggtacataaggatgagggcagtgacccccgacgcgaaacgccgcccggcgccgaccccagggagtactgcacgtctgaccgcgacatcgtggaggtggtgcgcaccgagtacgtgtacacgcggcccccgccatggtccgacacgctgcccaccatccacgtggtgacgcccacctacagccgcccggtgcagaaggccgagctgacgcgcatggccaacacgctgctgcacgtgcccaacctccactggctggtggtggaggatgcgccgcgccggacgccgctgaccgcgcgcctgctgcgcgacaccggcctcaactacacgcacctgcacgtggagacgccccgcaactacaagctgcgcggagacgcccgcgacccacgcatcccgcggggcaccatgcagcgcaacctggccctgcgctggctgcgcgagaccttcccgcgcaactccagccagcctggcgtggtctacttcgccgacgacgacaacacctacagcctggagctcttcgaagagatgcgcagcaccaggagggtgtccgtgtggcccgtcgccttcgtgggtggcctgcggtacgaggccccacgggtgaacggggcagggaaggtggtcggctggaagacggtgtttgacccccaccggccatttgcaatagacatggctggatttgccgtcaacctgcggctcattctgcagcgaagccaggcctacttcaagctgcgaggtgtgaagggaggctaccaggaaagcagcctccttcgagaacttgtcaccctcaacgacctggagcccaaggcagccaactgcaccaagatcctggtgtggcacacacggacagagaagccagtgctggtgaatgagggcaagaagggcttcactgacccctcggtggagatctgagcctcaggatgcaggagcctcctcctcagaccctgttcttggccttccatcctctccccacggctgatggtccctccaaggccgactcctaaggaatcaccatcaccctcctttctattctgggggcttctgagagagcccagcctgatgccagaacaaaggacagagaatttaagcacagaaatcccagacctgttgttctctccatccagcgtgaccagggcccgagagacctgatggccagggtggggtgtccagcaccagccaagctggtgctccagcgcacctccccagagctccccgcactgacggggctgcaggagcaggtgcagtgggcgcccacactggccctgcagtgatgcagggcgggagggagataagaagaccccgcagtcaagtggagcatggccctccctggctccctgtccctgggctcagcacgaccacacaggacacccagccagggaattctgaagaccagagagcagcccacgggcatcacgagcgctctgctcctctcctgggcccctgctcttcccgagagctgcccccaaatcagacatacctctgtggctctcctctggttcacgtttacagagcataaggctgtcttggatcccaacaggcacccagccctgcatggggggagcctgggcctaataggcaccccctgtacctcaggctgtggcgggagcagagtccccccctccggcccctcttcctttaccccttctcctccagcagtggcaaaggggtaggctctagagccagcacaggtcactgcctgacctggactaagaaccccacggccccactgtccacacactgcctccccaccgcccacctcggctgctaggcccctcgcctggactggactggggagggaaagcgccttttcctgcagctcttcagagccacagacctcagggtggagtgagcccatggtgggcagtgggcaaggcggtgggtggtgggcaaggtgggacctcctgcagcctggaaagaggagggaggccaaggccattccctaactccctcctgcccctggtctgaggaggagggactctggagtagcagaggggctgggaaagagggggcaggggctgctgggacactgagcaggagggaggcctgagcacactgctttggaaattattctaaacacaaaaaagggaaagaaaatgttatttctccctaagtcaggagcatgcagagctagcccacctcatgtccagctgtccactttccatcctggagaaagaacagtgtgcctcaaactcctgccctccccaggcctctggggcccactggaaagggctctgaccccctggcccagccgggctctctagtggtgatccggctcattctcctgcaagttggaagcacaattttccccccaagtggaggaaaaggaaagggccccagcctactgaagaggtgtttattttttaactaacagcctcccaccccattaagactcaccaggagaggtctgagggccattcagaacccactcctgagtgggtgggtgggtgggactcagtccagagacctaacattcagaatatagcattggttgcctattttgagatggatttaatctcccacagtattcatgagaccatctgatggaatcagatccctgagccaccttgcaggacgttttccccaacctcttacaccctggatgtcactttggaaaccaagcccttggaagcaagtggggtggcatgggagagaagggaggaggtgggcacaggtggtgagcttatgtgtgggcactctactgcctcacagaagccagccaagtgccaaggtcagcttggctggtctgaggccaccttcttagccaaaaacctagggttcattttcaggactttgataatgaacaacaaaatggggacttctttgggcagatgctaggtcagttgttttcacctaatatcctcttttagctgcatgtatatttatttataattataaccctggtggactgcagccttcatctttattgggaatgagtttgttataaatcagaaatgggtccatgatgaccactgttttccaaacccagtctgttccctgctccctcgctggcaagccccaccacacaggagtgaggccaggggctaggagttctaagaacagaggctggggtgagggtggcacccaggcagctgcatctggtctgttttaatttaactgtatttaatttgctttcaaaattaaaagtcaaatacagtttttaacagtcctaaaaaaaaaaaa

SEQ ID NO: 844 - DNA, 1863 bp, Homo sapiens
gcttacgtcacttcctggagactggttgaatccggaagtgaccctagagaaacgagttgtggctgaggaccccggcggcagacgcaggttcgggaccatgagctggattccttttaagattgggcagcccaagaaacagattgtgcccaaaacagtggagagagactttgaaagggagtatggaaaacttcagcagctggaagagcagacccggaggctgcagaaagacatgaagaagagcaccgacgcagacctggccatgtcaaaatctgccgtgaagatatccttggacttactctccaatcccctctgtgagcaagaccaggaccttctgaacatggtgacggccctggacacggccatgaagcggatggatgccttcaatcaggaaaaggtgaaccagatccagaagactgtgatcgagcccttaaaaaagttcggcagtgtcttcccgagcctcaacatggctgtgaagaggcgggaacaggccttgcaggactacaggaggctgcaggccaaggtggagaagtatgaggaaaaggagaagacggggccagtgctggccaagctccaccaggcacgagaggagctgcggcctgtgcgggaggactttgaagccaagaacaggcagctgctggaggagatgccgcgcttctacggcagccgcctcgactacttccagcccagctttgagtccctcatccgagctcaggttgtgtactactcggaaatgcacaagatctttggagacctgtcccatcagcttgaccagccaggccactccgatgagcagcgggagcgggagaacgaggccaaactcagtgagctccgggccctctccattgtggccgatgactgaatccccgtcactcttggaggactcctgtgacgtggtcagcctcattcatccttgcccttctcagggctagctgctcctctcacaggctggggacagaggtggccctggttcacttgccggccctttgcaatgaatgactcttcctgagcctggcaccaggagccctaggcaggccgccgtctccccactcacagccccagcaggtaagcagtgtagacaaacccttggggcttttttatttggagaaccgtccagcatgcatcctggcccacggcctgagcaagctgcagcccttctgaggccatgggcttcgttggctaagttgggggtcttagccttgcatgcgttgtgggcatcaaatctacctccaaaagacccatcctggggagccctctggcccctcgttgccttttcacttcaaaacctcttttttctgggagaggccctgaaccctgtgcgggagagctggtcctccagccctggcaggccctcagccagcttcccagcaagacaaagggcacccttgtggctttgggacctaagtggttggggttcccgaggtcactgaggactggtacctcgggaacgcaagctgtcagtggaactgtcccacaagaattcacaggtctcaaagcaggaacagtgggtttgtgtctcacctgagtatctggaattttattttttcaagtaaaattttcaatgaaacgtccacatagtattgtgctgtaacttaggcgagcagaggaaaccccttcctgggcctgctgccctccacggagcagcagcaccctccagcaggcagcccagcatgccaggggtgtgtgcgcacctccccggccctggcccaccttctggagcgaactgcaccgtggtccagcagaggcgctgggtgggagggcacgcgggcaagcctaggagagtaggaagagctgtggaggacacactctcagtttgtttttgactttggtttatttaaaaaacaagccaaaaaaaaaaaaaaaaaa

SEQ ID NO: 845 - DNA, 1873 bp, Homo sapiens
ccccggatctccggcttccggcaactgggctggaccgaaaccggcgcggagcaactgaggcccgagccttctcgggacccgggggacgcctaaccccgcgagatgaggaaactgaggccgcgaggagcgcgcatacagcagagaagcagcagaatcgggaatcaaacccagctctgtctgaccccagagcctgtgcctttaaccactggctaggctgaactgcctttgttcttcactgtccccatcacctctttcaaacctcagcctctccttcctcatcgttacatctctaggctgcacctgctctctaaacattcacacaaaccctgcaaattttcttcctcataattgggagaagactcactggccgaatggcagcagtagatgacttgcaatttgaagaatttggcaatgcagccacttctctgacagcaaacccagatgccaccacagtaaacattgaggatcctggtgaaaccccaaaacatcagccaggatccccaagaggctcaggaagagaagaagatgatgagttactgggaaatgatgactctgacaaaactgagttacttgctggacagaagaaaagctcccccttctggacatttgaatactaccaaacattctttgatgtggacacctaccaggtctttgacagaattaaaggatctcttttgccaatacccgggaaaaactttgtgaggttatatatccgcagcaatccagatctctatggccccttttggatatgtgccacgttggtctttgccatagcaattagtgggaatctttccaacttcttgatccatctgggagagaagacgtaccattatgtgcccgaattccgaaaagtgtccatagcagctaccatcatctatgcctatgcctggctggttcctcttgcactctggggtttcctcatgtggagaaacagcaaagttatgaacatcgtctcctattcatttctggagattgtgtgtgtctatggatattccctcttcatttatatccccaccgcaatactgtggattatcccccagaaagctgttcgttggattctagtcatgattgccctgggcatctcaggatctctcttggcaatgacattttggccagctgttcgtgaggataaccgacgcgttgcattggccacaattgtgacaattgtgttgctccatatgctgctttctgtgggctgcttggcatacttttttgatgcaccagagatggaccatctcccaacaactacagctactccaaaccaaacagttgctgcagccaagtccagctaatgaggaaattctcttttgttttttggagcatggttctttgggaagtggcatccactgcaggaaagcagaatgagcagagccagcagaactgatggagtggcacaaattcccagtgtctggatggtgccacactggcgcctaatcacccgtttaacaagcagaaattaaatgttgctcagcacatgtgtctttcagctcttccttttcacccatggatgatcattgcgagcatgcgctgattggactgaaatgccagggaataggttaggcatgctcagtgccgtccctttgccaccacagtcaaatgacatgcttcactgtggtaccttaatacctgaaatagaaccatggaaaattctgatgtcctctctctgaattatgtacagactacctgggggatcctcttctctccaaatgttagccatcctgaagtagccgaacagtagaaactttggtggggattaaccgggagcttgaaaatttgtctttggtaacctgatactggacagctgaactgaatggctgcaaaataaatacctcacatgatgtctgtgtctgcaaaaaaaaaaaaaaaaaaaaaa

SEQ ID NO: 846 - DNA, 8537 bp, Homo sapiens
aggaggccccgggcccggcccgggcggcggtggcggtggcggctctagctcgagacgtctgtggcgccctcgcaccgcgccgcagccatggccctggtgaccctgcagcgctcgcccacgcccagcgccgcctcctcctcggccagcaacagcgagttggaggctggcagcgaagaagatcgaaaattaaacctcagcttaagtgagagctttttcatggtgaaaggcgcagccctcttcttacaacagggaagcagccctcaaggccagcggagtcttcagcacccccacaagcatgcaggtgatctgcctcaacatcttcaggtgatgatcaaccttctgcgttgcgaagacagaatcaagctggcagtgcgcctggagagcgcctgggcggaccgggtccggtacatggtggtggtgtacagcagcgggcgccaggacaccgaggagaatatcttgctgggagtggacttttccagtaaggaaagtaaaagctgcaccattgggatggttctccgactgtggagcgacacgaaaatccaccttgatggagatggtgggttcagcgtgagcacagcaggaaggatgcacatatttaagcctgtgtctgtccaggccatgtggtctgccctgcaggtgcttcacaaggcctgcgaagtggcccggaggcacaactacttccccgggggtgtagctctcatctgggctacctactatgagagctgcatcagctccgagcagagctgcatcaacgagtggaacgccatgcaggacctggagtctacgcggcccgactcccccgcgctatttgtggacaagcccactgaaggggaaaggaccgagcgcctcatcaaagccaagctccgaagcatcatgatgagccaggatctagaaaatgtgacttccaaagagattcgtaatgaattagagaaacagatgaattgtaacttgaaggaactcaaggaatttatagacaatgagatgctacttatcttgggacagatggacaagccctcccttatcttcgatcatctttatctcggctctgaatggaatgcatccaatctggaggaactgcagggctcaggggttgattacattttaaatgttaccagagaaatcgataatttttttcctggcttatttgcatatcataacatccgagtctacgatgaagagaccacagacctcctcgcccactggaatgaagcgtatcattttataaacaaagcgaagaggaaccattccaagtgcctggtgcattgcaaaatgggcgtgagtcgctcggcctccacagtcatagcctatgcaatgaaggaattcggctggcctctggaaaaagcatataactatgtaaagcagaagcgcagcatcacgcgccccaacgcgggctttatgaggcagctgtctgagtatgaaggcatcttggatgcaagcaaacagcggcacaacaagctgtggcgtcagcagacagacagcagcctccagcagcctgtggatgaccctgcaggacctggcgacttcttgccagagaccccagatggcaccccggaaagccagctgcccttcttggatgatgccgcccagcccggcttagggccccccctcccctgctgtttccggcgactctcagacccccttctgccttcccctgaggatgaaactggcagcttggtccacctggaggatccggagagggaggctctgttggaggaagctgctccacctgcagaggtgcacaggccggccagacagccccagcaaggttccggactctgtgagaaggatgtgaagaagaaactagagtttgggagtcccaaaggtcggagcggctccttgctgcaggtggaggagacggaaagggaggagggcctgggagcagggaggtgggggcagcttccaacccagctcgatcaaaacctgctcaactcggagaacctaaacaacaacagcaagaggagctgtcccaacggcatggaggatgatgctatatttgggatccttaacaaagtgaagccttcctataaatcctgtgccgactgcatgtaccctacagccagcggggctcctgaggcctccagggagcgatgtgaggaccccaatgctcccgccatctgcacccagccagccttcctaccccacatcacgtcctcccctgtggcccacttggccagcaggtcccgtgttccggagaagccagcctctggcccaaccgaacctcccccgttcctaccaccagcaggctccaggagggcagacaccagtggccctggggctggagctgccctagagccaccagccagccttttggaaccttccagagagaccccaaaagtcctgccaaagtccctccttttgaagaattctcactgtgataagaaccctcccagcacagaagtggtaataaaggaagaatcgtcacccaagaaagatatgaagccagccaaggacctgaggcttctgttcagtaatgaatctgagaagccgacaaccaacagctacctgatgcagcaccaggagtccatcattcagctgcagaaggcaggcttggtccgcaagcacaccaaagagctagagcggctgaagagcgtgcctgcagacccagcacctccctccagggatggccctgccagcaggctggaggccagcatccccgaggagagccaggatccagccgcgctccacgagctgggccccctggttatgcccagccaggccgggagtgatgagaagtcagaggccgcccccgcttcattggaaggaggctcactgaagagcccccctcctttcttctaccgcctggaccacaccagtagtttctcaaaagactttctgaagaccatctgctacacccccacctcctcttccatgagctccaacctgacccggagctccagcagcgatagcatccacagtgtccgtgggaagcccgggctggtgaagcagcggacacaggagattgagacccggctccggctggcgggcctcaccgtctcttccccactgaagcgctcacactctcttgccaagctggggagtctcaccttctcaacggaagacctgtccagtgaggctgacccgtccaccgtcgctgactcccaggacaccactttgagtgaatcttccttcttgcatgagccccagggaaccccgagggacccagctgcaacctccaaaccatcagggaaacccgccccagaaaacttaaagagcccttcgtggatgagcaaaagctgacccgccttttgctgcgtcaggctgggcggatattttcatatgatccctccctcactttcactgtggatttggatcgaccccttacatcttgatttcccttaaacgagtgaagtcatcctaacttttcccctactcttgccatagagaggaggagaagaaactaaccaacatgcagcacaagaaggggagctgtcagtcgtgtggcctgggagaaccaggagccgccggccaggagacacaaaactccgctcccaccgtgtcttcaagaagaaccatgttttaggaagaacgtgcacacataggcgcacacatccagactgttcccttcgcatcctgcagaagagtcctggtggtggcagcctcaccgcggcacacgttctagctcattcttggcctcgcagaaaactctcggatggcaacattaagtcctacctctgttctcgctgcgctttttatttttaaaacacacgaatgaccaaggcttgttccagggaataatgctctgtctgaaagcgtttttccaaaaaaagaatttttcgttttgtgttttggttgggaccccagacgtgtcaagacttttaacccgacagccccaagcactgctgagtaaagtcatcagatgagtagtcccacgctgttgttgagctgactctgtgcccgaatggtggtgcaggcgccctgtcctggttgtgttgttacgtgtttgaccagcacaggggtccggtggggaaaatgtatgggttgttctcagttgttgctaatgctgaagtttaaatctcaaggggaagggcccacctgcattgttgagtgtctgctgctgaaacacatgattgtgtttaggtttgaaattgctcaagtgtctggctcaggtggtggttctgagacacatcgtcctgctgagagcccagatgcttaggtccactagggcccatctagggaagggaaaggagatttcagcggcttccccgaaaggaacgggactgtcgggatgcttcccggatgtctacagttgccccttcctgcagtgagattactgcttcctgtttccctccagctcttcccagcagcagtgagggagtataagagggatctgtagtcgctgcctggctctgtgggcggcccctttaagactcaggtgagctcagccagtcccgctgcgccaggcttgaatcaaaggtgtcagcaagctagatgtcaaaacatttcgagagagaggcagcttgcagaaaagcagaaaggttgaattcaggggtcagcaaactatggcatgtggccccgtgagctaggaatggtttttcctctttaagacagggcctggctctgtcacctaggctggagtacagtagtgcaatcatgactcactgcagcatcaacctccctggctcaagcgatggcttttacctttttaaggagttgtaaaaaaaagaaataatatgtgacagaattcatgtggcccacaaagcctgaggtacttactgtcaggccctttgtagaaaaagttgctgacccctggtttgatttgccacacagggctgctcatggccctgtaggaagaaactgggtaaatgtgaagccctctgcctctctgacacctaaggccagacccttccctcctcccgaccacaagctttgccagccccgcactagcctcacctgtgcaggatggagtaggttgcgtacatgggggaaggcaggtgaacacagttggctgaagctcttccacaattccatcttgccctcagctgggtccgccagattaactcagtgaaaccagaaagccttcaaggaccagctgaattctgaaagtgagtgagtgagccatcatcttaacattggccagaactgtgttccccaaagctattctagaaagcaccccaggagggatctgcaggaacaaggctagttcatattttacctagtgagcacagtttttgcaaaaatcctccctccaggactttgtctccttggagtgatttttaaaaatacatacattactttatagggagctgttttcccactagtgtcaattaaaatcaccttaaaaggtgattatccacttattcctaaacccctgtgggttgttccccctttccctcagccaacaaaagcatagcctcaaaaaatatcaagttcggtatgttttgccaaatcaaatttcatgtggtagatcaatttttgtgtcaaaataatcttttaaatttagtgatgacaggcttttgttggttttttaaccacgtctatgtatgagaatgatatatttttgaaaactttaattttgaaagccataatttttcttatctaaagagttggggggtggggtgtggaatctggagagtacaagttggtctttggcttctggcaaacttacccattcatttttggaagcacagctagcatatcaacatccagacgagagcgctggtcccgtccacagagcagagtgaagcattctggacttgatgcttaatagcctggcctggagaaaagggtaaggtttatttttggaaacccagatcagttgcatgtaaacagatggcacatggctatttaaaatgctgtatgatggggccgggcgcggtggctcacgcctgtaatcctagcactttgggaggccgaggcaggcggatcatctgaggtcaggagttctagaccagcctggccaacatggtgaaaccccgtctctactaaaaatacaaaaacttagctgggtgtggtagtgcgtgcctgtaatcctagctacttaggaggctgaggcaggagaatcgcttgaacctgggtggcggaggttgcaatgagccgagatcgcgccactgcactccagcctgggtgcaatgaaactgggagtgaaactccgtctcaaaaaaataaaatgctgtatgaacaagatgagcattctgtcaggtgtcgggacacctgggcaaagacgaattcatgctgtctgtgaaaaggaagtttgcactgtaacatatgccatagcttggcccttgctttgtatgcaaccttagctgatggggaaaattccaaacataagtggcacaggaaagaggcaggcagaggaggcaggggtctgtgctgtgcaagtcactggttttttatgactatcattttcattgaatgcatttgttgaattgggacaaaaggaacattttctaaatcagcttgatactctttataaaaaacagctgaatcttatcttctgcctcacattaattcatgtggcatgccaaaagttagactgaacttttctacatcttcaccttgcattgatacaggaaagtcttctctttaagtcttgctaagtataagggggatagtggtcacgggaagaggagaaccggggctgctctcggatggtaattgacaatgccgatttccatttctttgtcttacggctacttccgagccttctagcaaggtccctggttgcatgtatttcctaagagcagagtttatttctctttacattccctgcttccttgctctccatgcagggaccccagccaacctctgggctgttgaatagctctctgctgggtggcaagcccttctccttggcaccctgttgcttaagcatacagattgctcaccaggtgcacacagacagctgtactgtccaagcccattctgctccaccctgtcctcttcagctaaagagcattccagtaatctaaagcccttttcccctggagaagtccagagtttgcagcagtgtggagctgagcttgaacagaacagaccctcagcacggccctggactaatgcactcttatctgagggcagtccattctagaaggttgatgaatttccctaccactctcctggggaccttttctctctagtgggaacaaatgctacataatttagtcaagatcctattaagtcatctcacctgaggcatctggagagggagttgccttccattggtgggaaattgttggtgccagaatacattttgcccaaaactcttctcattggctggccacctagcagggctcctctaaacacgcaactcagcgaggggacccccttcacctctggcaagagagctgggtagatcagaaacttggtgacacctggctagcacagagcaggctcacttgtcttggtcccactacccagattcctgcagacattgcaaaccaaatgaaggttgttgaatgacccctgtccccagccacttgttttgttatcatctgctctgcagtggaatgcctgtgtgtttgagttcactctgcatctgtatatttgagtatagaaaccgagtcaagtgatcatgtgcatccagacacactgtgtcacctgagccacagagcaaatcaccttaacgatctggaatgaaactgtgaccagtgccgccctgggtggttctggagagactgccgtcttcttgtttggccataggtgctggggccccggcttcagtcactgtctcagacaggagtcccgataagcagatcaccagtcctccactgtccttcctgtcggccttgctgcatgagaagatagctgcttcctccctcttttcctacactgtaattattgttttacaattgagtgccttaataatagtttacaaatactatgtatttatgcaaaactgttaaagtctcatctgttatgattggatacttggtcttgtcagtagtggtcagcattgggttgtgagcttgtcctactccatacgtgtttatcctgctatgcagttttacattgtgtgttcacatctattccaaggagccttgctagaaacaacactggcggttcctgcaggccaggcaggcattggcccatgctgtgtcccataggagccaatgaaagaacgtagcttggtctgctagccagccgtggggtggcgcaggccaggcagcctctgcaccagagtccagcacctgcccattccccagtcacacaatcatactcttctttcatagagattttattaccacctagaccaccctagttttcctctctgttagtgtcctgagctcttttgcaacaaaatgtaggtacagaccaatccctgtcccttccccaatcaggagctccacaccatgagttgtttggttttccagaagctgccagtgggttcccgtgaattgcgttaagatatcgatgattttttttattgtttttcttcttgtttttttaaataatatatttaaaggcagtatcttttgtactgtgaatttgcagtagaagatgcagaatgcactttttttttacttctgttggtgtgtattgtatatagtgtgtgtgcttcttgtgatgaaaataaactttttctttataaattcctgaaa

SEQ ID NO: 847 - DNA, 5730 bp, Homo sapiens
cctccgcctccactcgccctcgtgctcccttcagccccttcgcagctccgtgcgcaaggtcgtgtcccggaagtgaaggggccatgttgatgggtgacccggggagaggtacccggccagaggcgagtcctgcggagtggtagcgcgcacggcctgcggtgtgacacccagcccctgccagtcccccatggccccgtggagccgagaggcggtgctgagtctctatcgggctctgttgcgccagggccgacagcttcgctacactgatcgagacttctactttgcctccatccgccgtgaattccgaaaaaatcagaagctagaggacgctgaggcccgggagaggcagctggagaagggcctggtctttctcaacggcaaattggggaggatcatttaggatcctccaagggaaagaggacaaaggtgccttctgtagacactcctgctctcttccatccccatcttacagatgtattaagaagcctcagatgagcaatggcaggcgctggtgagcgcaaaggcaagaaggatgacaatggcattggcacggccattgactttgtgctctccaatgcccggctggtgctgggggtgggtggagcggccatgctgggcatcgccacgctggcagttaagcggatgtacgatcgggcgatcagtgcccctaccagccccacccgcctgagccattcggggaaaaggagctgggaagaacccaactggatgggctccccacgactgctgaacagggacatgaagacgggcctgagccggtccttgcagacccttcccacagactcctccaccttcgacacagatacattctgcccgccccggcccaagccagtggccaggaagggccaggtagacttgaagaagtcacgactccgcatgtccctgcaggagaaacttcttacttactaccggaaccgggcagccatccctgctggagagcaggctcgggccaagcaagctgctgtggacatatgtgccgagctccggagcttcctgcgggccaagttgcctgacatgccgcttcgggacatgtacttgagtggcagcctctacgatgacctgcaggtggtgacagctgaccacatccaactcattgtgccccttgtgctggagcagaacctgtggtcatgtattcctggtgaagacaccatcatgaatgtccctggcttcttcctggtgcgtcgtgagaatccagagtactttcctcgtgggagcagttactgggaccgctgtgtagtagggggctacctctctccaaagacagtcgcagatacatttgagaaggtagtggctggctccatcaattggccagccatagggtccctcttggactatgtgatccgcccggccccacccccagaagccctcacactggaggtgcagtatgagcgtgacaaacatctcttcattgacttcctgccatcagtgaccctcggtgacacagtcttggtggccaaaccacaccggctagcccagtatgacaacctgtggcggctgagcctgcgtcccgcggagacggcacgcctgcgggctctggaccaggctgactcgggctgccgatctctgtgcctcaagatcctcaaggccatatgcaagtccaccccggctctgggccacctcactgccagccagctaaccaatgtcatcctccacttggcccaggaggaggctgactggtctccggatatgctggccgaccgtttcctgcaggccttgaggggacttatcagctacttagaggctggagtcctgcccagtgccctaaaccccaaggtgaacttatttgcagagctcacccctgaagaaatagacgaattaggatacactctgtattgctcattgtctgagccagaggtgctgctgcagacgtagggcaggtgaaggccaaagcgggtgttggtggtcaggccctggattctccgttagatacacttggctacctagttggtgcctcacagggttcctgctgcctggtgtcttgctgatcatcaccctggtcacttcatgctgattagaatgacatctctttcgtctcctattttgttacccaactcttcctatttttgttaccaatcactgtgctctctgccgccccctggctccaggctaatttttctggaatgaattgagaaggtggcgtgctggcctgagctgatggaccacttggtgttttgcgttttggcccatgtttgctgcctctatctggtctgccttgcccgtttgcctgttcctattcagtgtcttttctattttttcctctctcgttcatgccttctgttttgctcttgtccctggagcatatctgcctaattaagatgttgccttttagttgaatgccactgaagagctgtgatagcatgtttcaaagctgaactctacagagcgagtgctgagacagtatttagggtttctgggagtgaggctggtagaagagttggcctttgaccacggttcctggagtagaagtccatcctccccccaacctcctgacccattcataaatgctgagaatgtctctcatgggaacactgttaatgacccacacaggataagctgaatgcaaagttatttgcaggttgaatttcttggtggctattagcagaagtgcagagtagggaaccagagctggttaagggcctagtgaagggtttgtgtgcccagtgtctgctcgtcatctgtggctgcaggggtcagacagacaaggatggggactgccagggcaccacttcatcatgaatgctggttttcacaccttttccttattttattgccaatcaggacaaggccttgaaggaacgcagccttagacatcaggtgaggatgatggaggtagacagtcgactgaatgtcagctggaaaatccagtcactagttggggtttggtggccatgttttctacccagacaggccctgcttttctaggatgtggccttagagcaagaacagacccaacagccagcccttcatcctccagcgtctgccataggaatgtgagaggggtgtttgctgagcgctccgggcacggccagagggcaagtgagcatgcacggacctcttccccctgtcctgtttctcacccagcacctggggagatcggtgctaccaaggaagagagcacacagataagacagaggggaggaggtgggcatttcctacattcctccttgtttgccgctgctgagattgcagtatttattgcaatgtaaatgtatcctgaaggtggggaggaatgtttaatctaccatgtccgtgtgtcatcttggtttgtgtttttccctgtttgtagcaagactctgatgataattctgtttctcatctgcccattcagtattttgttttccttccgtcaagttgtcttattttttcaatgactacctctccatcattgaggttctggtgaagctctctgcagctgtctcattccttcccaacgatagtaacaggaaatgactctttagcatcgatacctcaacatcaatttagggtagagattcctgcccctcttttgtcacagattaggaaattgagaactagggttaaccttgactatatttagaggtctttttgcctcttttccccttaacaaggatttcttatggtggtttcagtttcatttgcataaaggtattgagagggaacaaaaaacataaagctgagaatcttgagagagctcatctaccctgtctgttggtcagactcaaatgagagttaaaaaaaaaaaaaaaaatctgtatgcctgagtaccatcctggatgaatctagaaggtatggggtagagcttgacagggttcctgtgtacccactgggtatccgttagaggtaagggagaggagaggattgatagagtgttgcaaaagtatagattattcattgagataaaggatttggtttccctgccatgagtattaaaaaaatttaagttttcccaagcttgcatctctgaccaaatttcacataaaacattggaaggaggctgggtgcggtggctcatgcttgtaatcccagcactgggaagctaaggcgggtggatcacttgaggtcaggagttcgagaccagcctggccaacatggtgaaaccccgtctccacgaaaaagataaaaataagctgggcgtggtggcaggcgcctataatcccagctactcgggaggctgaggcaggagaataacttaaacccgggaggcggaggttacagtgagctgagatcgtgccactgcactccagcctgggtgacagagtgagaccctatttcaaaaaaataaaaattggaagaagagcttaaaaaagataagattttaaagagtcccaagttatttaagttgagtgtaattgtcatttaaggaaggcaaatgagtttatcatccttcttaaagagcatctcttttaactgttggacaaaaccataactttgtcattttacaaggaagaacctcttaagaagtcctcagaaccagaagcaatgtgaactctcagcgctggtcctggtgggtttgctgaccatgactgggcaagccgttctttttgctgccatcttcctcatcataaagtgtggaacataggcaattgctttgagattcttggatagaagaggacaacattctgcacctgcccccttttttaaatctttggggaaagatgagtaactttccccactactctgccttcctgttcagtaactcttacttttgcctgaagtaacagcatcttctacttctccatctagagatttttgtgtgtgtgccatcaaggttagcaaactttatacgtagcctaacacttaaaaaatgcactcattatcttaaacctaataaattccagagtttattttggttctcctctgttgcccttcctaaaaaatgagctgaagatgacagtatttttctttacatgcttggttatgacttttaaagttttatttaaataaatgttgaagctcaagtttaaagaagcgttgcagaggcccacggtctcctgggtcccggccacctgtccatattccacatttgctgactgtgctccctgcactccactcaagttgagagttcaaatagtcttgaaggggaatcagcttcaggatggaaggacccaggagaggccccgaggtgggagggttctgtaaatacagactactgcgagtgtccagagctctctgccatgatacttccttgggactgacttggctgagaacgtgttctgtcagaggatttgttagaactctgcccttttgtctgaaactcaaggccaaggagaatgataggagacttaggacagagctgacccttgcaccaggctgggaggctgcagcccttttagatgccacttactgtaagtggccagaataccagagaggtgggttccatggtcaaatgcacagtaggtgtttacctttacatttggatcaccttgtagtctttaaattcttggtccctgaggccaagtccacaacttgccttctagtcacttgcctgcccgcagtggtggtggatgtgttagctggtagatttggaatcagtcaccagtctttctgtactgtcttggttagctctatataagtaggggcagcttagccctgaggcccagagacctgctgtcctttttctccttgagggaggaaataaaactgcggaatacaatgtccttccatagcatgggaagaagaaaataaacatctcctttccaacaaaaaaaaaaaaaaaaaaaaaaaaaaaaaaaa

SEQ ID NO: 848 - DNA, 6946 bp, Homo sapiens
atgctctgcccggctgcggcgcttcgggcaggcggcggcggcggcggcggcggcggcagagggagtttccgctttgtactccaccccggtagcagctccgcggcagggacagcttcctccggacgcttggcgggcttcgctctcgccttacgacagcccggtcggatcatggggttgcccagggggccggagggccagggtctcccggaggtggaaacaagagaagatgaagaacaaaatgtcaagttgactgaaattctggagctcttggttgcagctgggtatttcagggcaagaattaaaggcttatcaccctttgacaaggtagtaggaggaatgacttggtgtatcaccacttgcaactttgatgtagatgttgatttgctctttcaagaaaactctacgataggtcaaaaaatagctctgtcagaaaaaattgtctcggtcctgccaaggatgaaatgcccacaccagctggagccccaccagatccaggggatggattttattcacatatttcctgttgttcagtggctggtgaaacgagctatagaaacaaaagaagagatgggtgactatatccgctcctactctgtatcccagttccagaagacttacagtctccctgaggatgatgacttcataaagagaaaagaaaaggccatcaagacagttgtggacctctcagaagtgtacaagccccgtcggaaatacaaacgccaccagggagcagaggagctacttgatgaagaatctcgaatccatgctacacttttggaatatggcaggagatatggatttagccgccagagcaaaatggagaaggctgaggacaagaaaacggcacttccagcagggctgtcagctacagaaaaagctgatgcccacgaggaagatgagcttcgagcagctgaagagcagcgtattcagtcgctgatgaccaagatgaccgctatggcaaatgaggagagccgtctcaccgcaagctccgtgggccagattgtgggactctgctctgctgagatcaagcagattgtgtccgagtatgcagagaagcagtctgagctatcagctgaagaaagtccagaaaaattaggaacctcccagctacatcgccggaaagtcatttccttgaacaaacagattgcgcaaaagaccaaacatcttgaagagctgcgagcaagtcacaccagcctacaagccagatataatgaagccaagaaaacgctgacagagctgaagacttacagtgagaaactggacaaagagcaagcagccctcgagaagatagaatccaaagctgatccaagtatcctacagaacctgagagcacttgtagccatgaatgaaaatctgaaaagtcaagaacaggaatttaaagcacattgtcgagaggagatgacacgactacagcaagaaattgaaaacctgaaagctgagagagcaccacgtggagatgaaaagaccctctccagtggagagccgcctggtaccttgacctctgcaatgactcatgacgaagacctagacagacggtataatatggagaaagagaaactttacaagatacgtttactacaggctcgaagaaatcgagaaatagcaattttgcaccgcaagattgatgaagtccctagccgtgccgagctaatacagtatcagaagagatttattgaactctaccgccagatttcagcagtgcacaaagaaaccaagcagttcttcactttatataataccctggatgataaaaaggtttatttggaaaaagagattagtctgctgaactcaattcatgagaacttctcacaggccatggcctcccctgctgcccgggaccagtttttacgtcagatggaacagattgtggaaggaattaagcaaagtagaatgaagatggaaaagaaaaagcaagagaacaaaatgagaagagaccagttgaacgaccagtacttggagctgttagaaaagcagaggctatactttaagactgtgaaagagttcaaggaggagggccgcaagaacgagatgctgctgtccaaggtgaaagcgaaggcctcctgaacatccccagccgtggctgtatgtcattgattttacttttaagcaccgtatatcacctacaagatcatgaaatggttctgaaagcgacagtagagagatgcagttgtgatgatttcaacaacctggatgttttctttctcctctttgcttccattcatctctgttggctgctgttgatggagtcagacagtaaacacgtggcttggataacacccatcatcctatgaagaatatagggagtacttgttctctgttgattcaacttttatgtctccagtaacattgcgcttatgaaggtacctgtatttgtatggactctgaataaagaagaattcatttgtttagcaagtattagttcagcaaccactgagaaataagcactgaggaagattcagagacgtgtaaaacacagttcctactgcacaagtacccagcaggtggcccagggaggcagatacagcacacttgaccgcagaactgggctatccaagatgtttttcagtaaacagaaggcatttagctgaaatgatcagcccatgtagtgttggtcacttgggcctttcacctgccatggtaccttttgttcccagctcctccaggtgccagccagcaggcttggtggtgacagcaactggaacgaaagttcagtgttgttttaatttttatacgttactcaagttgatttctcagaaaattgaaaacagaccttgtgctgaggacacgtcaataaaaattataccttcccctgccccaatgttcatgtgagtcacagcatgcagaggggctgtgcatccccctcattgaaggcacatttgatgaggctacgctgcagatgggtcatggtctgagccaggagagagatagacactgttccctgcactcaaggcaagtagggtgtcaggaggaagagcagtagggtttgcagagatccagggaaacttcctggaggaggcagcatttgagccctatctaaagggagaatcggatgttgataggaagactgttttaaatgaaaatacactatgattaaaaacccaagagagtgcagaggagtacaaggcatgcatgttgggaaaggagggaataagctagtctctgcaggaggcttcagagacccgtctgggaagtagggctgagactaggctttggagggccttgaagggcagctgagggttgattttaatccttggaaatgaccagtgcagatcaaacatggagctcctgctgccctggtcctcaggagtctggtaactcagtcatgttctgtaggtttgtgctccattttgcataaatcttgcaaacataccaggtggcaggtttgcacagtaacacaaaagcttaaacatgtcaagcaagtggggcattcagcagccacagaaatgtgttcatttttagtccctaatggatgtgattaagcagggctgatgtgtacagatttaaaaacacacacacgtgctggattaaaaacagccactggtttcagtgccagggccagcaaggcctacctgagccaggcggaagcagcagcttgcaaatagaaactgccacctgcgagcgcttcttgggtcatgtgcagctccacctcagctggtccctgagccgtggtcatgtgggggttttgaagggctaagttgaagcaagtaattgcaaaagaacaggtggcactctgagggcaggggaaggagacagaagtttgactgcgtttgaaattatttcagtcagggaaacatctgcgttgtcttgttaagcagcttgtaggcccacccctggctaactgaactttgtgagcagttggggcagttatttgaatatttgtccaaaggtggtagggaggcagatgacattctggggttactggagtccacctctgtgctgatggggaaagtatggcatgatgaatccaaagcaaccagtaattctttttgaaagtgcaggcatttattttgagctgtatttcataggagtttcatttggtttggttttggtatagagaggtgtccatagatctctattccctttttttttttatcgacaaggcctactacggataaatcagtttttgttgcctgaatacactttgaattagactacagaagccagtttgagctcaaatttcacacttgctgcagacaactctcagtgtggacagtgcctttctgagtaattaggatgttacatgactttttggtgaagccgtatagggtaaggagatgccccaaggcccctgatcatttcagaagccacctggagcaccagaaggggtcatcttcccagggctatggctctgtgtgcttagacagacatagtatggaattgtgctctaagcccacaggcttctccggagttaaaaggaagcaagaacatccttaagttactttttcaaaatatgcgcttcaggaggaaccaggtttccccaggagagagaggctccctgctcaatcagcacagggagttgctagcgggcaggctgcccagtgctgtggaatctccgccagcctctgggttgggggctccctcccacttcttgcttcttatggagtacatgggactgctctgctttaagccgcgatcagagctgttgtgagcaggacaagattgcgtgatcacgaggtgcgtggggagatgctaggacatttgttgatgtctttgacctgtgctccgtctctgttggatgactgggttagctaacaccactagagggaggtacagaatgttaaacagtcgtcagagtcacactgagggttgttttaacagagggcaaattcccagtttgtcaagcatatctctgttagagtccgaagttcatggttttaatggttctagctcgtagcccttaatattttcaggatagctgggtcctgccagtgtccgctgagtccatcagcacaaccagaaggtccagggtccaggcatgggaagcattctctgacaataccgagccctcgggacctcctgaaaccttgagcagaggctggagaagaccttcagacagtccttttactacctcacaaagtgccatgcccgggacctcagacctcagggttgtgacgttgttgatgttgtcaggccccagtacgtctctagtgaccgaagcagacctgcctgaaagggcactccggacagtgagccctggctctaacctgtgccctcatatttctgctgcctcatatggtcttgtttgcccactctgtaggtgactgatcaccctaaaagggaggtaggtatctagcagtagcacagttactttgagcctgaccacttgttctgaagtgcagatgttgaaacatgcattgaggaagaacactttaaggaagcactttatgatttactcatggctggtgttggcctcaaagtaaaagaacatcttaatgcagaacagtacaataaagagccccataggatggatgccatcatctgtccccatggttgggattgccaaggaaagtgccttgttctgtgcatcttcagaatcccccaggccctctcttgatccttttcatgaagtccagagcattccttctattacaggctgaagatgcattgtaaaaggtaatgctataatagtattccctcttctcaataaatgtgcaaaactggagaatctggtgctgatctgcagcatacttgacaacacagggaataccgtggatgttccacgccagccttacatccgtccccattgcctgcccatgtccagtggccctgcgcaacaaaagtaagggcttgtcttaccacactctccccagcatctagctcaaggtagatgactgactgggaaattccggttggataaaatggcttttccacattgcaactttgcatctctattaggaaaatttagattgaacctttcctctacttgatgcttagtttgagaacagttttcacaactttagagggtctctctcagagtatgttatactgtaaccttgaagtttgagatgaaacaaggtgtcagaggttttgaatctttcaaaggaattgccttttacagatttttttttttattccctaagaagggaaaaagagagggaagaactacactaatgttagagataaggtatgttttggctcaaaatgtgtcatgaacctaaaggtaacttgatgggcagaaatgtctcagccatgtgaaccaagaagtgggaccacagtgcaaggctgtgggtggcagcactagatacggtggtggcaggagtgtgacatgtaggcactccatgggggacagctggacggtgtctatcaaaagtgcaaatgcataagctctttgaactagcaatgctactcctaagaattgtacctgtgtacaaggtacttgtgtacaagagtttttgttgaaacattgtaatagcaaaaagttggagagtgccaccaatacaggggaatggttaaatacattatggccagcttaaacaatggaatagtttgtagaaatttaaaacaatggatcctgtgtgtgtgtactaccatagaatgggccccaagatgcatgattaagtgaggaaaaaagcccatggtatcctaatgtttggaatggagaaagtgtgtagatgtatgtgtgtgcatatgttttcacacagacgtatacacgtgtatatcatatgtccacctgcatatgcctaggatgtctctgggaggatatctagcagcccggcagcctgaattgcctctgggaagaggggtgggaatgacttttcaatgtacaccttttgtaccttttgaattttgtaccatgtacatgtattatctattaaaaaatagttcttaatttttaatttggtatacttttcttaatagaaccaaaatggaagaaaattctgattctctaaatctgctttcttaaagataaagcctttgattcaaaagtaaaaaaaaaaaaaaaaaa

SEQ ID NO: 849 - DNA, 699 bp, Homo sapiens
gcccattccagttggagaacgtagtgagtctttcagtggagccagggtctggtttgtcgtgaggagctccgcgatgtcctctcaacagagcgccgtttccgccaaaggcttttccaaggggtcgtcccagggccccgctccgtgtcccgccccggcgcccaccccggcgcccgcctcctcctcctcctgctgcggctccggcaggggctgctgcggcgactcaggctgctgcggctccagctccaccagttgctgctgcttcccaaggagacgccgccgacagcggagtagtggttgctgctgctgcgggggcggcagccagaggtcccagcgctccaacaaccggagctcaggatgctgctccggctgctgagaggcccgcaacccccagcgctgcgctagagaaacccgcccagcccagagcgggcccgccccgctgcggctcccacgcggggctgggcctcggagtttgccccgtaaagcgaattgcactttgatgttcagaaacccactttgttctcagccacgcaaaactccctgaccccgatgtgatttttctccccggggattcgagagccatgcgtgggacactggaccctactgtctacacgggcttgcacacagcaggtgctcagcaaatgtctattgatttgattgtcttttgaagatgtcataataaagcttctacctcctgaaaaa

SEQ ID NO: 850 - DNA, 3157 bp, Homo sapiens
ggaagcgagccctagaattatggcgacctccgcgacgtcgccgcacgcgcctggttttccagctgagggtagatgcggttactatgtggaaaagaagaaacggttctgcaggatggtggtggccgcagggaaaagattttgtggtgaacacgctggagccgcggaggaagaagatgctcggaaaagaatcctgtgtcctttagatccaaaacacacagtatatgaagatcaactagcaaagcatttgaaaaaatgtaactcaagagagaaaccaaaacctgatttctatattcaagatattaatgcaggcttaagagatgaaacagaaatacctgaacaattagttccaatttcttctctatctgaagagcagttggaaaagttaattaagaaattgagaaaagcaagtgaaggcttgaattctacacttaaagatcatattatgtcccatccagcattacacgatgcacttaatgaccctaaaaatggcgattctgcaaccaagcacctgaaacagcaggcttctattttaggtaacattgaaaatttaaagttacttggtccaagaagatgctttgttgagtttggagcgggaaagggaaaattatctcattgggttgatattgccttaaaagatgctgaaaaagttcacttcatcctagtggaaaaggtgaccacaagattcaaggtggatggaaaacacagaaagaaaaattcagtgtttgaaagacttcaaattgatattcaacacttgtgtttgaacaagattcctgtgctaagagaagaaaaactacctgtggtaggaattggaaagcatctgtgtggtatggcaacagatcttgcattacgatgtttggttgaaacctatgctgccagttttgaggaaaggaatgaagaacctttagccaaacgcataaagaatgataaaacagaaaaagaaatttacactttggccaaggaaggaaatgaaaaaaatgtcccagagaagtggaaccctgtggctggcattgttattgcactctgttgtcaccacaggtgtgattggagacattatgtgggcaaagaatatttcagggctctaggccttggagcagtggaattccattatttccagcgaatgagtagttgggcaacttgtgggatgcggaaaacatctttggaaacctcaaatagtaccacaaagaggcaagataatcagaatgatgatagtgaagagcatgatgatggaggatacagaatcacagatgatggcgctgattgtttgcctgggcttcttagtgttgaagaaaagaagaaaatagggcatctttgtaaattgctgattgaccaaggtcgaatccagtatttgcagcagaagggattcagtcctgctttgcagtactatacagaccctctggtgtctttggaaaatgttttgttaactgctttaccaaatcattcttcatcaccagaaacaactgcttaatggaaaagaaatttgagcatcatctgtcttccaccaaaaaaaattttttaattatatttttatatcaaaaaaatatatactttaaatagcaaataatatgaactttaaaaaatgctgtggcctcattaaactttggtaatagcttttctttttacttcagaaatccaaacattagagaattcaccaaagtaatcctctttagaagggcatcttgaattatattatccatccgtatttatggagattggtaaagtagttgaaccgttgacttggtgatctgaaacatacataacatgtcaacacataattagcgtatttctgtttgtattaattttggaaatttatcttcctttgattttatttaatattttttatttcttaagttcaagaggtagtgattgattgtaacaagggccaatctgagaatttgacttatatgtggacatttttccctacagatctggaaagcacaattgtgattttctcaaatgcagacaattcagagatattcacaattaataaacacaattaattaatgaagtcaccttcaaatttccagagccatacatgtatatattgtcagaatctgtccatgacaaacacaaaactgaagagctgttttcaaagaaaaaagattatttcacttaattattttgttggataattgtctagttagaacttccaaaaagatacttacaaacataattcacaaatttgaaataatttctgaagttgattagctatctcatatcttttatcaggtcattttttatatatgtaggcacaaacaataagtatgttctcttctgtttgggaaaataatttggaataaaatagaaattagataatgaaaccaaaaaccttctcaaatttaggccttatttaactcatgactggtttctatgcacaagaaaatactaaaccaaatatatggtaggactgttattctcttctgcatcttatccctattttgtttctgcctttatttgtaaaaattgtcttaattgatggtacatttgccaagacaaaggttcagaattactaattttagatattatgatattctgaaataactatttttatcctgtagttctatgattatatgatttgtaaataagaagcctaaccaatttaaaattcctgactttagtctcatatatcttgtcagactgtctcggttcaaattccaaacctaccatcttcagttgtgcgaccttgggcatgctacctaatctctttgtgcctcaatttcctccttttaaaatggggatgatgatgataacaataatacctacctcacaaggttgttgtgagcatcaaatgagataacacaagtaaaatgcatagaacagttccaagcacagagtaattcaataaatattaactagtaatagtagtggtagtaactcgtgaatctttttaataacataataggctttgattttattatctctttaagttgttaacttttttcccttgttataagttttatgtcaagtaaggtagtttgtttaagttagttacccatgtccccaatcaagggaacctaaatgaagatatatcattaaataattaacctttttttattgtgtcaagcaatactaatttgtgtcataaaatttgttttgcatcattcaacaatttatgcccagaaataaacaatattctacaacaggcaaaaaaaaaaaaaaa

SEQ ID NO: 851 - DNA, 4931 bp, Homo sapiens
cggacccgcccccttcagcttgggaaagcgaaagcgtggcaggggccggacctgggagcggaggaggcgggtctccatagaaacctccacctgtttccggccgggctgtgagagattaggggctgctgcgggggccaatctcagccagctcgcctcttcccagcggcctctgcgggagcggtgggtgttgtacacaatcatcatggcggcggccggggccccggatggcatggaggaacctggcatggacacggaggccgagactgtggctactgaggctcccgcgcggcccgtcaactgcctggaggctgaagccgcggcgggggcggcggccgaggactccggcgccgcacgaggcagcctgcagccggccccggcccagccccctggggaccccgcagcccaggcctcggtcagcaacggcgaagacgcgggcggcggcgcgggcagggagctggtggacttgaagatcatctggaataagaccaagcatgacgtgaagttccccctggacagcacaggctccgagctgaaacagaagatccactcgattacaggtctcccgcctgccatgcagaaagtcatgtataagggactcgtccccgaggataaaacattgagagaaataaaagtgaccagtggggccaagatcatggtggttggctccaccatcaatgatgttttagcagtaaacacacccaaagatgctgcgcagcaggatgcaaaggccgaagagaacaagaaggagcctctctgcaggcagaaacaacacaggaaagtgttggataaaggaaaacctgaagatgtgatgccatctgttaagggggcccaggagcgcctgccaacggtaccgctgtccggcatgtacaataaatctggaggaaaagtgagactcacctttaaactagaacaagaccagctgtggattggcactaaagagcggactgagaaattgcccatgggctccataaaaaatgtggtcagtgaacctatcgaaggacatgaagactaccacatgatggcgtttcagttgggccccacggaagcctcttactactgggtgtactgggttccaactcaatatgtggatgcaatcaaagacactgtgctggggaaatggcagtatttttgaaagcactttcacctctggcccaggagactgacccaaagtgaaggacattgccgggagaggcctgcagcatccctggatttcagagttctggaactttgttcataaaaaatctatattcaatctgaggtgatgtggtgactgaagccagaggtgatgtactttcaccattagcttaattttaacttaaaattaccagttccctttcttgcagtcagcttcataccatttttaaagtcaatacgatggaaatcaataaatctgaattccgaacatgttgtgtggaatactcttaagtgtgtttgagagtagatctgccaattatgttgacaagggaatgatcaaaagctttgttttttttaaaaaaaaaaaaagcagtttcaattgaaatattttcatacatctttggttgcaaacatttggactgcattgcaatgagttggggtgttttttttttccttttttgtataaaattgtatgcaaaatgggggtgggttagtaagccacatatttctgtccattgattcagatttaattctttccctttttcattctctcgcttcctcaatttgagtttttgttttaagaacccaaagatgtcagttcttcttttggtacctcatcaacgcttcctttcctgggctccctcccgccgtgctgctgctgcctgtgaacgcacggtgggagaggaagagctgctcagtcttgggcaaggagctctcacacttgctgtggtgttcgttgagcagcagagtatctcccagtgactcctgtttaaatgtcttgccctttgggcccccatctccaaggagttccattgctggttggatgattgtctgcacccctcactgagcttggcctagaggcccagcctggcatggttgtgcctgggctgtgccgctcaacagccccagctcccaagcagacaaagacctcttccaggaggagccaggtagaagatagttatacagccatatagctgcagatccagataaccttctttctttggaagttttcaagaaattcttaagcagtccaaggatgatttcaattatgcttctccattgggtccttctgctcatgcattcagttcaagtgtcctttatcccaggttcagagatgctgcctttctgaagaagacatctgaccctagcaggttggccagtgttattgaacaacaaaaatgggataaattgctttcatgattagctcaccttcttctggttttagcccttctgttctctgtacacgtgaacttctgtcatctccttctggcttggttgcctctgaaaggagggaaagtctcttggtaaattatctcttttgtgctgtttgctgtttctctgctgccgtctttgcagttctcctctcactggttgcaggctttcatagtaaggtttggcgagaaatgttccaaacatcacattttggattctaggctgtcacccctcattctgtgaaacgtattagcatgtgttcgcccaagatgactattccttgtgagccagttaatgatgatattctacgcccttcccttctaagctgtagttcaggaatccagcccacatagacagactcttgctttccatggtgtagtcaatgccaagtgatgcatctaggcaggaaaatctactctttgcttttttgggggcaattagtacatttgtgaagtgcagcatccaagaaacagcctgttttttcatcccttgagaaaggagcagtcattgcagcttttctgtccttgtcggcctgcagttcctggggaaaagagtacatctgagctacttgtccaagcctctgtctgcaggtgacaggttttgggggaaatgagatgcattaagtagaacatcatctcgggtcagacattgccccttttgtttgccaatgccccagtcctagagacttgtcctgacagtgccgcacacctacttttgatctctcagagcaggtggctccatccccagactagcctggctgctctccgaggcccctccacctgctccccttattgccccattcttgtggcttgccgggccacttggcctcccttcttgccggtgacagcgttccatcatctccccgctccccaagggccaactgcttctcactcaggctggtgtcatttcaggaggaccaaagcctgcgtgagcctttttattttcagtaaaatggtgcttttttccttacttcgagatactatatataaataataatgtaaatgacaccttttcgtacggagctgtttgagtattgctttacagagctcactaaatcagcttcaacaatcttgagctctgtggctcctcaccctgtctgcatggaagaccttgctggacgctctcgggagagcagacatagcaccagaagccactgggagaagtgttttcgatccgtgtctgggccacagtagtattcactgtttagtctttgagttccgtaagcagtctcttcatacatttcttacagtctggagtgtactgactaaatctgtgtaagcaaattgaaatactctttcttttaggtagcgtcacagtggttttttttttcctcaggataatttctatacaatttccttactgtcagagggaccagatctttccctcactgtggcaggggccgtgcaggtggataaaggaagagctggtttccggagagtgactgtaacagcgttgactcgaagctagagatggagggggtggccgtctcttagacattggacacctctcagagcctcctgagggcttctttgtcttctagaatctctaccggtggtcctcctgcaggttctggctcacagacatcatcatgcctttttttccctccctgaggcgccttggcagaagagcgtgaccctgtgagccaggccccccttagctctgcttcagatcacagaacacagacagactcgcgagttgctggacctctttggtattaagtgtttgaatccatggtgggccttttgcaagtagcgttagctctttttaaatgttgaactgagctaaggatgcactttcttgtggacatagaaggggcccacgtaaggccctgagtaggctccttagttgctgctttacctgatgagggccaaagagattaactctgcctcgttgccatgtctcagaaaagttgccatatttcacccagaaggggcttgttttcctcttactcttactttaaccatgtgcctggaggagccattctgggctcttgcacttgcccagcctttctttgccaggggcagagaagggaaagggggtagattgagtgtgccaagggccgtgcaagggcaggcttgctttccacccatctgctgagggagccctctcctctcgctccttgcctctgttcacacctgttgtcttggaagaggatggtccctttgtcttaaggctttgtgataaagtcatctccagttaggatctgcacctgtttccttcgtaatagtgcctggcggcctttctgaagttacaggtggttgggagccctctcgcatgcagaacatctggtagattgatctgccaggctgggtggttctactgctttctcaatttctaagaaccttttttttttcttaaagagttctgctgaattatttgacaatatttgtaagtaccatgtttccttgtggtgtatgctctgttctggtttctgttttcaaatcaaatgcctgtttgggaggagatgaacgtatttagtctattagatttgcactgctggattttttttttaaagtgtaaccttgaatagctgtcttattgtttatcctgtaagattagtcaatcgattaaagtttgataattaa

SEQ ID NO: 852 - DNA, 1108 bp, Homo sapiens
gccatggcggcgtctctggggcaggtgttggctctggtgctggtggccgctctgtggggtggcacgcagccgctgctgaagcgggcctccgccggcctgcagcgggttcatgagccgacctgggcccagcagttgctacaggagatgaagaccctcttcttgaatactgagtacctgatgccctttctcctcaaccagtgtggatcccttctctattacctcaccttggcatcgacagatctgaccctggctgtgcccatctgtaactctctggctatcatcttcacactgattgttgggaaggcccttggagaagatattggtggaaaacgagcagttgctggcatggtgctcaccgtgataggaatttcactctgcatcacaagctcagtgagtaagacccaggggcaacagtctaccctttgagtgggccgaacccacttccagctctgctgcctccaggaagcccctgggccatgaagtgctggcagtgagcggatggacctagcacttcccctctctggccttagcttcctcctctcttatggggataacagctacctcatggatcacaataagagaacaagagtgaaagagttttgtaaccttcaagtgctgttcagctgcggggatttagcacaggagactctacgctcaccctcagcaacctttctgccccagcagctctcttcctgctaacatctcaggctcccagcccagccaccattactgtggcctgatctggactatcatggtggcaggttccatggactgcagaactccagctgcatggaaagggccagctgcagactttgagccagaaatgcaaacgggaggcctctgggactcagtcagagcgctttggctgaatgaggggtggaaccgagggaagaaggtgcgtcggagtggcagatgcaggaaatgagctgtctattagccttgcctgccccacccatgaggtaggcagaaatcctcactgccagcccctcttaaacaggtagagagctgtgagccccagccccacctgactccagcacacctggcgagtagtagctgtcaataaatctatggtaaacagacaaaaaaaaaaaaaaaaaaaaaaaaaaaa

SEQ ID NO: 853 - DNA, 3972 bp, Homo sapiens
ccggaagttctgccttgtctccgccgcgggtcaggggtgagagctggaatctctgcacgggccttggaaaacgactgtcttcttctgccaaaatgtcaggaattggaaataaaagagcagctggagaacctggcacctccatgcctcctgagaagaaggcagctgttgaagattcagggaccacagtggaaacaattaagctaggaggtgtctcttcaacggaggaactagacattagaacactgcaaaccaaaaatcgcaagctggcagaaatgttggatcagcggcaggccattgaagatgaacttcgtgagcacattgaaaaactggaacgacgacaggccactgatgatgcctcactattgattgtcaaccgatactggagtcagtttgatgaaaacatccgtatcatccttaaacgttatgatctggagcagggcttgggagacctactcacagaacgaaaagcccttgttgtgcctgaaccagaaccagactctgatagcaatcaggagcgtaaagatgaccgagagagaggggaagggcaagagccagctttctctttccttgctactttggccagcagttccagtgaagagatggagtctcagctgcaggaacgtgtggagtcttcccgccgagccgtgtcccagattgtgactgtttatgataaattgcaagaaaaagtggagctcttatcccggaagctaaacagtggagataatctgatagtggaggaagcagtgcaggagctgaactctttcctcgcacaggagaatatgaggctacaggaattgacagatcttcttcaggaaaagcatcgcaccatgtctcaggagttctccaagttgcagagtaaagtggagacagccgaatcacgagtgtctgtcctggagtccatgattgatgacctgcagtgggatattgacaaaattcgaaagagggaacagcgactcaaccgacacttagcagaagtcctagaacgggtgaattccaaaggttataaggtgtatggagcggggagcagtctgtatggcggcacaatcactatcaatgctcggaagtttgaggaaatgaatgcagagcttgaggagaacaaagagttggctcagaaccgtctctgtgagctggagaaacttcggcaagactttgaggaggtcactacacaaaatgaaaagctgaaggtggaattgcggagtgcagtggagcaagtcgttaaggaaactccagaatatcgctgcatgcagtcacagttctccgtcttgtataatgagagcctacagttgaaagcacacttggatgaggctcggaccctgcttcatggcaccagaggaacccaccagcaccaggttgagcttattgagcgagatgaggttagtcttcataagaagctgaggactgaagtaattcagctagaagatacattggcccaggtccgcaaggagtatgaaatgctgaggatagaatttgagcagacccttgctgccaatgaacaagcaggccctataaacagggagatgcgccacctcatcagtagcctccagaatcacaatcaccagctgaaaggggaggtcctgagatataagcggaaattgagagaagcccagtctgacctgaacaagacacgcctgcgtagtggtagtgccctcctgcagtcccagtctagtactgaggacccgaaggatgagcctgcggagctaaaaccagattctgaggacttatcctcccagtcctcagcttcaaaggcatctcaggaggatgccaatgaaatcaagtctaaacgggatgaagaagaacgagaacgagaaaggagggagaaggagagggaacgagaaagagaacgggagaaggagaaggagagagaacgagagaagcagaagctaaaagagtcagaaaaagagagagattctgctaaggataaagagaaaggcaaacatgatgatggacggaaaaaggaagcagaaattatcaaacaattgaagattgaactcaagaaggcacaggagagccaaaaggagatgaaactattgctggatatgtaccgttctgccccaaaggaacagagagacaaagttcagctgatggcagctgagaagaagtctaaggcagagttggaagatctaaggcaaagactcaaggatctggaagataaagagaagaaagagaacaagaaaatggctgatgaggatgccttgaggaagatccgggcagtggaggagcagatagaatacctacagaagaagctagccatggccaagcaggaagaagaagcactcctctctgaaatggatgtcacaggccaggcctttgaagacatgcaggagcaaaatatccgtttgatgcagcaattgcgggagaaggatgatgcaaatttcaagctcatgtcagagcgtatcaagtccaatcagatccataagttgcttaaagaagagaaggaggagctggcagaccaggtgttgactctgaagactcaggttgatgcccagctacaggtagtaaggaaactggaagagaaggagcatctgttacagagcaacattggcacaggggagaaagagctgggtcttaggacccaagccttagagatgaataaacgcaaggcaatggaggcagcccagcttgcagatgacctcaaagcacaactggagttggctcagaagaagctacatgattttcaggatgagatcgtggagaacagtgttaccaaagaaaaggacatgttcaatttcaaacgagcccaggaggacatctctagacttcgcaggaagctggagaccacaaagaaaccagacaatgtacccaagtgtgatgagattctgatggaagagattaaggattacaaggcacgcttgacctgtccgtgctgtaacatgcgtaaaaaggatgctgttcttactaagtgttttcatgtcttctgctttgagtgtgtgaagacacgctatgacacccgccagcgcaaatgtcccaagtgtaatgctgcttttggtgccaatgattttcatcgcatctacattggttgatctaagtcaagagaagaagaggagctggctagtcaggaacttattcattaaccaccaaacctctacctcttctctccttgactgtcacctgtaggacagtttatcagtcaactacctttcctccagactttacttccaggctctcctcttcagtagctggatgactttagcagaaaggactggtaaatacaagccttgggtttcagaatgaattagaaacaaataactcttactgtcttccctcccagctttgtttattttgtgcttttagacttttcagtgttttctttttccagcccactgtataaacttggattgtccattcctcctgaagaaatcaagttggtatttttgatgtggaaaagggaacaaaagtggaaacatggctacttttggggagtgatattttaaaaaataagttgtctatgggcacaaagttttcttcatttgtgtagcaaacttcttgtgaatgtggattacaaaatggtataattgtgctactctcccctgggtggtttgcagccctaatgaaattatgtctaggatgattcagtctatttcccatttactagcagagtaacttgttaagatcagctggctttcttgttaaagttatttaagttttgaatgctctactacttcaagtctttaaatttcttgagactagaataattttaaataatatgaccctttgtcttctaatgaaataaagattgaagaggttgagtcaggactgagctggtgaagaaatcttgtgggtattctggaaatttgatacggagagaacttggtgagctatgaattactctcagtctcctttttacagggttgttgtgatccctcttttccagaaaattctgtggaatgtttctgtaggactttgttctccacaagcttgaattaaagcaggattcagtttgcaaaaaaaaaaaaaaaaaaaaaaaaaaaaaaa

SEQ ID NO: 854 - DNA, 5478 bp, Homo sapiens
agtttggtctggagcagctgaaaccggtttgagcgtggctgcttcctgccgctcgacgccgcggcaggccgcctggggggagcgctggcgaggcacggacggcgggcgcccggtacctctgcccgcggtcctcgctctcgggcggggcggcggcgacgcggacctgcggactagcgaacccggagcacgacatcataaaataaatccatcagaatgacaccttctcaggttgcctttgaaataagaggaactcttttaccaggagaagtttttgcgatatgtggaagctgtgatgctttgggaaactggaatcctcaaaatgctgtggctcttcttccagagaatgacacaggtgaaagcatgctatggaaagcaaccattgtactcagtagaggagtatcagttcagtatcgctacttcaaagggtactttttagaaccaaagactatcggtggtccatgtcaagtgatagttcacaagtgggagactcatctacaaccacgatcaataacccctttagaaagcgaaattattattgacgatggacaatttggaatccacaatggtgttgaaactctggattctggatggctgacatgtcagactgaaataagattacgtttgcattattctgaaaaacctcctgtgtcaataaccaagaaaaaattaaaaaaatctagatttagggtgaagctgacactagaaggcctggaggaagatgacgatgatagggtatctcccactgtactccacaaaatgtccaatagcttggagatatccttaataagcgacaatgagttcaagtgcaggcattcacagccggagtgtggttatggcttgcagcctgatcgttggacagagtacagcatacagacgatggaaccagataacctggaactaatctttgattttttcgaagaagatctcagtgagcacgtagttcagggtgatgcccttcctggacatgtgggtacagcttgtctcttatcatccaccattgctgagagtggaaagagtgctggaattcttactcttcccatcatgagcagaaattcccggaaaacaataggcaaagtgagagttgactatataattattaagccattaccaggatacagttgtgacatgaaatcttcattttccaagtattggaagccaagaataccattggatgttggccatcgaggtgcaggaaactctacaacaactgcccagctggctaaagttcaagaaaatactattgcttctttaagaaatgctgctagtcatggtgcagcctttgtagaatttgacgtacacctttcaaaggactttgtgcccgtggtatatcatgatcttacctgttgtttgactatgaaaaagaaatttgatgctgatccagttgaattatttgaaattccagtaaaagaattaacatttgaccaactccagttgttaaagctcactcatgtgactgcactgaaatctaaggatcggaaagaatctgtggttcaggaggaaaattccttttcagaaaatcagccatttccttctcttaagatggttttagagtctttgccagaagatgtagggtttaacattgaaataaaatggatctgccagcaaagggatggaatgtgggatggtaacttatcaacatattttgacatgaatctgtttttggatataattttaaaaactgttttagaaaattctgggaagaggagaatagtgttttcttcatttgatgcagatatttgcacaatggttcggcaaaagcagaacaaatatccgatactatttttaactcaaggaaaatctgagatttatcctgaactcatggacctcagatctcggacaacccccattgcaatgagctttgcacagtttgaaaatctactggggataaatgtacatactgaagacttgctcagaaacccatcctatattcaagaggcaaaagctaagggactagtcatattctgctggggtgatgataccaatgatcctgaaaacagaaggaaattgaaggaacttggagttaatggtctaatttatgataggatatatgattggatgcctgaacaaccaaatatattccaagtggagcaattggaacgcctgaagcaggaattgccagagcttaagagctgtttgtgtcccactgttagccgctttgttccctcatctttgtgtggggagtctgatatccatgtggatgccaacggcattgataacgtggagaatgcttagtttttattgcacagaggtcattttgggggcgtgcaccgctgttctgggtattcatttttcatcactgagcattgttgatctatgccttttgggcttctcagttcaatgaagcaataatgaagtatttaactctttcactacagttcttgcaagtatgctatttaaattacttggccaggtataattgccagtcagtctctttatagtgagaaaatttattggttagtaatataaatattttaaactaaatatataaatctataatgttaaacatatgttcattaaaagcatagcactttgaaattaactatataaatagctcatatttacacttacagcttttcatttgatcaggtctgaaatctttagcacttaaggaaaatgactatgcataattatacctgaccatgaaaaaaataagtacctcaaatgcatgcatttgcactggtgattccaactgcacaaatctttgtgccatcttgtatataggtattttttacatgggttgacatgcacacaacaccattttcattcagtatgaaccttgaggctgctgccatttttccacttaaccaaaccagcctgaaggtgaacctcgaaacttgtttcataaatctttcaaaagttgttttacatcaatgttaaaatttcaaaatgctgcagggtaatttaatgtataaaatattagtaagaaaaagtatgtattgcatacttagtagaatagatcacaacatacaaattcaattcagtgcatgctttaggtgttaagcatgagattgtacatgtttactgttaggtccttgcatctgtggtgctaggtgagtatgagaagatgtcaaggactggacgtattttgttgcctaaaaaaaaaaggctgtttgtaggcgttttaaatatgcttattttgtgtgtctctcactacctattacacactgttgctttgtgggtttgttttgtatgtgcgtgtgttatacagtagttaaatttccatgcagaaaaataaatgtcctgaattttcatattagtattctttattgtatatcatgcatgtaatttatttagaaatgtaggtcttactaaatgtatatgcatgtatttcagattatactaggatttcttggattagaagcagattgtgttaactgtaacttaaagaatgaatgttaaataaaatgatacagatttattttcttcattacaaaatgaaatttcaagaaggtgttacttttgtagaatggttttataatatgacaagaaattttaatatagtgtctaccctaaagggatggcttatttgcatctaccttttactgcatgtttttcacaaggcagtttattcatatattgacatattttggtagtagctgagaacctaagacttgaaattatacattgtgtagtattttttaagctaagcaatgcaattttggtcagatcttatttgtgtgaagataggctctgaaatcctatggtattgcgtttgtaacgttgatattaatgcaaaatagtttaggaaatggagtcttctgcaagggttctgtatacttttcccacattgtatgagattttccaaaattttggtgtgaattgggcacttttggaaaactcctgaaaaagaattagtttccttcatctgcagacctttgtccaatacggttaccatttctttatagtaactcgattagccatatatgtttgtttctagtcctgctcctttgctcctctcctatgccttcccagtgctggctccattttgaagactcaaggacagaggggaagcagatcataaagagaaaaaggagacagaagaaaggatgaaggaaggaggtcatggggagtgtggcttctgagcagtttagttgctggggagagcagacagtcactgcctacaatacagacagaaccttcctgctcactttctgtcctatctcttcctgaccttatgaaccagtgttagtagatgattaaaacatgacaagcaatggctccttattttcacaggactaagtccgggccttcgtatcactagctgttgccttttacaccctgcttcagccaccctgtccctgtcattggccctggacttcctctctgtgcccgtgtgtcctctgcctgggagccctctcctcccatagtcactttctctctgccaaactcatttcttcttgtgcccaagacctctctcctgagcccttgtggaaacttcaggaaggatgaatccgtctttgtgctccacggctcgtaccttgatcaggctgtgcatcacagtaattctgttctaggtaggcagagttgatctttgtctcatctgccaggctgcaggctcttcaagggcagggaccttgtcatagtcatttttattttcacagtgcttggaacatggtggaaaatgaatgttggaattattggagtaatataatttgtatcaaatgtccttttgaattaagagatttagttatgtttactaagaatgtaaactttgaattggtttgcattttaacaattaggatggtttattgatgtgaattttgaaatgtagaggtataatgttaaattattttatactttatggaaatcaagtgaaatgtttgaaaaaatgccgccattatcctctggtattttctactctctggaattatgtgctgtaaatgatcggctgtaaatgtgaggcacaccacccacccctgtgtggaaagtgttgtggcgcttcctgccacccacccacctctctgccgttgctccttgtgacacttgtctgtcgtctcccatccaaactccaagcttacagctacctcagtactgctttgcttgtctgaaacacctcctttgccttccttcagtgtcccgctcaggtgcagcctcctccctaaagctcatctcagcttttgatctgaatgatgatggaaacatgcagacagcctctcagtcttactatttaatgttgtagctgggaaaaaacccagagaggttaactgatatactgggttgggactaggatgtgggttttgtgactctgaatcccatgttctcaaactacgctgccttccgaagtctggcatttgttagctcatgcttccttgtagtccagcttcttatgtgcctgttatattctccagtaagattgtaagccccttaagggcagggacgtctttgcatctctagcactgctatagtgttctatccttagttatgaactagataaataaatggtggtggcaacaatcctaaaaaaaaaaaaaaaaaaaa

SEQ ID NO: 855 - DNA, 3417 bp, Homo sapiens
gtcactgaggccccgccccgtccatcagcctgtctcaacgcacgccagtctcagctccgaccttgcagcggcgcagcgcgggtgggaggcggggaggagcagcgggaagagcggagcgaggaccgcgtccggcgcagtcttcaatgagcagcgcggaaactgcaccccagacccgagcctgctgcgcgccccctcccagagctcacctggtgccaggtaacaggcctggcctcgccctgtggatgatgatggccttgcccccgtgagctacaacctggccttcagcacccgcccacctccaaccagcaggatgcggctgtggaaggcggtggtggtgactttggccttcatgagtgtggacatctgcgtgaccacggccatctatgtcttcagccacctggaccgcagcctcctggaggacatccgccacttcaacatctttgactcggtgctggatctctgggcagcctgcctgtaccgcagctgcctgctgctgggagccaccattggtgtggccaagaacagtgcgctggggccccggcggctgcgggcctcgtggctggtcatcaccctcgtgtgcctcttcgtgggcatctatgccatggtgaagctgctgctcttctcagaggtgcgcaggcccatccgggacccctggttttgggccctgttcgtgtggacgtacatttcactcggcgcatccttcctgctctggtggctgctgtccaccgtgcggccaggcacccaggccctggagccaggggcggccaccgaggctgagggcttccctgggagcggccggccaccgcccgagcaggcgtctggggccacgctgcagaagctgctctcctacaccaagcccgacgtggccttcctcgtggccgcctccttcttcctcatcgtggcagctctgggagagaccttcctgccctactacacgggccgcgccattgatggcatcgtcatccagaaaagcatggatcagttcagcacggctgtcgtcatcgtgtgcctgctggccattggcagctcatttgccgcaggtattcggggcggcatttttaccctcatatttgccagactgaacattcgccttcgaaactgtctcttccgctcactggtgtcccaggagacaagcttctttgatgagaaccgcacaggggacctcatctcccgcctgacctcggacaccaccatggtcagcgacctggtctcccagaacatcaatgtcttcctgcggaacacagtcaaggtcacgggcgtggtggtcttcatgttcagcctctcatggcagctctccttggtcaccttcatgggcttccccatcatcatgatggtgtccaacatctacggcaagtactacaagaggctctccaaagaggtccagaatgccctggccagagcgagcaacacggcggaggagaccatcagtgccatgaagactgtccggagcttcgccaatgaggaggaggaggcagaggtgtacctgcggaagctgcagcaggtgtacaagctgaacaggaaggaggcagctgcctacatgtactacgtctggggcagcgggtccgtgggctccgtctacagtggcctgatgcagggagtgggggctgctgagaaggtgttcgagttcatcgaccggcagccgaccatggtgcacgatggcagcttggcccccgaccacctggagggccgggtggactttgagaatgtgaccttcacctaccgcactcggccccacacccaggtcctgcagaatgtctccttcagcctgtcccccggcaaggtgacggccctggtggggccctcgggcagtgggaagagctcctgtgtcaacatcctggagaacttctaccccctggaggggggccgggtgctgctggacggcaagcccatcagcgcctacgaccacaagtacttgcaccgtgtgatctccctggtgagccaggagcccgtgctgttcgcccgctccatcacggataacatctcctacggcctgcccactgtgcctttcgagatggtggtggaggccgcacagaaggccaatgcccacggcttcatcatggaactccaggacggctacagcacagagacaggggagaagggcgcccagctgtcaggtggccagaagcagcgggtggccatggcccgggctctggtgcggaaccccccagtcctcatcctggatgaagccaccagcgctttggatgccgagagcgagtatctgatccagcaggccatccatggcaacctgcagaagcacacggtactcatcatcgcgcaccggctgagcaccgtggagcacgcgcacctcattgtggtgctggacaagggccgcgtagtgcagcagggcacccaccagcagctgctggcccagggcggcctctacgccaagctggtgcagcggcagatgctggggcttcagcccgccgcagacttcacagctggccacaacgagcctgtagccaacggcagtcacaaggcctgatggggggcccctgcttctcccggtggggcagaggacccggtgcctgcctggcagatgtgcccacggaggcccccagctgccctccgagcccaggcctgcagcactgaaagacgacctgccatgtcccatggatcaccgcttcctgcatcttgcccctggtccctgccccattcccagggcactccttacccctgctgccctgagccaacgccttcacggacctccctagcctcctaagcaaaggtagagctgcctttttaaacctaggtcttaccagggtttttactgtttggtttgaggcaccccagtcaactcctagatttcaaaaacctttttctaattgggagtaatggcgggcactttcaccaagatgttctagaaacttctgagccaggagtgaatggcccttccttagtagcctgggggatgtccagagactaggcctctcccctttacccctccagagaaggggcttccctgtcccggagggagacacggggaacgggattttccgtctctccctcttgccagctctgtgagtctggccagggcgggtagggagcgtggagggcatctgtctgccatcgcccgctgccaatctaagccagtctcactgtgaaccacacgaaacctcaactgggggagtgaggggctggccaggtctggaggggcctcaggggtgcccccagcccggcacccagcgctttcgcccctcgtccacccacccctggctggcagcctccctccccacacccgcccctgtgctctgctgtctggaggccacgtggatgttcatgagatgcattctcttctgtctttggtggatgggatggtggcaaagcccaggatctggctttgccagaggttgcaacatgttgagagaacccggtcaataaagtgtactacctcttacccctaaaaaaaaaaaaaaaaaa

SEQ ID NO: 856 - DNA, 10802 bp, Homo sapiens
gaagtaaaagggcggccggcagctgggcaattgctttgcgaggctgggtgttgagtcgagccgcgggaaaggcgcgtgtcggcctctcactggcgcagcctgcactgccgctgccgcctcgccccgccctgccctggcgttgtctctggcactgtggcggactgaccacggcccgggcatgggctgcaagggagacgcgagcggtgcgtgtgccgcgggtgcgctgccggtgacaggagtttgctataaaatgggagttctggttgtactcactgttctgtggctgttctcctcagtaaaggccgactcaaaagccattacaacctctcttacaacaaaatggttttccactccattgttgttagaagccagtgagtttttagcagaagacagtcaagagaaattttggaattttgtagaagccagtcaaaatattggatcatcagatcatgacggtaccgattattcctactatcatgcaatattggaggctgcatttcagtttctgtcacccctccagcagaatttgtttaaattttgtctgtcccttcgttcttactcagctacaatccaagccttccagcagatagcagctgatgaacctccaccagaaggatgtaattcgtttttttcagtgcatggaaagaagacttgtgaatctgatacccttgaggctcttctactgacagcctctgaaagacccaaacctttattgttcaaaggagatcacagatatccctcgtctaatcctgaaagccctgtggtgattttctactctgagattggctctgaggaattttccaattttcaccgccagcttatatcaaaaagcaatgcaggcaaaatcaattatgtattcagacattatatatttaatcccaggaaggagcctgtttacctctctggctatggcgtggaattggccattaagagcactgagtacaaggccaaggatgatactcaggtgaaaggaactgaggtaaacaccacagtgattggtgaaaatgatcctattgatgaggttcaggggttcctctttggaaaattaagagatctgcaccccgacctggagggacagttgaaagaactcagaaagcatcttgtagagagcaccaatgaaatggcacctttaaaggtttggcagttgcaagatctcagtttccagactgctgctcgaatcttggcttctcctgttgagttggctttggttgtcatgaaggatcttagtcagaattttcctaccaaagccagagcaataacaaaaacagctgtgagctcagaacttagaaccgaagtggaagagaatcagaagtatttcaagggaactttaggattacaacctggagattcagccctcttcatcaatggacttcacatggatttagatacacaggatatattcagtctgtttgatgtgttgaggaatgaagctcgggtaatggagggtctgcatagattgggaatagaaggcctttctctgcataatgttttgaagctgaacatccagccctctgaggcagactatgccgtagacatccggagtcctgctatttcatgggtcaacaacctggaggttgatagcagatataattcgtggccttctagtttacaagagttgcttcgacccacctttcctggtgttattcggcagatcaggaaaaacttacataatatggttttcatagttgatcctgcacatgagaccacagcagagttgatgaacacagctgagatgttccttagtaatcatataccactaagaattggttttatctttgtggttaatgactctgaagatgttgatgggatgcaagatgctggagtggctgttcttagagcatataattatgttgcccaagaagtggatgattatcatgccttccagactctgacacatatctataacaaggtgaggactggagaaaaagtgaaagttgaacatgtggtcagtgtcctggagaagaaatatccgtatgtagaagtgaatagcattttggggattgattctgcttatgatcggaatcggaaggaagcaagaggctactatgagcagactggagttggacctctgcccgttgtgctgttcaatggaatgccctttgaaagggaacagctagaccctgatgagttagaaaccatcacaatgcataaaatcctggagaccaccaccttcttccaaagagcggtgtacttgggtgaactgccccatgatcaagatgtggtagagtatatcatgaatcagccaaatgttgttccacgaatcaattctaggattttgacagctgaacgagactacctggatttaacagcgagtaataacttctttgtggatgattatgctagatttactatcttggattcccaaggcaagactgctgctgtagccaatagtatgaactatctgacaaagaaaggaatgtcctccaaggaaatctatgatgattcttttattaggccagtaactttttggattgttggggattttgatagcccttctggacggcagttactgtatgatgccatcaaacatcagaaatccagtaacaatgttagaataagcatgatcaataatcctgccaaagagataagctatgagaacactcagatctccagagcaatctgggcagctctccaaactcagacttccaacgctgctaagaacttcatcaccaaaatggccaaggagggggctgcagaggccctggctgcaggagctgacattgcggagttctctgttgggggaatggatttcagtctttttaaagaggtctttgagtcttccaaaatggatttcattttgtctcatgccgtgtactgcagggatgttctgaagctgaagaagggacagagggcagtgatcagcaatggaaggatcattgggccactggaggatagtgagctctttaatcaagacgatttccacctcctcgaaaatatcatcttaaaaacctcaggacagaaaataaaatctcatattcaacagcttcgggtagaagaagatgtggcaagcgacttggtaatgaaggtggatgctcttctgtcagcgcaaccaaaaggagatccaagaatcgagtaccagttttttgaagacagacacagtgcaatcaaactgaggccgaaggaaggggagacatactttgatgttgtggctgtcgttgaccctgtcaccagagaagcacagagacttgctcctttgctcttggttttggctcagctgataaacatgaatctgagagtatttatgaactgccaatccaaactttctgacatgcctttaaaaagcttttaccgttatgtcttagaaccagagatttctttcacttcagacaatagttttgctaagggtccaatcgcaaaatttttggatatgcctcagtctccactgttcactctgaatttgaacacacctgagagctggatggtagaatctgtcagaacaccatatgatcttgataatatttatttagaagaggtggacagtgtagtggctgctgagtatgagctggaatacctgttactggaaggtcattgctacgacatcaccacaggccagcctccacggggactacagtttaccttaggaacttcagccaacccggtcattgtggacaccattgttatggccaatctgggctactttcagctgaaagccaacccaggagcttggatcctcagacttaggaagggacgctctgaagatatttatagaatttacagccacgatggcactgattctccccctgatgctgatgaggtggttatcgtcctcaacaacttcaaaagcaaaattattaaagtgaaggttcagaagaaggcagatatggtgaacgaagacttgctgagtgatggaacgagtgagaatgaatctggattttgggattccttcaaatggggctttacaggacagaagactgaggaagtgaagcaagataaagatgacataattaatattttctccgttgcatctggtcatctctacgaaagatttcttcgcataatgatgctatccgtgctgaagaataccaagactcctgtgaaattctggttcttgaagaattacttgtcccccacatttaaggagtttataccttacatggcaaatgaatacaatttccagtatgagcttgttcagtacaaatggccccggtggcttcatcaacaaactgaaaaacagcgtatcatctggggttacaagatcctcttcctggatgtacttttcccactagttgttgacaagttcctgtttgtggatgctgatcagattgtacgaacagatctgaaagagttaagagatttcaatttggatggtgctccttatggttacactcctttctgtgacagccgaagagaaatggacggctacaggttctggaagtcagggtactgggccagtcatttagccgggcgaaagtatcatatcagtgcactatatgttgtggatctgaagaagtttaggaaaatagctgctggtgacagactcaggggacagtaccaaggtctgagtcaggaccctaacagcctttcaaatcttgatcaagatctgcccaataacatgattcatcaggtgccaattaaatccctccctcaagaatggctttggtgtgaaacgtggtgtgatgacgcctctaagaaaagggcaaaaaccattgatttgtgtaataatccgatgaccaaagagccgaaactggaagcagctgtgcggattgtcccggagtggcaggactacgaccaagagatcaaacagctacagatccgctttcagaaggagaaagaaacgggagcactgtacaaagagaagacaaaagaaccaagccgagaaggtcctcagaaacgtgaagaattatgatctctggagaaggacaggaaatcaccccatttgaaaaacagtttttataataaatgctagttttttctgatctgtctatacaactgctgataagccggctgggcaggagtgccacaccttttgattctgagcatttgattctgacttctgtactctggtggccactggatctttgggattaaagctctgttggatttgtacctcagaggaagaccaagtggctgatcctttggactctgtaaagagcattcttctagtcagagggtggaatggcagcagcaactggaagaaaatgagttttttggtgcccacacccaagagcacacacatgctgcactgtctcggaaagcagggccagctagagccaccatgttcttccttacctcagtttacctgcggcctgcgctgcactgcagatgcccaccctgccctgggtctggccggcggaagctctgtccaaggtccacacacctccaggtttacgccaacatccttgtgccctccccaccttctcttccaacgcattaggtgcattgtttaattgaaatccaaccaacaattgtgtgtcaaggctggtttggtgcagtggctgggcaaattaattttgggccaggatgggggtgggttgcagtgagggtagggaaaatgtcaggagtaggaaggttcgggggttaagggaagggaaggaagaccagaactggccatcctcttttataatccattagtagcaccatggctcatttgaaatgaaaatattacacttattccccacccaaccgcagtgaactttctaggtaattgttttgaaaacaatttttgtatctgtgaaagtctttgctttttctttccaccttctagaaaagtctgctaccagtttccttactgaatacagccatactcagcccctctcgcatccagcccgtcagggtcagggtcagggtcaggctccctcaagacgagcaccgcattgtctgccctcttttgcgtaggatttttctctcagacccaggggacattgccttggacttttctctacaaatgccctcagatgtaagaccagaaatgattctgcttgtggaactcgtggctttctgtcctattttccttttatgtgagccctgcaggttgcctttggcgcccacaccagttctgtcttcatgtcgctgcatcgtgaagccccatttgcctttagtccctgctttgtgtgtcttcacttccacagccagtgttgcccctcagggcatactttgctggtgaacgggctgtagagtcttgagtatgttattggcctaagtgggcatgaggccccagcatccgactccatctgccaggctgcagggcacagcagcactggcatagacaggcacgctctgtcttccaacgtgcaccagccttttcttacatattttgcctgtttttaaaaaatacgaggagagggtgcagatggatactgtgccctcaccctcctaagccaggtaatatattgatgtgcagacttttaagaaatcttagtcttatcacaaatatcaagtaatttattttttccattttcaaatgcaaaagttagcctaggaagcctcccagtcatcctgaaggaccttttgactttgcttttataattctgttaaaaattgaggaggggattaatgagtacaatgaaaacaaaacaaaacaaaaaattaagaagaggaaagctcaaaagaggataagagactgaaaaggcacctcagaatggctgctgtgggcagagtctgtgacatgactttccccgccctgcccctctgttcagagcagctggaaagatgggatcagtaagattaaaaaacttttgttcggccaggcgtggtggctcacacctgtaatcccagcactttgggaggctgaggcggacggatcatgaggtcaggagttcaagaccagcctggccaatatggtgaaaccccgtctctactaaaaatacaaaaattagccgggtgttgtggctcaccctctattcccagctactcgggaggcagagacaggagaatcgcctgaacccaggaggcagaggttgcagtgagctgagatcgtgccactgcactccagcctgggtgacagagcgagactccatctcagaaaacaaacaaacaaaaagaaacttttgttcaagctgcatcttcacattgaatgaaagcattcagacgggtgactgctgctgtccacaactgtgggcggaagtgtgccttttcccagtttctcgtccaggaggttgcatagcaaatactcaagtcactgggatatatgctttccaaatgctggcccccatagcacctttccccatgtctttctaccaagcctcttatgtttaatctgtgcagggaagacaagagtagaccatattctctgtgtgctgtgcatgtcctggtgtcactcattgcctcttatctgtcgccattctaatataagtcagcttaatagttgactctgaataatgcaaaacccagcttgcttccagaatggcctaggaccctcctcctcctgccagtttttttttttttttttggttcatgtggcataatcatctttcaaaattaaccaaatgccccagaaaatgatgttaccactaaaatattttctccaagaaggcatactgtaacagaaaagataggtaagatatttttttcccaagaagtaagaattgattgtgctgaatgttcaaactctggaaactgttcacagtatgttgttcttagctgttatttatataaagtgaattattttctctctcaatcatgccatagtggagacttttgtttgtgagtaagtgacagagtaatatgaaataatgtgatatgtcagagtgacatgcagcatcctgagcctgtttttatgttctgtgtacagtggcatttgattgagatcaaagcctgtcacagcctgctgctgggggtgtggggatatgccagagtcctgtgtttggttttagaagtttactgaatgtttcccacatggagaataatggatggcatgttagtttctttaagagtggtaaagttgtacatctgtcattgttgcatttcgaattgaacacatagatgcttgcctgtctgcttgggtgaatgcctcttgggagagcgaagattacgtgcatgatgtatgttaagaaacagtttccggtcaggcacagtggcttacacctgtaatcccagcactttgggaagccgaggcgggcggattatgaggtcaagagatagagaccatcctggccaacacggtgaaaccccgtctctactaaaaatacaaaaattagctgggcatggtggcacacacctgtagtcccagctactcgggaggctgaggcaggagaatcacttgaacccgggaggtggaggttgcagtgagccgagatcatgccactgcactccagcctggcaatagagcgagactccgtctcaaaaaaaaaaaaaaaaaaaaaaaaaaaattaaaacagtttccataaatggagcttaatttgctctgctgtccttaagccctcgtgggtttttttttaagagagtctcattctgtcacccaggctggagtgcagtggtgcgatcttggctcacttcaacctctgcctcccaagttcaaacaattctcctgcctcagcctcctgagtagctgggattacaggcgcctgccaccatgcctggttaatttttgtatttttagtagagatggggttttaccatgttggttggccaggctgatctcaaactcctgacctcaggtggtgatctgcccacctcggcctcccaaagtgctgggattacaggcgtgagccactatgtccggtcaagccctcgtgttctgaaccttgtcaaggctctgcctgaatgagttttcatctgattgtggggaccaagtccctgagtagagggccaagagctagggacagggggaagagactggcccaggtggtagggaggaaagaactcccagagtttcctttagccaggaaacctgctctactgaccccgtgacttggacagtcagacatcaccctgagagtgacaagtgtaaaatgactcccttcctcccccgccctccggaagtatatttagatacttgaaagcagtccttttctaaaatggccttacctatgtggcctgaacgattaaaagaaagaactcagagttacaagggaaaaagaaaaagagttacaagggaattgtagtctttttctgaatagaatattagtactgtggtattgcatttcatgggaatggaaatgtattggtaaagctacctgatggaagctttctcttggtaacaaaaatggagggtgtattatgtgcagttatttaaatatatgtattccattgttgcgtggtttttttcccccctcaagacagagatttgctcttgttgcccagggtggagtacaatggtgtgaccttggctcactgcaacctctgcctcctgggttcaggtgattctcctgcctcagccttccgagtagctgggattacaggtgtgcgccaccacacccggctaatttttgctttttttttttttgagacagaatctcgctctgttgctcaggctggagtggagtgcagtggcacaatctcagctcactgcagcctctgcctcccgggttcaagagattctcctgactcaacctcctgagtagctgggattacaggtgcctgccactatgcctagctaatttttgtatttttagtagagacggggttttgccatgttggccagggtggtctcgaactcctgacctcaagtgatccacccgcatcggccccccaaagtgctgggattataggcgtgaaccaccgcgcctgtcccattgttgtgtaattttaataattagttttttaagtacttgattttatgggcacatttttgtgggatgattggagttaatcaaataaagcttgtcatgtgtgtagtttggtaagataacttctttaaattcatgttttctctgccttgaggtagtgagggaaagatcttaatcagtattttggtaattaactgattgaattcaagcaaatgagacatcatgaacttcagtggttattgatatttcagggtatatacctgaaatgcctagaggatacagatttctcatttcattctttggtctttcatttctctatatacagaaatgaaatgacacttctgggaggcagtagaagcaggaagtcaatgaattgagtagagggtcccattccctcaggctgtcattgatcagtgacaatttataaaaacaaactgcaaagtctgtggcaagtggctgcctgcttcctagaaggagcccatgaaggttaaactctgtggtcggtatttgcaagcgccgggcgtggtggctcacgcctgtaatcctagcaccttgggaggccaaggcaggcggatcacccgaggtcaggagtttgaggatttgcaagcaaaaggtcctctcctgagtctttcccagatacccagcagtgcagaggctagctgtggaaggttgcagtgggacaggaatgtattgtatgccttgccttacttgtcaccattgagatttccagagaaatgggcataacgtctcttaacaacaacagcagaaagcaaaatacattaacttaaggttgacaacaaaagattatcaagtaccatgttttccaaccaaccagttattcgtggtaataataaaataaaggtgggaaaatgttataatttttaaggaaactgtgtactttaaaaatcttctttatgaatatccaatgttactgtaatcctgctccattaaatgcagcattgttgtcaggtgctgcctcttgcttgggaacagcattgggcttttaaatgtctgcagaatctctgcgttcgaagggaattgagaatgaacttcctggtactgtaatgaaaataaggtctgctcaacacagtaaacgtttcctctcttctttaaaaaaaaaaaaaaaaaaaaaaaaa

SEQ ID NO: 857 - DNA, 7555 bp, Homo sapiens
ggggaggggaggagcgggatttgcggagcgccgcgccgctgccgggagccggcaggcccgagagtgaccggagtcacggcgggcgccggcggagctgcggcgtcggacccgcctcctggaggagctcagccccgaccaggcccggccccattcccgccccgcgccgcctccccgccgccgccgccgccgccgccgcgggagcgctcccctgcccaccccgcccccgcggccgagcccgggagtcgagtgggagtcggccggccggcgcgggcagcgccgggaccccgcgggggacactgcagccggagcccgggaggggccgcgccgccaccgtctgaactaggatgtcccgacatgaaggtgtcagctgtgatgcatgtttaaaaggaaattttcgaggtcgcagatataagtgtttaatttgctacgattacgatctttgtgcatcttgttatgaaagtggtgcaacaacaacaaggcatacaactgaccacccaatgcagtgcatattaacaagggtagattttgatttatactatggtggggaagctttctctgtagagcagccacagtcttttacttgtccctattgtggaaaaatgggctatacggagacatctcttcaagaacatgttacttctgaacatgcagaaacatcaacagaagtgatttgtccaatatgtgcagcgttacctggaggcgatcctaatcatgtcacggatgactttgcagctcatcttacacttgaacacagagcccctagagatttagatgaatcgagtggtgttcgacatgtacgtagaatgtttcaccctggccggggattaggaggtcctcgtgctcgtagatcaaacatgcactttactagcagttctactggtggactttcttcttctcagagttcatattctccaagcaatagggaagccatggatcctatagctgagcttttatctcagttatcaggagtgagacgttctgcaggaggacagcttaattcctctggcccttccgcttctcagttacaacaactgcagatgcagctgcagctagaacggcagcatgcccaggcagcacggcaacaactggagaccgcacgcaacgcaacccggcgtactaacacaagcagtgtcaccactacaatcacacaatccacagcaacaaccaacatagctaatacagaaagcagtcagcagactctacagaattcccagtttcttttaacaaggttgaatgatcctaaaatgtctgaaacggagcgccagtccatggaaagcgagcgtgcagaccgcagcctgtttgtccaagagctccttctgtccactttagtgcgtgaagagagctcatcctcagatgaggatgatcggggggagatggcagattttggtgctatgggctgtgtagatattatgcctttagatgttgctttagaaaacctaaatttaaaagagagtaataaaggaaatgagcctccaccacctcctctttgatgacatcccaattcgcagacaatgtcctctgtgctgtatttgccaatgaaagtggacaacaactatcttgggtttgtttggtgattgtaatttcaggtctgtcactcttgttacattgtgtacattcaaaaggaagagagaaaatatatatgataatcatttccacttaactaatttttacttctagcaggtaaatgtaggtagcagtgcaggggtgatctctgcttcctgtaccttgacatgcaaaaggctctcctaatactccacattcaaactgaagaggaaaattgaaatctctaatgaagctgctgtgtgtatttatgaatattaatgaataaaaactgcttggatggtttaccttaactactgcatgaggttttttgcagcgtgcatgagttttagtgaccttgttatttaagaagttaaatacaaggagtaaaacttaaaaaaaaaatacaaagcccaaagctttcccaaacattattcaatggttacacgacgaagtagcttttgaataatgtctgcctgaatcacctttctttgtgtgcctcctacgcacaaagccagctctgcagtggaatctggggattatagccgggtgtggcactccgccctgtgtgactgtcctgtcgccctgttagtcatcttgcctgtgtggagctcagcctgtctctttaactcatctgtagaagacacaccagtaaagctactgttggaatctgctgcaggggcctttgtgtgccctaaaaacaaatcctgttcatgtttgtttaaagtttttactttttgtggttgtttaaaattttttcaattgttaaatatgttttattcaggtgtagatgaatttcatttattgactgttcaacagagttaacctgaattatgttgtctttgtttttaaaaatctcacattctcaatcatattttgcattatttatgtatttgctttgtagtttgctgagacagatcagtatcaggggagctttgaggatttgccttcccagatttgtcagtatattacaaccaaattcttaatgctaattttagcaccttttatttattgggttttttctggcataaaaagtaaagccttttaattgaatcatgccacctatatgcctatattattaatcctatgtgtaaaaaaaatgtacagctttttttgggtttgttttggggtttggaagggccgggttattttttatttcctgtttcagtttttgtgcatagactttcacaatagctccaaggcagggacagcgggtttgggggttgggagggcagtttttggaatgtaaatttaggacttttaaaaaggtgcgcacagcttctgataaatttataactagacttaacctaatcatgtctcgttccagttctcttttctctgagcccttttcaaagtctcctctctttctcctgtcatccttttcctttcctgtccgtgtatctccgtttcttcaacatgacaagcatacagacttgaacacccctccggtgttcttccgagaactgtgaagtccatgttcatccaaatgtaaccaaaaaagaagtcaccctacatgtctgaaaaactgttgcttctcctctgaaacttcaaactccaacgatttccaaatacaatagctttgttttctttagttctgtaatggataatgtttaaaggaaaactttacaccaggcttctggttacactagaagtcaagcccattagggattttcattttttttcatttggttgttgagaagtttcaaaaatcagttttcaagctgtggtctttcaaacacatctgcacataagtcacacatttcaataaagcattttcaagactgttgaccacttgaatttctttggtgttagtggattaacctaaccattactctgagattttatatctctaatccagtattttttttctttttatgctaaacatgggagatcctggttttgtgtgaatgcattattttggatgtgagaaataaatgccaattatatgtactttcccttttctgcacaaattctgggaaaatgtaaaagccttcattttttaacatggttttagggaacaactgtaagtccattcagagcagtttaatttagatgatcacttttaacactgcagaagacctaaggagtcataagattccatctcatgtagaatactgtatattaattattttttaccagatattttacaaatacctcacctcatcctgtatgtaatcaataatgtattattttagggtagaacgacacagaatatcaatataaaaatatattcaagcccttgaaattcttgtgtcctttttctttagtttctgaatgaaaatcttattactggatgtactattgaataaaaattaattgcaaagactttgatggagacaaaatcaaaatataccactgtttattttggcagcaccttcaaatttctaaggaccagatcctgaattttgagaattttttgtttcgttgagttttgagtgtctaggatataagtttataaatgttctacagtgcttgtctttacttcctgtttagaaatcatttaaatctttcccctcgaggtgctctggaagaagtttaatttcagctctgaacaagtagaaataactgtgcttccttgtatggctgcaatcataagacagaatttctgtggttggctaccgtgaaatctttgtatttatattgcattgttttgttaaaaaaaaaaaaatccacagaagtagaacctaggtttgctactaacaaagtagtggattcttataattaggctcaggtaaagtaagagaaaacttctctccctgtggcccccagagaaatgaagtaggatagcagattacactattagaaataatagacgtaacaaaaaaaatccagcccattatccccaccccccattttccctctcaatattagaaatttcaataatatgctgacagattttcaaaggtcaccaaggcttttgtgtttttttccggtctgtgggccacagttaaaagaacgggtaacaggttcagagttctcttgatacgtccaagccttagtttccaggaaaaaagctaggctcctcactgcaaatattaacgctttatatatttactccatggatgttggggtaagcacatatatcaatagttcatagctctagttaaggacaaagtgggttggggggtagaaggagaatactagagaggttacggtagcaggtggctgcagaaaagaatcttttgaatgggattcctgtaacagtgttcagtaccaatattaagtctactgtaagtggggtctgatatggcttactgatacaggcatgtgtaaaaaactaagtgtgatggaggaatgggtgctaaaagctcttaacagttttgtagagaagccctgcagccgtgtttactatatatgacatgcctgtttcttagtttgcatgcacagtttaaggggcacatgcaatattggtttcatgtgcagtaaaaattaaaacacggctgagcgtggtggctcacgcctgtaatcccagcactttgcgaggccgaggcgggtggatcacgaggtcgagtttgagaccattttggccagcatagtgaaaccccatctctactaaaaaatacaaaaagttagctgggcatggtggcaggcacctgtaatcccagctactcgggaggctgaggcaggagaatcgcttgaacctgggaggcagaggttgcagtgagctgagatcacgccgccattgcactccagcccgggcgacggtgcaagactctgtctcaaaaaaaaaaaaaattaaaacactaggtacgaaattatcccagaattatacgcgaaagttggtgttcatgctggaaaacagttacggttatctgtgctctttctaaagctcaactagacactaaaacagttctctccttgagaccggaagtgggatgggggtgggcaggtggaagggaagaggctggggaggagcctctcatctcatctcatttcagcctcaacagtaattgaaaccctatgcctggcctggagtgggtagaggttagggttagagtgcaggatggagcagcagtctgcagactttcaggttgtgacgatgtcatgaaattctgtgctattaaacatggctatgtctgagtcagtcattacggtattccaaagccaaattcaagtgactgtttttctgaatagtataaaaatctaattccctgtgcttatcggcttcaactgtgcttacacaacgtttgtttctaattcgtactcttgcctcttggtttctgtagtttttcaacccatttctgtcagtgttctataaatgcatacattcgttatttaaggaaccctgcagcagacctcgaataaaatgtgacttgatgtttgttgccacttcctcaacttggttagcaaattcaagttttgaaagacgattcgtctcagagaagttgatcctgaacctccacgtcacattttagtcggttgctattaggtgggtaatgcctaataacatgggttcctcaaatcacaaaggagaatgctctcaagtcctcatgttaactttagtaagtcagttaactttacagcaactaaagagatcaattaaaaagaacccttaagtctgactgtcccaggtaactttacttgctgtacagatagtgcacagatatggatgagggctgcacatggctgatttgaaaacccatgtggggccgggtgtggtggctcacgcctgtaatcccagcactttgggaggccaaggcgggtggatcacgaggttagttcaggaccagcctggccaagatggtgaaaccccatctctactaaaaatacgaaaattagctgggcttggtggcagatgcctgtaattcctgctactcgggaggctgaggcagagaattgcttgaacccgggaggcggaggttgcagtgagccgagattgcgccactgcactccagcctgggcgacacagtgagactctcctcaaaacaaaaaaaaaagaaagaaaacccatgtgggccgcatgtgcacagcctggggctgctttccacaggcctggataatgatgtttctcttcaaggaggcctttactaaccacagggaacctagcatctgactgtgtccttggcagacagtgcatgtagcctgtagaatgttggctcctctgtctatagaaaccatcagttcgctgctctctcattcatacatactttttgagttcccagtaggtacgaagctttgtctaaacattatttaccaactgcgatttttacagacttcccctgtaagaattttctaaaagagcctttctcccttacacaattgaaacgttttcaaaggtcatcaagccggttgcgtttggtcagtcacgtgaccaatcagagctggtgagtgagctgctcccttaaatctaccaaattagactgacagcatttggaatctgcctcacacataagagatccatattcatttaatagtgaagccagcccagaagcatcctcttctgtaagctggatggagtcccagctctctctccttgtatataaggagaccacaccctgtatataaggttttcttgaggtagatgcagcaatattcctggggtaagattctataatactcctgtattggcaagtggactggaccaacagacacaggcctcagccactgtcgctagggactgaaggagagttcatggattcttaccccctagtcatgaaagctattctggccagccttgaatccatttaattttgcccacgagaacctttcatgacaattaacaagacactagtttccccataaaagtccatttttaaatatatagtatgctaattagcagtgtctgttgaattgccctatcggatagcagccaccatgtgtgctgaccactcacgattcagacttaccttggaaaatatcacactgacgatacagtactttagaataaattgcatattgtatcaggctccgagactaatttgtactgaacccttgatatagattaccttttataacatcaccacctgtcatgaagcttatctgttttctgatttgaataaactttgtgttgtgcaaa

SEQ ID NO: 858 - DNA, 6244 bp, Homo sapiens
agcgggcgggagcgcgcgctgggcccgccttggccgccgccgctgtgctgccgctgccggggaataatctgggcggcagcgggcggcctcggctagcggccacgagccacttctgcggctgcccagagaagcaaaggtcaccagtcccaagtcgtccccctctccgccccccaggaggggcgagagggagccgcagctgatgtcagaaatacactttcgggaaatggcctctaaatcctggctgaattttttaaccttcctctgtggatcagcaataggatttcttttatgttctcagctatttagtattttgttgggagaaaaggttgacacccagcctaatgttcttcataatgatcctcatgcaaggcattcagatgataatggacagaatcatctagaaggacaaatgaacttcaatgcagattctagccaacataaagatgagaacacagacattgctgaaaacctctatcagaaagttagaattctttgctgggttatgaccggccctcaaaacctagagaaaaaggccaaacacgtcaaagctacttgggcccagcgttgtaacaaagtgttgtttatgagttcagaagaaaataaagacttccctgctgtgggactgaaaaccaaagaaggcagagatcaactatactggaaaacaattaaagcttttcagtatgttcatgaacattatttagaagatgctgattggtttttgaaagcagatgatgacacgtatgtcatactagacaatttgaggtggcttctttcaaaatacgaccctgaagaacccatttactttgggagaagatttaagccttatgtaaagcagggctacatgagtggaggagcaggatatgtactaagcaaagaagccttgaaaagatttgttgatgcatttaaaacagacaagtgtacacatagttcctccattgaagacttagcactggggagatgcatggaaattatgaatgtagaagcaggagattccagagataccattggaaaagaaacttttcatccctttgtgccagaacaccatttaattaaaggttatctacctagaacgttttggtactggaattacaactattatcctcctgtagagggtcctggttgctgctctgatcttgcagtttcttttcactatgttgattctacaaccatgtatgagttagaatacctcgtttatcatcttcgtccatatggttatttatacagatatcaacctaccttacctgaacgtatactaaaggaaattagtcaagcaaacaaaaatgaagatacaaaagtgaagttaggaaatccttgaaagaaaatcatgaatgaacaaaggtaatatgtctagcactgcactgaaaaaggacttctgcatttctgacatagaacactggaatcccagtgaggaattctaagtgaacattccttatagaaacctttcacatgaatgactataaactgaagctttaaatgagctgtgaagtgtgttaaaatgtgttttgatacagtaatatataaatatgtctatatatatgaggaacttgtgttttttaaatggtggccaggtagaggaactagaaaagagattttgttgcctgttttctgaccatctgtgttattgtcactgagaaactaaaatagtaaatttactaaaactacactgcaccatgttagtaataaacagatctgccttaaagaaaagaaaattttagaaagaaatattgttgctcagtgttgttaatatagctcaagaattgagtttatatttgcagtatgctataaatgatacccccctaccacacccacacacacagtttttgtctaatgaaaatgttgctgtgattatttataattggtagtatttcttccagaagaagctaaaataagactggcacttaccctgaagtgcattaataaaaccacactttaaaattatcatgggccttgactatattatatacttgattctaattagtcatcttttacgcaatctctgttgtctcttttctaaatgtgtttagccactcttgaataccattctccactattaacattaatttactcaaaccgttcatagcattctgtaaacatgtattttacatatttgttcccaaatttgcccattgttcattatgggtaactaataataaatttaatgctgtttcaggatgcttttcttataacagtgccactctcaggaattactaagtgacattttaaattgatattttaaactctttccaactacatagttatggtttatttcattctcatcctgttgggatgagaacttgtttgtgcctttcataacttgtttaaagcagagttttaaaattagtttataggatctgaggtggctattagttacagtggcaagattatttagaaagcaagattttgatgagaattaaaaacaatagaaaatgtagagtgcttaaacaaaaatgttatattttgaaagagtagatacttaatttataaataacagtctgaaggttggtgctattttgggataattgttttgctaatggataattctaacaatgcagaatacctagtcaagactgtcatcaaaaacattcacaaatgtttcattctatttttagtgactctgtttaaagagtttctgaaaggaaagaaattttttatttttattatctttagcagtactgagtgtcatagcagaatattttacagactttctatgagattatttttatggtacaaagtatttacatttccctcatgtttatcattatgccaattttacatggcagtcatgccactgactctgctatttagctaagtaatttcttttttcggagactgtctcactctgtctcccaggctggactgcagtggtgcgattctcctgcctcagcctcccgagtagcggggattacaggcacgcgctgccacgccccgccagttttcatatttttagtagagacagggttttgccgtgttggccaggctggtcttgaactcctgacctcaggtgatccacccaccttggcatcccaaagtgctgggattacgagcgtgagtcacagcacccggctaagtaatttctatttattgtgccaaaacatgtcaaaatcatgacctctttgaatggtatatttgagaggatgttcatttcattggttaaccatggactactctgtccacgtagtgaaaacatgcaccagtttttacctattatcatggtagtatcatctgccaaaatttcaaggcattcattttattctttgaacaactcttcaccatggtgtggacatgaattttcatatgtgttacttgactagaagtataaatggtttactatagatatccaaaaaccttgagatttgctcataggaaatgaatattgtgatgaatcctgggctctagagtcagacttgcttgggtttaaattcttgctctaacacttactgtttttgtaaccttgagcaattttaatctctctgtgtctcaatttcctcatcttttaattagggatgataatactacctacctcacaggatttttatgaggattaaataaatgtaaggtttttagaacattgatagggagcaataaatagaagattgtattattattctgttaccttggagtgtaagtactgcatttaagtgaatgaaaaatttgctttgaccagatactgaaggaaataagtaatagctagtatttatccaatgccaactgtatgctaggtactgtgcttagataatctgtgtataatagtgttaatcctcaaaatttgggtgttatacccctattatagataaggaaactgaggctcagagacaaagtaactttgtcactgtcacaaagctagtaagtaacagaggtaggatttatattcaaaaccctgtgtgttcattggaaccgtatcaggcttggggctattcatgtagcattatttccatttttatgtatatgatatatgacgtctgatgcattggccagtaatagtcaaattaacccagccaaattgtcacagtgattcttaaactgtggttctcacacttgcccaggatgttgttaaatgcagatctgaagaccccaatctcagaaattcaaatttaagcatggggcccaagagtatgcattcttaccagataccttgggcagtgactgtcaaaagtctggtcccaacaaacagcattaacgtcacctgggaacttgttggaaatgcagcctctctcggggcctcatctcagatcagatctactaaatcagatactctaggggcaggggcaggggcaggggctagcagttgtgtttaagcaaactctgcaggtgtctttcttatcctagtttgagaaccaatacccaacaacctacgtgattttggtgcaagtagtgtttgaaacacactgaagattactgcccaattactaagacatttttcaaaaagcatgttttaaatcagtgtagtccaggatcacactatattaaatataaagataacttaaaggatcattggatcattcattttggccaaatttttagcttctccaaagtgactaacatcagggcctacaataaaatctgtaattctccaagtttagtaattttatattgaggcaggaagggctcattaagtactaataagtacataatttattaaaaacatacataagtgtcatcaaaaaggtccacaattgttagtaaaaaaaattaaattgaagtagtaaatgctgttttataacatacatttttctgctaattcattctgttttgtgtgacctaataaagcaaaagaaaaataaaaaagcaattctccaagtacttcatagagcacataaaaccagatttcatgatgatgatgtattcactatcttttagattaagatctttgttatttggtaaatgatttcagtatggttttaaaacataaggcttttgatgtcttatgttctctaataatggtatgcttgtattttctagtgggaagttcatagataaagcagatttttgtcccagtttgctttcaaatataaatttcagagggctttttcttactgtaatgaggtatgaaaataaatcattgatcagctcttaatattttttgaatacagaattggatttgagcagtaaatttgctaactggttattttcacaattttcttgaatattaatttttcacttctttgagactgtcaaactatagttactaccaggttgatgcactgtacttgaaagaatcccttgattaaattacatctagcattttatttgccatttcaattttcagttcattagactataattctttgacagtttctgcctggtgtttattgcccttctttgtttgctttattactaacttccattttctagttactcttaaatgctgccttcacaaggttaatttggctgttaatagtgattagaatttttatcacttaattgataattttaagcctactaactagggttccctatgaaattgaaagtaaaagtctaagaataatgcctgctggctctcgagatacttgccctacttaaaaatctataatttaaaattaattctatgtctacaattattaaaggaagtaaagttatttgggttcttccactcacccttttctcaaaaacaacaacaaaaaacaaaactcattttatttttctactttatagtaggcctgacagaaacatagtgaagcaatctgggaggcaacctgtggtagattttatgctaaatgttaatgtaacctctgttgattttttaaaaatgtgtttatatataagatttgaaataaaaactttaatacaggctagaataaggaattttacaaattctctttagagcaaccaacattaaagttttagagttgaattttgctctatttcaactcccttacctctctagttttcagtttatattaagttttaataactttgcggggccctgcaaattaataatctacatgaagtatattattagagggaaactaatcttactgctaagcagtgtgttgtactacatagtgaatgttcgtgttttggaatttaaaaattatttaaggtaatggtgttacgaatggtttaaaaatgtctggtgacttgcttatttttaagtgatcaccattaagtcagaaaaatgtatttttaaatgtttcttgaagtgccttttgaacatttttaaacagcggatttaaataatgcataaaataaattgccatgttcaaagttgtttcatctgattatttttaaccaatataaaaaaaaa

SEQ ID NO: 859 - DNA, 3322 bp, Homo sapiens
aggctccaggcctggcatcccggtagccgcagctgtcttttccggcccccgtgcactctccgcccgaggcggagccccccggctcgcggggatcgcccccgagcgctgcgtcctgcgggtcacctaacccatttgtggcttcctctacctgtgctcagccatggccagcgagagctcacctctgctggcctaccggctcctgggggaggagggggttgccctccctgccaatggggccgggggtcctggaggggcgtctgcccggaagctgtccaccttcctgggtgtggtggtgcccactgtcctgtccatgttcagcatagttgtttttctgaggattgggttcgtggtgggtcatgctgggctactgcaggccctggccatgctgctggttgcctacttcatcctggcactcaccgtcctctctgtctgtgccatcgccaccaatggagccgtgcaggggggcggagcctacttcatgatcagccgcacactggggcccgaggtcgggggcagcattgggctcatgttctacctggctaacgtctgtggctgtgccgtctccctcctggggctggtggagtctgtgcttgatgtcttcggggccgatgccacagggcccagtgggctccgggtcctgccccagggctacggctggaacctgctgtatggctccctgctgctgggccttgtgggtggggtctgcaccctgggagccggcctctatgcccgggcctcattcctcacattcctgctggtctctggctccctggcctctgtgctcatcagttttgtggctgtggggccgagggacatccgcttgactcctaggcctggccccaatggctcctccctgccgccccggtttggccacttcaccggcttcaacagcagtaccctgaaggacaacttgggcgctggctatgctgaggactacaccacgggagccgtgatgaattttgccagcgtctttgctgtcctctttaacggctgtacaggcatcatggctggggccaacatgtcaggggagctgaaggaccccagccgggcgatccctctgggcacgatcgtcgccgtcgcctacaccttcttcgtctatgtcctgcttttctttctctccagcttcacttgtgacaggaccctgctgcaggaagactatgggttcttccgcgccatcagcctgtggcccccactggtgttgatcggaatctatgccacagcgctctcagcgtccatgagctcgctcattggtgcctcccgcatcctccatgccctggcccgggatgacctctttggcgtgatcttggcaccggccaaggttgtgtcccgagggggaaacccctgggcagctgtactttattcttggggcctggtgcagctggtgctcctggctgggaagctgaacacactggctgctgtggtcactgtcttctacctggtggcctatgctgccgtggacctgtcctgcctgagcctggagtgggcctcggcccccaacttccgccccaccttcagcctgttctcctggcacacctgcctgctgggggtggcctcctgcctgctcatgatgttcctcatcagtcctggcgcggctggtggctccctgctcctcatgggtctgctggctgccctgctcaccgcgcgaggaggccccagtagctggggctatgtcagccaggccttgcttttccaccaggtgcgtaagtatctgcttcggctggacgtccggaaggatcacgtgaagttctggcggccccagctgctgctcctggtggggaacccccggggcgccctgcctctgctgcggttggccaaccagcttaagaagggggggctgtatgtgctgggccacgtcaccctgggagacctcgactccctgccctcggaccctgtacagccgcagtatggggcatggctcagcctggtggaccgtgcccaggtgaaggcttttgtggatctaaccctctcaccctccgtgcgccagggggctcagcatctgctgcgaatctccggcctcggtggcatgaagcccaacacgttggtcctaggtttctacgatgacgctccaccgcaggaccatttcctgacggacccggctttctctgagcctgcagacagcaccagggagggcagttccccagctctgagcaccctgttccctcctccccgggctcctgggagcccccgggccctcaatccccaggactatgtggccacggtggccgacgccctcaagatgaacaagaatgtggtgctggcccgggccagcggggccttgccccctgagcggctgagccgggggtctgggggcacctctcagctgcaccatgtggacgtgtggcccctcaacctgctgcggccccggggtgggcccggctatgtggatgtctgcggcctcttcctgctgcagatggcaaccatcttgggcatggtgcccgcttggcatagcgcccggctccggatcttcctgtgcctggggcctcgggaggcgcctggggcggccgaggggcggctgcgggcactgctgagccaactgaggatccgggctgaggtgcaggaggtggtgtggggcgagggggccggggctggggaacccgaggcggaggaggaaggggactttgtgaacagtgggcggggagacgcagaggcagaggccctggcacgcagcgccaacgccctggttcgggcccagcaggggcgcggcacaggaggagggccgggtgggccggagggtggggatgctgagggccccatcacagccctcaccttcctgtacttgcctcggccgccagccgatcccgcccgatacccccgctacctggcgctactggagactctaacccgagacctgggccccacgctgctggttcatggggtcactccagtcacctgcactgatctgtgatgcccctgcctccagggctaggtagagagggcccaggcaggcggcctatcctgatccttggaggaggaggaagaggaggccactgtggcccgtggccctgcccttgggacgtggagcccaggggaggtttgaaggggatcctgggcttgggcatcacgcccacctcctttggcagagggaccccagcacactaactctgggtggctgtccccaccgtgcaggggagggagtccgcagcctcccttcactggtgccttgatgctaggggccaggcctcctctgtgactctgggctacctcagtttccccattttggccagactcaccggcccactggggtggtgatgttttcgttctgttttatttttctaactctgctgaccatgaataaaagaccaaaacactacaaaaaaaaaaa

SEQ ID NO: 860 - DNA, 4865 bp, Homo sapiens
gcagtgccgccttttttttttttttgcatcccatttttttaaatttgcaattttatattttgcaaatattttgagagacattgatttttctccccgtgctcccccgttcttccctgcggagtgcgctgcgccgcccagccctgtcgccccccggaggtgatccctccctcctgcctgcccgccagcctgacctgtgcccggctcgcgggccgcagcctcggccccggcgcgcccccggcagctctcggcgcgatgagcatagagacgctactggaggcggcccgcttcctggaatggcaagcgcagcaacaacagagagcacgtgaggagcaggagcggcttcgcttggagcaggagcgagagcaggaacagaagaaggccaatagcctggccaggctggcacatacccttcctgtggaggaaccccgcatggaggcgccacccctgcctctgtctccaccggctcccccgccggcacccccaccaccacttgccacccctgccccactgactgtcatccctatccctgtggtgaccaactcccctcagcctctacccccacccccacccttgcccgcggcagcccagcctctgcccctggcgcctcgtcagccggccctggttggcgcccccggactcagcattaaggagcctgcccccctgcccagcaggccgcaggtgcccacccctgctcccctactgccggactcgaaggccaccattccacccaatggcagccccaagcctttgcagcccctccccacgcctgtcctgaccatagcgccacaccctggagtccagcctcagctggccccccagcagccgcccccacccacgctggggaccctgaagttggcaccagctgaagaagtcaaatccagtgaacagaagaagaggcccggggggatcggaaccagagaagtccacaacaaattggagaagaacaggagggcccatctgaaagagtgctttgagaccctgaagcggaacatccccaacgtggatgacaagaagacgtccaatctgagcgtgctgcggacggcgctgcggtacatccagtccctgaagaggaaggagaaggaatatgagcatgaaatggagcggctggcacgtgagaagattgccacgcagcagcggctggcagagctcaagcacgagctgagccagtggatggacgtactggagattgaccgcgtgctgcggcagacgggccagcccgaggatgaccaggcctccacctccaccgcctctgagggtgaggacaacatagacgaggatatggaggaggaccgggcgggcctgggcccacctaagctgagccatcgtccccagccggagctgctgaagtccaccctgccaccccccagcaccacccctgcgcctctgcctccacacccacaccctcacccccactccgtggccctacctcctgcccacctccccgtgcagcagcagcagccacagcagaagacccctctgccagcccctcctcccccaccggctgcccctgcccagacactggtgccagctccagcccatctggtggcgacggctgggggtggctccacggtcatcgcccacacagccaccactcacgcttcagtcatccagactgtgaaccacgttctgcaggggccaggcggcaagcacatcgcccacatcgccccctcggcccccagccctgcggtgcaactggcgcctgccacaccccccattgggcacatcactgtgcaccctgccaccctcaaccatgtggcccacctgggctcccagctgcccttgtacccgcagcccgtggcagtgagccacatcgcccacaccctctcgcaccagcaagtcaacggcacggccggcctggggcccccggctactgtcatggcaaagccggccgtgggggctcaggtggtgcaccacccccagctggtgggccagaccgtgctcaaccctgtgaccatggtcaccatgccctccttcccagtcagcacactcaagctggcttgaggacgaggccactcagaggcccccagtggggacagggagggggacctgtcccccactctctcacccaccagctccacacattccagccaggcccaggccagcccccccacccacccccaggcctcctaggggaagggggtgcaaagactctgagccaagggagggaagggccaccctgctgcactaggacttggtaagatgactctgagaaaatgcgagactctgatggaatgtgccacctgtccggcccagtgccagctccagtgccgctcctgcttcccctccctaccctcggaaatcagtgcgatgtggacgtcacgctccctgacttctcccccgccctgccccgccttcgtgtgctgctgctgctattgctgtctggtgaggtggcccaggcccccggctttcctccggagcctcatgttctcttcccaggcctttggaggggaaatggggaaagcagaactgaagccacttggcccagaaagctgcggattggggtgataaggggccttgctctgagcacaggtgacagatcataggaagtggctggtctggagtcccacccggacaggtggggcctcagcctggggctctctgacccggttgcagtcactgtgattcgttaccgtagatactacttaaaatgattctctaccaacaataaaccaaacccagccactgccaagcttcctgtgccctcaccccaatccctgccactgggctctggacctcaggagggcaggctgaggtggggaaggagggacttggctgtccttccccttccccgtcccctgcagcctgggtctggatgggaggagagccactgggcccctgtccccagtccccagtccccagccctgggcttggctcttggcttccagaaggcagcaaagaggggcgctgtcctgcgttcagcccctgatctctgacctctgctgagtgctgggcactgctccaagggacaggtgggcctggcggcctgtgggtttgggtgcctcctgcagtttgggagacatggaccagcatctggtcttgtttccaggagcatagaagccacatcgttgagacatcaggaaggtaaaaacccagcggcttagccaagccctaagcctgtccccagaccaaccctgggacctatacagaacagagggccagagctagggctgctgcttctgctccagcccctttgcctctgtcctcccatcccctcaacaccctgcttctcccggggacgcttttgagtgggccctgcccggggagctgcagagcagcagcacctttctctgagaagaggtccttggttgggtcaaggacagggctgagcgtggaagggggaggagtcaggggctctgtgttaggatgcggctttctctgcctctgggcagcctgctttggcctttccttgtatgtgggtgtttattacaagtggctttgtgtcagacacgctcggctccccacctggacacacactcaccagtggcctttcagtgtagcgggaggaagccggtgtccctggatgtgaagctcacactgatgggctggggcaggggcctgggccggcgagggggccggggggaggggacagagctgaggatttcctggagtgccctgcaggcacagaggaggtcagcaaaggtcttgaatagattttctctggaaataaagaatccttagatgcctaaaaattcccttcctgttccctcctggtcctggacacctcccaggggactgttccttatttctctctcctggtgtgggtaaagggacagttacaaaccaggtcaccatcctcagaggctgagccctgtacccaccccagcacagccacctccgccagaccccgtggctctgggagagccagctttgctattcccattgtgacagcgatggcaggcctgacccacggggcagttagagcagcctcgtggagctcgcccctcccctcagcctgcccacctctccctgcatcctgaggccagtggcccccgggcctgcacagatacctcatcatccacccgctgcccctccccgtccctgtcccccagcatcgggggcctgcaaatctagtgccgaatgactatgtccagattggtgacgatgggtgttgctgtttttcttgtcgtttgtgaacgctgtgatgctgtgtgcccaagtgggcagtcaccacccagcccttccttgggcgtctcccccagagtgctgtcgggaccacatctgtcctcaccctgtgggaccgcctggccctccctccctagcccttccagcctgggacacacacacacacacacacacacacacacgcacgcacacgcacacatcttacctctcatgcgtgttttaccttttgatgttcagagtggctcactggctgggagtccttacctcggggagagggggaggttggttccttggggggccaaagaaggcagggaatgcctggagggtaactggggggccaccatgaccccttctctctccagaaacagctgcttctccccccatcccagggtcccacccccaacccccagaggtggcccttgtttacagtgaggactcggccactgtgtctctgtttcctgaaatataaactgtagcgaccccagactgtagagatttttatgtgtttggatacatctgctgtgtggaaaaaaaaaaaaactacaaaaaccctaattttgtacatactgtatttttactattgaactgtattctagtggctgttcatgctccaagactttagttaccgagacatgaatactatccatgtaataagcacttgcctggaataaaatataaaactgaaataaacctgcactgaaacctgagatggagctgccaaaaaaaaaaaaaaaaaaaaaaaa

SEQ ID NO: 861 - DNA, 5355 bp, Homo sapiens
ggctcccgatctgattcctgatccttgattccttgatccttggtcccgccatgggagcctgagcgccccctattcccccctggcccccagcccccggggccttgagggggaagaggcagcggtctgggacggagcagggggtgaccagactcaagaacccccccctcaacatcccccatcgcgcgcgctgcctgtccaggagcgccgagttcggagcgacccggagcgctgcggatacaaaggcgacgggccgagcggggcgcccgcggagcccacccggcagttcgcagcggcgggagcgtcgctggattttctctgagacaagcccacccgtccagcaaaatagagtccctcagggtgacagttgacttcctgaaggtgcctcttggcctaaagaagccggtgctgaaggaggtggctgtggggccccccaagaggccccagcctgcggccctggagcgctacaaggcgcggcgttcagacgccatggacaccgagtcccagtactcgggctattcctacaagtcgggccactcccgcagctcccgcaagcacagggaccgccgggaccgacaccgctctaagagtcgagatgggggccgaggggacaagtcggtgacaatccaggctcccggggagcccctgctggacaatgagtccacacgaggggatgagcgggatgacaactggggggaaacgacgacagtagtaacgggcacctcagagcacagcatctcccatgatgacctcacacgcatcgccaaggacatggaggacagtgtccctctggactgctcccgtcacctgggtgtggcagcgggggccaccctggcactgctgtctttcctcacgcctctggccttcctgctgctgcccccactgctgtggcgggaggagctggagccttgcgggacggcctgcgagggcctcttcatctctgtcgccttcaagctgctcatcctgctactgggcagctgggctctgttcttccgccggcccaaggcctcgctgccccgcgtctttgtgctgcgtgccctgcttatggtgctggttttcctgctcgtggtctcctactggctcttctatggtgtgcgcatcctggatgctcgggagcgcagctaccagggcgtggtgcagttcgccgtgtcgctggtggacgcccttcttttcgtgcactacctggccgtggtcctgctggagctgcgccagctccagcctcagttcacgctcaaggtcgtgcgctccaccgacggcgccagccgcttctacaacgttggccatctcagcatccagcgcgtggcagtgtggatcctggagaagtattaccatgacttccctgtctacaaccctgccctcctcaacctgcccaagtccgtcctggccaagaaagtgtctggcttcaaggtgtattccctcggagaggaaaacagcaccaacaactccactggccagtctcgggctgtgattgcagcggcagctcggaggcgggacaacagtcacaatgagtactactatgaggaggctgagcatgagcgaagggtgcgcaagaggagggccaggcttgtagtggcggtggaggaggccttcactcacattaagcggctgcaggaagaggagcagaaaaaccccagggaggtgatggacccccgggaggcagcccaagccatctttgcatccatggcccgtgccatgcagaagtaccttcggaccaccaagcagcagccctaccacaccatggagagcatcctgcagcaccttgaattctgcatcacgcatgacatgacgcccaaggccttcttggagcgatacttggcggctggacctaccatccagtaccacaaggaacgctggctggccaaacagtggacattggtgagcgaggagccggtgaccaacggcctcaaggatggcatcgttttcctcttaaaacgccaggacttcagcctggtggtcagcaccaagaaggtcccattcttcaaactctccgaggaatttgtggatcccaagtcacacaagtttgtcatgaggctgcagtctgagacctcagtgtgactgtgcaacagcagggggagtgggaaactctggggggtcctgagggggtgggagggggcttggttctcaggcccagccacattcctgccacccttcttcttcttgctcttttttttttacttgaattaacgcacccccaccttctctcctcgcttcttccttattttaccccatgtgaacctggagagaccatcctgctgtcaacagtacctgggaaggactcccacctcaccaacaacttttgtattactctaggccctgcaggaatcagtgcctctctccctcttctttccctagtcttttcccagattacagtctctcctgaaagggcacagggccctgctgattgtactttcccctcctgagccccgactcacaaatccaagttcttaaaacatttctcttcagtggcccaacagggtttctctggggcacatggacatgactccagagagccacagtgccaaactcctccagggcagcaactggccctcctgtccctcaccccagccacaacaaaccctgggttctagggcagggatactcctgccacacagcccgagttagaaatctccttgctaggagcatttgcttccacatatatttagagcaaagaaggatcccatccttttcccagaaatctccacctaatgtttttggtttgtatggtcacgtgaccataggcaaccacgtggaaaccctctgtgaccacttttccagggacttaggggaaggtacctttcttccaatgtgtcttcctaggcagcccctgaggaggagggctgaatagatccctgaggttttggagagacccccatcactgactcctgctccctaaccctaccctcactttcgtccccgctcttcccagtgaaggatggtatgtagactcctgtacagacatagtggcttgcagaccctgacccagcccctgtggtcttagacaaatgtttttatttttgtcaccagccacccctgtcctgccgccttctctcgactccagagacctgttgcctcatctcttttggggaagagccggcagctcctcctcatcccctgccttaagtccagttctttgcctcaggggtctcgtttccttggccttccagggtccccaccccttttctccctgcctgattctctgagctctgggctccgtctgtattgggttgaggggcaaggattactgccttttgtaggtacttcacccctcaccccattttagcttccatagtctttgcaccaaatccaaattcttgataatttagatctcattttgagcaaaatttgctggccctctaataaatattttcaatataaatctgagcctttgactcagacatttttgccaaggagagtagaattaggaagtacccatatacatccagccaggatccacatggaggacctttctgatggctgcaatgactaggccattcctctgagtaactcacagtgtccttttgtaggcccttcttttccctgaaagactggttggtacttaccttgcagagcacatcctgggataagatccccagtgtctcccctgggaggctccccctctgtgtagcaccagccctgggaatgatggagcctagtgatcggggtttctcctgctgtcctttctgcaaaagttcacttgtttacccaccgcatgctagagaggagctcattggccaatgcttaccttgtccccaaaggggtgggttgtggagctcacttaggcagggcctctggctggggccagggttatgagataggcctgtatgaaatatgtcctgttctgggggtctgtctcttttcttctcttcaaaaactttgtgtcagagagtcccttctgagtcacataaatacctcactatcctggaaaacagggcctggatggtgactggggtcattgcctttgtggacaggatggagtgtggtgtggtctgaggagcaggttggggtgggggagagggaaaggatttgggatcttagttgctgccctaggttaggggctggggagtgtttattttaagatcctgccatgtttttaatcactgtgatttttttttcattcccctttcctaaaaaaaattttttgcctccaactctctaagcactaagggctgtgcctgagaatggtagcattttggtcttttgcttcagaactgtggtatctttgtcttttttcattattattattattattattattattattactattgttttttaaaatgtcaggatgaattgtcagacatatggccatgtgtttgtcctctgcttctcccctgtgggaagttgtctccatgctgtgaactgctgtggggtgtgcagctgactcagtccctctgagcagtttccccactgtgtctgtcccatcatgcgctggatctgctcattctcctgctgtgggggtatgcccacctcttacccccttgacaccatagggctgctgtggctgggcctcaccagcactgtcttttgtgtgactcatggcatcctcgttcatccccaccgtgcctagcaggccttccttttcaccacctcggaacgcttgcctttcctccctccacaacaggacgctgtgcctcagtccttcacctacctcgccactctgccactgtccccattggtcctttctcctaaactggtctttgtgctctctttgttttttcttatttccctcttgtctctcattttttcttcccattcccctcccatttcagcccttaacttttctctttcccatctccactcagtattccaatggcaaaccctgatgatgtaacacctgcgatgagacatcggactctccggaactttctcatctgacacgtctttttcccagggttcgtacttctcctccattggtcccaggctaactcccctgttcctctgtggtgtctgtcagtccgtctgtcttctctttcctctgcccttcccacagggcagtatctgctgatggattcagtcctggtgtgtgattgttgtgatttgttcttccgtgcgcaaaaggaagagggctttttgagtcccttccaagtgagattgtaaatgtagaattttccactgttggatctagattttttttccttttttttgggggggtggggttacagagctgagaccttgtgcatgcatgtagaaaattgtaaaatgtaaattttttttaatatataaaaagcttgtttctacagtttgcagtggatctaaacattacggcaattttaggatttttttcttaaacataggaactaaaactgtacaaattttttttatataaaataaagacatttgacttttgtgggggcaaaa

SEQ ID NO: 862 - DNA, 14895 bp, Homo sapiens
gtggcccgcggcatggagcgggcgtgattcatcagcatccgcgccggggcggcatgggggcgcgcgcggcggccgcctaggcgcccagggccaggcagcggcggcttccccggcccggctcgcccgcgcttctctccctgtgggcggcggcccggcgcctggaaggtcaagatggaagaaatcctgaggaagctgcagaaggaggcgtccgggagcaagtacaaagccatcaaggagagctgcacctgggccctggaaactctaggtggtctggataccattgtcaagatccctccacatgtactgagggagaaatgcctgctgcctctccagttggctttggaatccaagaatgtgaagctggcccaacatgctttggcagggatgcagaagcttctgtcggaagagaggtttgtatccatggaaacagattctgatgagaagcagctgctcaatcagatactgaatgccgtgaaagtgacgccttcgctcaacgaggacctgcaggtggaagtgatgaaggttttactatgcatcacctacacgccaacatttgatctgaatgggagtgccgtgctgaagatcgcggaggtgtgcattgagacgtacataagcagctgtcaccagcgtagcataaacactgctgtgcgggcaactctcagtcaaatgctgagtgacttgactttacagttacgacagaggcaggagaatacgataattgaaaacccagatgtcccacaggatttcgggaatcaagggtcaacagtagagtccctctgtgatgatgttgtctctgtactcaccgtcctgtgtgagaagctgcaagccgccataaatgacagccagcagctgcagcttctctacctggagtgcatcctgtctgtgctcagcagctcctcctcctccatgcacctgcacaggcgcttcacggacctgatctggaaaaacctctgccctgctctcatcgtgatcttggggaatccaattcatgacaaaaccatcacctctgctcacaccagcagcaccagtaccagcctggagtcggactctgcgtctccgggagtgtctgaccacggccgaggatcaggctgctcctgcactgcgccggccctgagcggacctgtggctcggactatctattacatcgcagccgagctggtccggctggtggggtctgtggactccatgaagcccgtgctccagtccctctaccaccgagtgctgctctaccccccaccccagcaccgggtggaagccatcaaaataatgaaagagatacttgggagcccacagcgtctctgtgacttggcaggacccagctccactgaatcagagtccagaaaaagatcaatttcaaaaagaaagtctcatctggatctcctcaaactcatcatggatggcatgaccgaagcatgcatcaagggtggcatcgaagcttgctatgcagccgtgtcctgtgtctgcaccttgctgggtgccctggatgagctcagccaggggaagggcttgagcgaaggtcaggtgcaactgctgcttctgcgccttgaggagctgaaggatggggctgagtggagccgagattccatggagatcaatgaggctgacttccgctggcagcggcgagtgctgtcctcagaacacacgccgtgggagtcagggaacgagaggagccttgacatcagcatcagtgtcaccacagacacaggccagaccactctcgagggagagttgggtcagactacacccgaggaccattcgggaaaccacaagaacagtctcaagtcgccagccatcccagagggtaaggagacgctgagcaaagtattggaaacagaggcggtagaccagccagatgtcgtgcagagaagccacacggtcccttaccctgacataactaacttcctgtcagtagactgcaggacaaggtcctatggatctaggtatagtgagagcaattttagcgttgatgaccaagacctttctaggacagagtttgattcctgtgatcagtactctatggcagcagaaaaggactcgggcaggtccgacgtgtcagacattgggtcggacaactgttcactagccgatgaagagcagacaccccgggactgcctaggccaccggtccctgcgaactgccgccctgtctctaaaactgctgaagaaccaggaggcggatcagcacagcgccaggctgttcatacagtccctggaaggcctcctccctcggctcctgtctctctccaatgtagaggaggtggacaccgctctgcagaactttgcctctactttctgctcaggcatgatgcactctcctggctttgacgggaatagcagcctcagcttccagatgctgatgaacgcagacagcctctacacagctgcacactgcgccctgctcctcaacctgaagctctcccacggtgactactacaggaagcggccgaccctggcgccaggcgtgatgaaggacttcatgaagcaggtgcagaccagcggcgtgctgatggtcttctctcaggcctggattgaggagctctaccatcaggtgctcgacaggaacatgcttggagaggctggctattggggcagcccagaagataacagccttcccctcatcacaatgctgaccgatattgacggcttagagagcagtgccattggtggccagctgatggcctcggctgctacagagtctcctttcgcccagagcaggagaattgatgactccacagtggcaggcgtggcatttgctcgctatattctggtgggctgctggaagaacttgatcgatactttatcaaccccactgactggtcgaatggcggggagctccaaagggctggccttcattctgggagctgaaggcatcaaagagcagaaccagaaggagcgggacgccatctgcatgagcctcgacgggctgcggaaagccgcacggctgagctgcgctctaggcgttgctgctaactgcgcctcagcccttgcccagatggcagctgcctcctgtgtccaagaagaaaaagaagagagggaggcccaagaacccagtgatgccatcacacaagtgaaactaaaagtggagcagaaactggagcagattgggaaggtgcagggggtgtggctgcacactgcccacgtcttgtgcatggaggccatcctcagcgtaggcctggagatgggaagccacaacccggactgctggccacacgtgttcagggtgtgtgaatacgtgggcaccctggagcacaaccacttcagcgatggtgcctcgcagccccctctgaccatcagccagccccagaaggccactggaagcgctggcctccttggggaccccgagtgtgagggctcgccccccgagcacagcccggagcaggggcgctccctgagcacggcccctgtcgtccagcccctgtccatccaggacctcgtccgggaaggcagccggggtcgggcctccgacttccgcggcgggagcctcatgagcgggagcagcgcggccaaggtggtgctcaccctctccacgcaagccgacaggctctttgaagatgctacggataagttgaacctcatggccttgggaggttttctttaccagctgaagaaagcatcgcagtctcagcttttccattctgttacagatacagttgattactctctggcaatgccaggagaagttaaatccactcaagaccgaaaaagcgccctccacctgttccgcctggggaatgccatgctgaggattgtgcggagcaaagcacggcccctgctccacgtgatgcgctgctggagccttgtggccccacacctggtggaggctgcttgccataaggaaagacatgtgtctcagaaggctgtttccttcatccatgacatactgacagaagtcctcactgactggaatgagccacctcattttcacttcaatgaagcactcttccgacctttcgagcgcattatgcagctggaattgtgtgatgaggacgtccaagaccaggttgtcacatccattggtgagctggttgaagtgtgttccacgcagatccagtcgggatggagacccttgttcagtgccctggaaacagtgcatggcgggaacaagtcagagatgaaggagtacctggttggtgactactccatgggaaaaggccaagctccagtgtttgatgtatttgaagcttttctcaatactgacaacatccaggtctttgctaatgcagccactagctacatcatgtgccttatgaagtttgtcaaaggactgggggaggtggactgtaaagagattggagactgtgccccagcacccggagccccgtccacagacctgtgcctcccggccctggattacctcaggcgctgctctcagttattggccaaaatctacaaaatgcccttgaagccaatattccttagtgggagacttgccggcttgcctcgaagacttcaggaacagtcagccagcagtgaggatggaattgaatcagtcctgtctgattttgatgatgacaccggtctgatagaagtctggataatcctgctggagcagctgacagcggctgtgtccaattgtccacggcagcaccaaccaccaactctggatttactctttgagctgttgagagatgtgacgaaaacaccaggaccagggtttggtatctatgcagtggttcacctcctccttcctgtgatgtccgtttggctccgccggagccataaagaccattcctactgggatatggcctctgccaatttcaagcacgctattggtctgtcctgtgagctggtggtggagcacattcaaagctttctacattcagatatcaggtacgagagcatgatcaataccatgctgaaggacctctttgagttgctggtcgcctgtgtggccaagcccactgaaaccatctccagagtgggctgctcctgtattagatacgtccttgtgacagcgggccctgtgttcactgaggagatgtggaggcttgcctgctgtgccctgcaagatgcgttctctgccacactcaagccagtgaaggacctgctgggctgcttccacagcggcacggagagcttcagcggggaaggctgccaggtgcgagtggcggccccgtcctcctccccaagtgccgaggccgagtactggcgcatccgagccatggcccagcaggtgtttatgctggacacccagtgctcaccaaagacaccaaacaactttgaccacgctcagtcctgccagctcattattgagctgcctcctgatgaaaaaccaaatggacacaccaagaaaagcgtgtctttcagggaaattgtggtgagcctgctgtctcatcaggtgttactccagaacttatatgacatcttgttagaagagtttgtcaaaggcccctctcctggagaggaaaagacgatacaagtgccagaagccaagctggctggcttcctcagatacatctctatgcagaacttggcagtcatattcgacctgctgctggactcttataggactgccagggagtttgacaccagccccgggctgaagtgcctgctgaagaaagtgtctggcatcgggggcgccgccaacctctaccgccagtctgcgatgagctttaacatttatttccacgccctggtgtgtgctgttctcaccaatcaagaaaccatcacggccgagcaagtgaagaaggtcctttttgaggacgacgagagaagcacggattcttcccagcagtgttcatctgaggatgaagacatctttgaggaaaccgcccaggtcagccccccgagaggcaaggagaagagacagtggcgggcacggatgcccttgctcagcgtccagcctgtcagcaacgcagattgggtgtggctggtcaagaggctgcacaagctgtgcatggaactgtgcaacaactacatccagatgcacttggacctggagaactgtatggaggagcctcccatcttcaagggcgacccgttcttcatcctgccctccttccagtccgagtcatccaccccatccaccgggggcttctctgggaaagaaaccccttccgaggatgacagaagccagtcccgggagcacatgggcgagtccctgagcctgaaggccggtggtggggacctgctgctgccccccagccccaaagtggagaagaaggatcccagccggaagaaggagtggtgggagaatgcggggaacaaaatctacaccatggcagccgacaagaccatttcaaagttgatgaccgaatacaaaaagaggaaacagcagcacaacctgtccgcgttccccaaagaggtcaaagtggagaagaaaggagagccactgggtcccaggggccaggactccccgctgcttcagcgtccccagcacttgatggaccaagggcaaatgcggcattccttcagcgcaggccccgagctgctgcgacaggacaagaggccccgctcaggctccaccgggagctccctcagtgtctcggtgagagacgcagaagcacagatccaggcatggaccaacatggtgctaacagttctcaatcagattcagattctcccagaccagaccttcacggccctccagcccgcagtgttcccgtgcatcagtcagctgacctgtcacgtgaccgacatcagagttcgccaggctgtgagggagtggctgggcagggtgggccgtgtctatgacatcattgtgtagccgactcctgttctactctcccaccaaataacagtagtgagggttagagtcctgccaatacagctgttgcattttccccaccactagccccacttaaactactactactgtctcagagaacagtgtttcctaatgtaaaaagcctttccaaccactgatcagcattggggccatactaaggtttgtatctagatgacacaaacgatattctgattttgcacattattatagaagaatctataatccttgatatgtttctaactcttgaagtatatttcccagtgcttttgcttacagtgttgtccccaaatgggtcattttcaaggattactcatttgaaaacactatattgatccatttgatccatcatttaaaaaataaatacaattcctaaggcaatatctgctggtaagtcaagctgataaacactcagacatctagtaccagggattattaattggaggaagatttatggttatgggtctggctgggaagaagacaactataaatacatattcttgggtgtcataatcaagaaagaggtgacttctgttgtaaaataatccagaacacttcaaaattattcctaaatcattaagattttcaggtattcaccaatttccccatgtaaggtactgtgttgtacctttatttctgtatttctaaaagaagaaagttctttcctagcagggtttgaagtctgtggcttatcagcctgtgacacagagtacccagtgaaagtggctggtacgtagattgtcaagagacataagaccgaccagccaccctggctgttcttgtggtgtttgtttccatccccaaggcaaacaaggaaaggaaaggaaagaagaaaaggtgccttagtcctttgttgcacttccatttccatgccccacaattgtctgaacataaggtatagcatttggtttttaagaaaacaaaacattaagacgcaactcattttatatcaacacgcttggaggaaagggactcagggaagggagcagggagtgtggggtggggatggattatgatgaaatcattttcaatcttaaaatataatacaacaatcttgcaaaattatggtgtcagttacacaagctctagtctcaaaatgaaagtaatggagaaagacactgaaatttagaaaattttgtcgatttaaaatatttctcctatctaccaagtaaagttaccctatgtttgatgtctttgcattcagaccaatatttcaggtggatatttctaagtattactagaaaatacgtttgaaagctttatcttattatttacagtatttttatatttcttacattatcctaatgattgaaaactcctcaatcaagcttacttacacacattctacagagttatttaaggcatacattataatctcccagccccattcataatgaataagtcaccctttaaatataagacacaaattctacagtattgaaataaggatttaaaggggtatttgtaaactttgccctccttgagaaatatggaactaccttagaggttaagaggaaggcagtgttctgacttctttaggtgatctgaaaaaaacacccttatcatccagtgtaccatctagagatcaccacagaatccatttttttcccagttccacaaaacactctgtttgccttcagtttttactcactagacaataattcaagtttagaaacaggtaatcagctatttgatcttaaaaggcaatgaattgttgggatatcagtgaactatgttgtatacttttgaatttttacattttataaatggaattgaaagttggataactgctttttttaaattttccaacagaagtaacaccacagttgctttgtttctttttatagcttacctgaggttcagttcttctttgtgaacctgtgagtactccacagtttactgggggaaaaggcttcagtaaagcagaggctagaattacagtatttatacatagcaacttttcataaagtagaaaaattcaaaggaagctgtctcaatttgagaataccagctgggcacggtggctcacgcctgtaatcccagcacttactttgggaggccaaggtgggcagataacctgcggtcaggagtttgagaccaggctggacaacatggtgaaacctcgtctctactaaaaatacaaaaattagccaggtgtggtaggatgcacctgtaatcccagctacttaggaggccgagacaggagaatcgctcgaacccaggaggcggacgttgcagtgagccaagattgcaccattgcactccagactgggtgacaagagtgaaactccatctaaaaaaaaaaaaaaaaaaaagtgaatactgtatcccaaagtatgttagttgtttgtttggaaatcagcattctccccgatgctctattatgggatccaaaattcttgaacataagtttaccctgtactgtgtccaaacactgttctagttctagcctgattatgggtcccaagaataaaaggatgagtaggtgtacagagctcttgacctacaattttttaagagtgttttggtaccttcccattgtcttctctataactcagtcctaacatactctgcactcgagttaccagccatccacactgacatcagatttcaaccagaaccatcactgagtgacagcagtacttctcagaggtatttgcagcttgatgcaaagtagtctctaatgagtaggcattcaggtggttcttcccagcaggtggagaagaaagggaggagatgaagaacactgagaggggagtggcaccttcccaggctgcccagctcagtctcttgccctgttcctgtgactcagctgcccactcccccaactttgtttccctccctcccagtctctgaaagtgtcaggtgtttctctcctcacagtctcttttgcagcaacagtaagacaaaattcaaggcagccttttaaagttacgaacagttattagcatgtatttacagacctaagcagaatgagagtttatacattgtttttagttgcctgtatttatagccaaaagtatattaccttaaagttgagatctttctcttcttttcctaaattttggtaaagtgtgcttcatgaaacaaacatctggaaaactccaagtataagagaccctggactgatgatggcccagccaagtatatggagggacagagttctctctgtcattaatgaggacatcggttttcacaattgaacctcatgcactgtccacagcatctcacctagctcctgtatctcctgatctgcttttaaaaatagttagttaggctgcctttttacaccaccttctctctctccccttgtggtaattttccagccttccccatagatataaaactagaacacctttatgatttggggtctatgtaatgactgaccgataagaacccaggcagatgctaacatacttaacagctcgcattaaaatactttaaatcaggcgtgatggctcattcctgtaatctcaagcactttgggaggctaaggtgggtggatctcttgaggtcaggagttcgagaccaacctggccaacgtggtgaaaccccgtctctactaaaaatacaaaattagccgggcatggtggcagctgcctgtaatcccagctactcgggaagctgaggcaggagaattgcttgaacctgggaggtggggattgcagtcagccaagattgttctgcagcatgggtgacaaagtgagacttcgtctcaagtaaataaaactaaaatttttaaatcaaacatgacaaaaatgttaatataattcagaagtaccttgaaattgaaacatatttgtgcaatgatcattaggctttttgtccttgttgttttaaaatgaggcttatacagagtgagttgagagtcaagtagccttcgctgtgagacggtaatgcagttatataatagatacccttgactttgccagattcatcacaatactgcttatacaggaaagttttctcagaaaggaaaatccattagtatcagtcccatcaagccaaacagaatgaagacctttgatagtaatagcaagaggttacaaatagcagggaggaggcgagtagtgaatgtcactgtgattgcaaacccttacctgtattatcacacgtagtcctcacaacaaccttgtgagacaagtgttgtgttcctcattttttcagaggggaacacagacccagagaggttaagaaatttgcccaagataacaagtaaaaggcaaagttggttgcaaaagaggtgtttctgaattcaagggccatactctctctctgacaacatgctctaagtccatagagtaagcactctagtatgaaaaaaagtttcaaggaacgaggccatgaaaatgagactatttgacatctcagatctgtctgggatgttatggaggtttttaaaaataaagttgaaaaaagaaaatgaatcatgtttatacataaaaaaatcacatgtaacacatttcaagtgtttgaaaataaaaccaaaatctaaactttagtcttcaagcagacattcagtgttactttagaaaactcactgaattaggtggaaatgatggaataatactattcatggccagctattaacacagaagaacatggcagtgtgtgtctggaacggcatgcacaatttgtaaacctttttcaaatatcatttaatcaactcagaataaagtgccctgtagccaacagtgcctctttacttgcttctctgggaaatacatggtactaaattagtagcacaaagtttgggaatatgcaaaataatggataaccatttttcaaaatgtacattctctgaagaggaagcagctggttggacaggatttcttgaagagccaggtgctaagggcatcaggtcgacatccatagtaaccatgtgccataacatctacacatttccacttgttttacagacaaggtaacaggcagaaggaaaatccagagtcttgcagtaagcagatgacaaaacttcaatatgcttgggcaccacttaggtgaccccagggagatttagtgtggccttaggaaagcaaaagagcactttttattggaaatatgagcttgtcactgggaaagatttgtaaaattgatcaagaacttgatttataattatgcctcaaaaaaaaaagttctcatttagtagtggagcaatctagaaaacataccttttttgtttgtttggaagatcctctttccctggctgtattgtagtgtttgctatttgatgtggaaataactaataacttaagattttggaacagaacaccctttagatttccaaaacacaattcttatttcagggaagacagaccaaaaatatctcctgagatcattggtttctttataaattgtggtaccactccatcattgaagagaaaccactaccacaccactagcaccatacagaaccttttctctgtatctttgtacaatactacaaaggggtaccagggaggagagagtggctgaccactttagtgacaaaacagcactccactgctggtgaatcccatctaattatggtccttccacccttttcaaccaccaacaactgttcgtactgttaattcctatcctgaaggtttaaccagtggttgtctagtatcttctgtctttagaacagtggttctcaaactttagtacacatcagcatcacctggagggcctttttttaaaataagacacagattgctgggctcatggtcagagttcccagttaagtaaatcaggaaatttgtatttctaacaagtttataggtgaggccaatactgctgttttgggaactatgctttgagaaccactgccttgaaaaaatttccaacttctacctttaagatcagcctgacttatcaaacgctagagaaaaactgaatctacccttgggcagatgacttgggattggattctatacagcagtcttgctcaatcttcccagtttccagttttattataccaacaattggtttttacaagctagaagacaatgaatgtataagttctatggaacagtgagataaatctaagcttcttgtctttgtatttagaaacattgattctatggatgatcatttgtatcatgttgaccctttgacttgtactgaaggtgattttaaatttaagtatgtagtgtttgaatttcttccatccatgtcgttttaatgagatgtttccatgtcagctcctttacagccttggctcctggcttacagatttttgaatagttgtttgcttgccagttgttttacatctttcattggccaccaaaatattagccatttgagatgagatgagactacttgttgtaccttcatctttcatttaattttctggcgtaaattaacattttaatttcatatatatctgtaaagagtctacccaaaggcttcacggaaatttgcaaaatgaactaattcccttttaagcagcaggtgtgcctgtttttgacttttcagtaaatatgttgtttgtgcacatatctacatggtggagaccatattcattatttcatcttccaaataatgggaaaaatataaaagtgaatcagtgtgctttgggaattcagtgaaatcatgttaactcatatagagggggccttagtttatctcttctttactgaattaattagttttggaaattcttttaccattaaaaaaaattaaggaccatacagagaatgatttaagaaaaaacaagtcacttaaaaatcatcacctatttataaactgtattaattacacataatgcttattgattcaatgaggtttctctaaagacttctgcttaataaatatgctgacttcatttaaattagtttagactattgtaggaatggaaggaaatgattatatttactagaattagtgagatcagaaagcatatcagaatgttgatgatatcaaggagacaatctacagagtttttgcctctgtggatggaaataagggtgtttttttttggttttttttttactttagtttcccataatttttggaaattatgtgtgcatttagttcttttagtaacactgattttaaaattaaatttcaaaagtcaatctctaagagtaatttatttttgttttaccaaccagtgccaaaaaggagaggagggaatccaaaagccaatcttttgaaccaatgtgtaaaagattatgttttttcttaaagttagggaggctcgggccctgacactgccagccccagtgagcatccctggctacctcgggattatgtgcaagctgctttgtcctacatttctttcatctggttcttattgggagtgcttctctctaataaaaattgatttcccacaaaataggcaaagctgaacaaagatgaatgcttttgataagttgggtttcacttcagttgaaacaatgtgatagaatatccaggtgtggcatgatggggcaggaggaggtgcctagagggaaaagttatttttgtttcttagtgttgtgttgtggggatgggacagataagaataagatgtttattgccctaatcatgctaagagactattattcaatatgcttttcccgcttttctaagaggaataaacttagacaaattacattataaacagttcccctactactatctcccactctagataaagccagtgggtggtatgggtccttttattccttatagtattatgccaaagaatcaacttattttcattgaagattataaataaatgaagcttgttatagccataatgatttgagtcagtataccattttacctataaaatgcaaaattcatccttgcaaccccattcaccaggagccttgaagcattttgtttactccaaaggccttgtcaaggaagcataattttttgttttgccttcttatttagtcagtttggtcatatttacttaaaaaaacaaactgaaaatcacactcctttatatgttgatataactgattttatagaatctgtctgttctttgtttaacaggtctctgtaagcaagcttgcaagtgtattttgtgtacattttatctgaggtggaaatgaaaattctaaagagaaaatattttaaaagatattgtatttatgttgcttgtgttgtagaataaagattcaaatgcattaaaaatctggtacatgaaacaattgtgtttactgaataaatatatataaataaaaaaaaaaaaaa

SEQ ID NO: 863 - DNA, 8564 bp, Homo sapiens
cttccggctgggcaaggggccgcggggagcagctcgggactgaaccgagaggtgccgaaggaaccggcgggccgcttgatcccgctgcagacgtaggagatgcctgggacaaggaggccaccttctcagggcaaaagaaaaagaaggtgacaggcgttgagaccaccgaagggaacccatggctaggatcagtttttcctacctctgcccagcctcctggtacttcactgtgcccacagtgagtccatttctccgtcagcgggtggcattcctgggactcttcttcatatcctgtctccttttacttatgttaatcatagactttcgacattggagtgcttcattaccacgagataggcaatacgaaaggtatttggctcgagtaggggagcttgaagctactgacactgaagacccaaatctgaattatggacttgttgttgactgtggcagcagtggttcccggatttttgtttatttctggccaagacataatgggaacccccatgacttgctggacatcaaacagatgagagaccgcaacagccaaccagtggttaaaaaaatcaagccaggaatctctgcaatggcagacactccagaacatgccagtgattaccttcgtcctctgctgagctttgctgctgctcatgtgcctgtgaagaagcacaaggagacccctctttacatcctctgcacagcaggcatgaggcttctccctgagaggaagcagttggctatcttggctgacctagtgaaagatttaccactggagtttgacttcctcttttcacagtctcaagcagaagtgatctctgggaagcaggaaggggtttatgcatggattggaatcaactttgttttgggaagattcgaccacgaggatgaatcagatgctgaggctacccaggaattggcagcaggacggagaaggacagtagggatactggatatgggaggagcctctctccaaattgcttatgaagttcctacctcaacctctgtccttcctgcaaagcaggaagaagctgccaagatcctgctggctgagttcaacctgggctgtgatgtgcaacacactgaacacgtgtacagggtttatgtcacaacttttctgggtttcggaggcaactttgcccggcagcgctacgaagaccttgttctgaatgaaactcttaacaaaaacagattgcttggtcagaagacaggtctgagtcccgacaatccatttctggatccctgcctgccagtgggactcacagatgtggtggagaggaacagccaagtcttacatgtccgaggaagaggagactgggtgtcttgtggggcaatgctgagccccctgctggctcgctccaacaccagccaggcctcactcaatggcatatatcaatcgcctattgacttcaacaacagcgagttctacggcttctctgagtttttttattgtacagaggatgtgttgcgcattggtggccgctaccatgggccaacatttgccaaggctgctcaggattactgtggcatggcttggtcggtactaactcagagattcaagaatggcctcttttcatcacatgcagatgagcatcgactcaaatatcagtgttttaaatcggcttggatgtaccaagtcttacatgaaggattccactttccctatgactacccaaacctgcggacagcccagctggtgtatgaccgagaggttcagtggacgctgggagccattctatataaaacacgattcttaccactcagggatcttcggcaggaaggtgtccgacaagcccatggtagctggttccgtctctcctttgtatacaaccactatctcttctttgcctgtatcctggtggtgctactggccatcttcctataccttctgcggctacgccgaattcaccaccgacaaacacgagcctcagctccattggacttgctgtggcttgaagaggtggtgcccatgatgggagtacaggtggggccgtgaggctggaccaggactagagaagcttgagcacccccgagttgctgctcattgaattcctccactttcttatatagcctcagatgctgtgatgtctgaccttgtggatatttgcccttggaatttctactttactttctaccgtaattccttctccgtacccaggtcttctctgagagaagctataatttaatctgtgaggaactaaatgacaggagattggtgctaatacgggggaccaagctttgtccaagtgaagcaggcttcgactccttctgagaggtctggtgtgttcctagaatctcaccttttcttcccttgctaaagcatgaagtttggcatttggcacactggaagcctggttgaaatgaaatttgtagcatctgatacaaagccagagacattctagcaagtgcagcagccccttctttctctgtaacagagatatcatttatgtggagatccacaacctttaacagggatccaagatctttgcagttcaatcgaccacataggaatttccaggcaccaaaatgatataacttccttgcttccttgacaaagaagccatcatgggtgtgatccaagatccctgtcgtagtgttgatgatgttagtacatgattttaaaggttagaaccccttctaaatgaatggtctgtggaagattttagtatcttatctgatgcctggtatgatgaggatagaaaatttttccatttttatgtgcctcacaggctgtttgggcattaattttgctttttgagccttaagtgtgttagtaggatggagaaactgtgatggggactgggaacctggatttgtctgattttaggtcactgttccctgggcctgtttttgtgagcccttacacaggaagatataaagagagttctttcatttcactgctaaaatcagtatgtagtatggggaatgtatttgggttgtttttaaagaaaaggggaacagaatcaggagagtgggcaaaggcaataaaatcaaagttcttattaattatttctgagaaatagaagtttctcaatttatgactcttggaatgtctgaaagggagcaaatttggaatagatcaatctgttaataagccatctggcaactttcagaacctctattaagagactgctgagtcacaaacagcacttccattaatgaagcgagaggaaaagccataataattacatcttcacccactacccttccagagctttgcttctcctccacatttagccattaaattgcatgaggatttctcttcatcagggtccgcatggaatctttcttatattttaccctttcctacatgtagccttgaatgtcctttccacgaatatgctcccacggctgggagcattttcttttcttttcgtcacctttgatttttgggattagattaataggggaaaaagtccctggctttaaagaaaacaaaagtagaattcttcaaaaataaatttcatactgggaacagaaaggaactaaatgcttcataaaacagggaaaaagaaattaagatcatcctagaaataaactaagataaaaataagtatactgacccttggttggtagataaaaagatgaccagtcttgtattgttttaaaattagataaacatggattaagcatgcaaagactctgttcctttttttttttcttggagacagggcctcacgctgtcacccaggctggagtgcagttgtgcaacatcatggctcaccgcagcctcaacctcctgggctcaaacagtcctcccaactcagactccagagtagctgggactacaggtgtgcgccaccacactcagctaattttttattttatttttttagagatggagtctgtgttgtccaggctggtctcaaactcttgggctcaagcaatcctcccacctcagcctcccaaagtgctgggattacaagcatgagctactgcacctgccctctgtttcctttggaaatctcttacctttcattagggtttctttcatagcaatttcctttggtttttaagacttctacattgctttttcttttattatctgtgctccgtgaaccttatgaatgctgcttaaaaataatgtcaaaatatgttttagctgcctactcaggtaacgttttcttttgctctcatcttggtttccatatactatttttggttttttgtgagatctaatcaatgatctagtcagaagctacttcactggctaacagtgatcatgttcatgtgctaaaaatgaacttgaaacacggaagtagtggttggtccagtttgaaagctcttattagtattcttcatcctggctgtaataatagccattatttgttatgcctttgttatgtagcagacactcttaaggattttatgtgtattattcaaattgctattactgttctttttatagttgagaatctcaggatacctacatttatcactttttcaatatatatgtatttcttattcttattttgtcttggagtgtttaatgtgttatttcctgttcattactttaatattatggtatctaggcttgtctttattaccatgagcaaggtctccaggagttccacagtactgaaggaaaattttgtcatatccctcagaagaactgaatatttattattggtatgggctcctttgtttattctcttctcccaattaatagattttaaatgaaatcttattagctagaaacaaaagccacttactccttgctgagagccaattacttaaatatatttcttccttataataaaataatttgcttctaggagcagaaatctatcttgccataccctttggtttttaaagatttctcttctatttgcatttctgcactttggtggttctcccatgaagataattatggtgtcataaaattcacattccactggttcctttgaatcttaccaaccactcttgttaacagagacaatgaacctgaactgttttaggactcttgttattactgagacaggtcacaaacatcaaaataggagtccgtggcttgtagtgatgctttttagtcttgtgatagcacaatccatcactttccccaaaattcttgtcatagaacataatgaaaaatatgtaaaatacccatttatgtggcatttcattcacttaagttgcagttaactctaagccaaattataccattttttctctctgtactttagctccttgaatttccttaatctgggaaacttttgttcccacaccaaggaacaaattcagggggtacaagtgcaggtttgttacatgagtatattgagtgatgctgaggtttggggtacagatcccatcaccaggtggtgagcatagtacctaacagatagttctttaatccatgccctcctctctccctccctgctctagtagtccacagtgtctattctggtctgggaaattttcatcactttccaccaatcttctatttattctccaaatgtcttccaaagtatcctgccccaccccctcctcatcctaagagattcctttaacttcaagatcatatccagtgattgctgaaaaatgtctgccatgcacttgctaagctagtgtttttaggcattaacatttattatcacatccatatttatatttttgaaataatttatacttctcactgatatcatctaaacagatgcttctcacagttttatgttttgttttttgtcagggatgaaagacaagtgagtggtatcacttaagggaaagaacagtaggcttaacgaatagcagacctggattctagttctggctttgtcatttactagctctggtaccccaggccagtcacttaccatctctggttcggttctcatctatcaaacaaagaggctagacaagattagaaactaaaggcagaagacaaggtagaaaaatcatatgattttgggaagagcattttgtcctttggtttagaagaccaggctgcccaaaagagcctcctattttatccataacccctgatgataaggttggtgggaacagagtttctaatagtaatcataataaatttcagaagagttttaaagcttctggtcaacccccttgatttatatgggtgataaaactgaggcctagagcagttgtaatatgtgcaaagtcatagtgactggcctcctagcccaactactttgtcagctacaatgaaatgctcattaacagaatctttctgcaagtataaacagaatctattttttataaaacagctggccacaactaaccatgccccatctttacaactgcttctgacattcatttatgactgctttgctcacatttaggaataaactttgaaaaaaatactttgtcagaaatagtgccaagttttcactacatctattcttgttcctgtatttcttttcgtacttttaaattttatacatctttttaaaacaattttatacaatttcctttactacaacatccaagcaattcattagatgactacagcctagatgaaggtataaatgcctattacatctacctcattaaagaacttcgttgtaattcttgggcagtttccagactctgttacagaaacagagggctgtttctttttgttgtctttaaacttttcaaattaattcaaaactagtatctaattgtcctttttgctgtggtatgtggtgtaatgttgattgggaataagaattatggtagaaatagcagatgtttcaaattctcccatattagtctcttagggacgctagctccagattccagcccctggggcaataacttgtgaggattttcctggtgttacaaaaaatattgctgttaaaaaactaagactcaaaaccaaaagttgtgattaataataacaggattattagtcaataatattttgattaatactatagaatagcaacagtgaatatacctcaaattgaaaacttttaggttgtgttcttggctcattctctcataacctggatctaagttggaaagctgtggcaccctgtttgggtgtcccatctaccctgttttctgtttctgcagatggcttgttcaagcttcattttaagcctgctctgtctacttatcttccttatatcctaatagacttctcttgtgttattacacatttctcttttgctctaatatttcattattttccagtttgtcagtaccgttatcagagggacgaggaaggaataacacaccagttgaccattttgtttctctgaaaatctgagcaatacggagatccttttattagtaaaactgaatcattactcatactacaagggctttcacttttaaaatgtaatccatcattgcttgccatttttatgaaaaccaaagttgaaaagtcttctgaatcacaggctatgtatagccacacatgcatgacttcaggctagcataaagacatgtctgctcctgagcctcttcttttaaagggcaaccacttgtataccctctggtggccactcctccttctccactccaaggcagccctggtactttcctaagtggcccctcctacagagcacttgccggcatttggcctgctgctggtgaagacgccccttactagcttcataaatgtttttctgcaagcagggatcccagacacatactttggtttctagtgtttcagttactatgttgtatttgaaattctcattccacaattaccctttagttgaagtcctgaagtacatgccatgtactccccctttatttctaccttgatcaatggcctctgcggagtgtagtgaaagacatctttttattatgatctacactttaaaaaaccaaaggctgcctgtattacattgctttggggagttgttaagactctgttttttctactgcttcacattaaacaataattttgttgaattttgaattcttaaaattctcactgacaaacattttaggtcagtgttgaggaaaatgtgtgatgcatgttagagaggtgatgcattctcccttatgcagggacatgggtatatgtgttacatatgctgatatataacccaccattcatcccaggaccacaagggtagctgtagataaactggttatcctaaaatcatgattatcagtgttgatctctgcaaccaacattgctttagggagttgctagtcattacccctgctacaatagatagtatttgtcagtctaagttacagacaaaaaattctaggttgactgattaagaaagccatgtgttttaatttccttcatgttttaaaaacaatggacgtaagtgcagagagacctttgaaaatattaagggaaatctatttaatcctataggtatgtgatgacttgtttttttggaaaaaggtatttggaacatcaatctgtaattatccattttccattcatgcattcactaattcaatatttgatatgtgtctgggagtgctgggaataacataaatacaaaaaaaaccctaagataatcattcaccagaagctcatagatataatacagttatatagctaaatgcaaccagttgtttttccaaatgtactcatcatctgtaataaaagaaaaatgaagtaaaacatctgaaaccttaacttaaaaaaaaaa

SEQ ID NO: 864 - DNA, 1551 bp, Homo sapiens
gggcgtctccgccgcagctcggctcccgcgcgctcagcaccgccagcggcggccagatgcaggcggagcgaggagctcggggaggccgtgggcggcggccaggccgcggccggcctggcggagatcgccacagcgagcggcccggagccgcagcggcggtagccagaggcggcggcggaggcggcggcggggacggaggcggacgccggggccgtggccgtggccggggcttccgcggcgctcgcggaggccgaggaggaggaggcgccccgcgaggcagccgccgggagccgggaggctggggcgcaggggccagcgcgccggttgaagatgacagcgatgcagagacctatggagaagagaatgatgaacagggaaattattctaaaagaaagattgtctctaactgggatcgatatcaagatattgaaaaagaggtcaataatgaaagtggagagtcacagaggggaacagatttcagtgtcctccttagctctgcaggggactcattctcacagttccggtttgctgaggagaaagaatgggatagtgaagcttcttgtccaaaacagaattcagcattttatgtggatagtgagttattggttcgagcccttcaagagctgcctctctgcctccgactcaacgttgctgccgaactggtccagggtacagttcctttagaggttcctcaggtgaaaccaaagagaactgatgatggcaagggattagggatgcagttaaaggggcccttggggcctggaggaagggggcccatctttgagctgaaatctgtggctgctggctgccctgtgttgctgggcaaagacaacccaagcccgggtccttcaagggattctcagaaacccacttccccactgcagtcagcaggagaccatttggaagaagaactagatctgttgcttaatttagatgcacctataaaagagggagataacatcttaccagatcagacgtctcaggacctgaaatccaaggaagatggggaggtggtccaagaggaagaagtttgtgcaaaaccatctgtgactgaagaaaaaaacatggaacctgagcaaccaagtacctccaaaaatgttaccgaggaagagctggaagactggttggacagcatgatttcctaaaaaggggaaaaaaagtgcctgaagcaaatcttggttgccttctaacggcaggtgggcataaggctgtccttcaggaccagccagtttacaagcatgtctcaagctagtgtgttccattatgctcacagcagtaaatgcctacctctgtgtttgacatctgaaagaatacattgaagcagcttgttgcatttgtttttctggcttagtaatctaatagatttccttaagggcaggagatagactctggcccttgtttctagcctccttccttgcagtgtttacaacatagccagtgtttacagcatagcagatgctgctgctgattaagagaatagatgcaaacaaggcatgcatttggccaaaataaacaaatgctggtctgtccaaaaaaaaaaaaaaaaaaaaa

SEQ ID NO: 865 - DNA, 2928 bp, Homo sapiens
tgtcccgtttccggacccgtctctatggtgtaggagaaacccggcccccagaagattgtgggtgtagtggccacagccttacaggcaggcaggggtggttggtgtcaacaggggggccaacagggtaccagagccaagaccctcggcctcctcccccgccgccttcctgcagatctgcttggctttgaggaagagtggcagtactgcctcactgcataagggatgggatcagagaacagtgctttaaagagctatacactgagagaaccaccatttaccttaccctctggacttgctgtttatcccgctgtactgcaagatggcaaatttgcttcagtttttgtgtataagagagaaaatgaagacaaggttaataaagctgccaagcatttgaagacacttcgtcacccttgcttgctaagatttttatcttgtactgtggaagcggatggcattcatcttgtcactgagcgagtacagcccctggaagtggctttggaaacattgtcttctgcagaggtctgtgctgggatctatgacatattgctggctcttatcttccttcatgacagaggacacctaacacacaataatgtctgtttatcatctgtgtttgtgagtgaagatggacactggaagctaggaggaatggaaactgtttgtaaagtttctcaggccacaccagagtttctgaggagtattcagtcaataagagacccagcatctatccctcctgaagagatgtctccagaattcacaactctcccagagtgtcatggacatgcccgggatgccttttcatttggaacattggtggaaagtttgctcacaatcttaaatgaacaggtttcagcggatgttctctccagctttcaacagaccttgcactcaactttgctgaatcccattccaaaatgtcggccagcgctctgcaccttactatctcatgacttcttcagaaatgattttctggaagttgtgaatttcttgaaaagtttaacattgaagagtgaagaggagaaaacggaattctttaaatttctgctggacagagtcagctgcttgtcagaggaattgatagcttcaaggttggtgcctcttctgcttaatcagttggtgtttgcagagccagtggctgttaagagttttcttccttatctgcttggccccaaaaaagatcatgcgcagggagaaactccttgcttgctctcaccagccctgttccagtcacgggtgatccccgtgcttctccagttgtttgaagttcatgaagagcatgtgcggatggtgctgctgtctcacatcgaggcctacgtggagcacttcactcaggagcagctgaagaaagtcatcttgccacaggttttgctgggcctgcgtgatactagcgattccattgtggcaattactctgcatagcctagcagtgctggtctctctgcttggaccagaggtggttgtgggaggagaacgaaccaagatcttcaaacgcactgccccaagttttactaaaaatactgacctttctctagaaggcgatccattttctcagcctattaaatttcccataaatggactctcagatgtaaaaaatacttcggaggacagtgaaaacttcccatcaagttctaaaaagtctgaggagtggcctgactggagtgaacctgaggagcctgaaaatcaaactgtcaacatacagatttggcctagagaaccttgtgatgatgtcaagtcccagtgcactaccttggatgtggaagagtcatcttgggatgactgcgagcccagcagcttagatactaaagtaaacccaggaggtggaatcactgctacaaaacctgttacctcaggggagcagaagcctattcctgctttgctttcactcactgaagagtctatgccttggaaatcaagcttaccccaaaagattagccttgtacaaaggggggatgacgcagaccaaatcgagccgccaaaagtgtcatcacaagaaaggccccttaaggttccatcagaacttggtttaggagaggaattcaccattcaagtaaaaaagaagccagtaaaagatcctgagatggattggtttgctgatatgatcccagaaattaagccttctgctgcttttcttatattacctgaactgaggacagaaatggtcccaaaaaaggatgatgtctccccagtgatgcagttttcctcaaaatttgctgcagcagaaattactgagggagaggctgaaggctgggaagaagaaggggagctgaactgggaagataataactggtgacaatagatgtgagttaaactttaggaaaaaggattccctttttttaaaaaaaatcaatacctcaaaagcaggctttgggacaagaaaaccccaaagtggcctgcttttcccatcccaggagctcattatccagtctgtgccaactgaagtaggagactgactgtgagtgctggctaaaagccctgggtggtgaggctcacagtactggtttccaggaggaagagcctttgtgcatttgactgaggccagtttctatgaagagcaagtagctgaggagaggtcgaatttactgctttttccaggacaattctggaagtaaagaaaatgtaattcaagctggttagcttaattttgtgccattctttaacataagagtaagctctattatgaaatacaactttaaaaaattttagctataaattatataaatgattttaaattgctgaggtttccttaggcagcttatttatttgtttacagttagactatctgagtaaatggttctttgtggacctaggcagttcctgactgttccacatgtagtacattgtaccaaagttcttaataagaatattccccacaatcctgttctctaaatgtcaaataaagattattttcactagattcaactttacaaaa

SEQ ID NO: 866 - DNA, 3313 bp, Homo sapiens
gcaccggcgcggcttaggctcgggctcgggctccggctcgggctcccgcggcgtgggctgggcagcagccaggcggcggctccgcggcgccgggcaggggccgtccgcgggtccgcgccctcgggcggcggcgtctcctgggtcccggcagccgtccgcgcgcccgggcgcaggtttggttttcctaaacaaatcctttcacagggaccgacggcacttgataatgtgacaaaaaccagcctcttccaccccactgcagtgacttttgccggaaagtggagcagtgggcacggccaaccttgtcgttcatcaatgccgcccctggcagtatctgaggatcggtggcagccatgcctccccctgccccagccgctccttcccccccacgctaatctgcatggtgtgggcgcccttgggacccccgaggactgattgtctgaccttgcttcacacgcccagtaaggactcccccaagatgtcgctcgagtggctggtggcctggagctggtcgctggatggcctgagggactgcatcgccaccggcatccagtccgtgcgggactgcgacaccaccgctgtcatcactgtggcctgcctcctggtcctcttcgtgtggtactgttatcacgtgggcagggagcagccccggccctacgtctccgtcaactccctcatgcaggctgccgatgccaacgggctgcagaatggctacgtgtactgccagtcccctgagtgcgtgcgctgcacccacaacgagggcctcaaccagaagctgtaccacaacctgcaggagtacgccaagcgctactcctggtccggcatgggccgcatccacaagggcatccgcgagcagggccggtacctcaacagccggccctccatccagaagcccgaggtcttcttcctgcccgacctgcccaccacgccctatttctcccgggacgcacagaaacatgatgtggaagtgctggaacggaacttccagaccatcctgtgtgagtttgagaccctctacaaagctttctcaaactgcagcctcccgcaaggatggaaaatgaacagcacccccagcggggagtggttcaccttttacttggtcaatcagggggtttgtgttcccaggaactgtaggaagtgcccacggacgtaccgcttgctcggaagccttcggacctgtattgggaacaatgtttttgggaacgcgtgcatctctgtgctgagccctgggactgtgataacggagcactatggacccaccaacatccgcatccgatgccatttaggtctgaaaactccaaatggctgtgagctggtggtggggggagagccccagtgctgggcagaagggcgctgccttctctttgatgactctttcctgcatgctgcgttccatgaaggttcagcagaggatggcccacgggtggttttcatggtggatttgtggcatccaaacgtcgcagcggccgaacggcaggctcttgatttcatctttgctccgggacgatgagagtatttcccatgctggagtcggcgagaagggccgaggcggggcctgggcagactgtggtccggtccagtccctaccggtgttgtttccatgctcagaaacctgcctcagcggaaagctcttatttgggattttatatcatgtcgggtccctctttcccttggttattgtaaatggaaacttttcggcttgtatttccttagattttttttttttccttccaatcatttgcttcagagactcctttctggcctaacagcgcattcctttgattggtccttgagtgaccagagacttagtgcccttgtaagtctgtcttctgttgctacttgtttttttcagtgctctgaaatagagtaactaaatggttatttgtctgaatataataatgtaaaacttcttgtggtcatcttaaaaaaaaaaaaaaaaaactaaaaactgcaaaccagagagctagagaacttggcctctgatgctggcacactggggacccttcagccacctgacggcagggggacagtctgcagcccccacacctgactggcttcagtagccaggtggaggggctgccagacacagtcagggtggcacacagtgtccaggcccagggatactgtcaccatcgctcacctcattctaaaccttgtcaggtccctgatggcaaaagcattgggccagtaggactggaggctactctttaaacatggctttcctgcaaagctgaagctggtgtcccccagcaccaagctgcggctcacacagatcagccacggaacgtgtgatccgcttacctcactgcctacagaagccctactgccaaactgggcctggaaaattcccagttttaggtgttttgagtccacagtgatgaacgttaaggccaccaggttggctgataggagctgtagggggataggaccgcgctcacccagcgacatttggggaaagcctttctctggcaaaactggaataatagatctgaccaaagtttctgttttgctttggagttctgttgcctatgtttttttttttttcatttatttgtctgtacataaatgttcaaacactagacttggagatagtggaagagttggccctgtgtctttgtcatggcacaaaggtgtgcactgcgtgacaatgacccaagccagtgtgtgctagtgaggagacagagaagacctacatgcccagaggacccgtggccgttgtgctggttttctggtctcctgtgaagaacatgtggatctcttcccgaaggaaaaggtcccaggagaccagtttgaggcactcactctagaaatagcctgtgttagctgatgtgtgaaagcgtagccggccagccacactagagatgccttttctgaataatgtattatgagcagtgtcagatttataaagccgaggagtggtttggaatatacagctggtcgcaggtgcaggtccagtgtttagatccaaatggaaaacagcagcttctaagaggtacaactgttggaagaaaacacagttgaaatgcaccaggcaggtactagcaagtgtgcaaagagcacgtctacatttgagtaaaatgtctacacagatatttgtcagtgatgagaatgcaggaaaaggcagacatttcaaacatacctgaagtctttttactcattatcttgttaaagaatcactgaggtgcatgatttctacacatcgtgactgctctgctctgcgtttacaaaaccaacagcccgcgcaggtacctagctacctgcattcatgtgacatgtctggggaacagaagataaataaaggatcttgctgaaaacc

SEQ ID NO: 867 - DNA, 3852 bp, Homo sapiens
gtgatttctgatgaaactggattggaataattttcatgatctttgtatatttatatatatatatttttaaattttgcatttgacttaaagtgccatgagaaaatttgcatactgcaaggtggtcctagccacctccttgatttgggtactcttggatatgttcctgctgctttacttcagtgaatgcaacaaatgtgatgaaaaaaaggagagaggacttcctgctggagatgttctagagccagtacaaaagcctcatgaaggtcctggagaaatggggaaaccagtcgtcattcctaaagaggatcaagaaaagatgaaagagatgtttaaaatcaatcagttcaatttaatggcaagtgagatgattgcactcaacagatctttaccagatgttaggttagaagggtgtaaaacaaaggtgtatccagataatcttcctacaacaagtgtggtgattgttttccacaatgaggcttggagcacacttctgcgaactgtccatagtgtcattaatcgctcaccaagacacatgatagaagaaattgttctagtagatgatgccagtgaaagagactttttgaaaaggcctttagagagttatgtgaaaaaactaaaagtaccagttcatgtaattcgaatggaacaacgttctggattgatcagagctagattaaaaggagctgctgtgtctaaaggccaagtgatcaccttcctggatgcccattgtgagtgtacagtgggatggctggagcctctcttggccaggatcaaacatgacaggagaacagtggtgtgtcccatcatcgatgtgatcagtgatgatacttttgagtacatggcaggctctgatatgacctatggtgggttcaactggaagctcaattttcgctggtatcctgttccccaaagagaaatggacagaaggaaaggtgatcggactcttcctgtcaggacacctaccatggcaggaggccttttttcaatagacagagattactttcaggaaattggaacatatgatgctggaatggatatttggggaggagaaaacctagaaatttcctttaggatttggcagtgtggaggaactttggaaattgttacatgctcacatgttggacatgtgtttcggaaagctacaccttacacgtttccaggaggcacagggcagattatcaataaaaataacagacgacttgcagaagtgtggatggatgaattcaagaatttcttctatataatttctccaggtgttacaaaggtagattatggagatatatcgtcaagagttggtctaagacacaaactacaatgcaaacctttttcctggtacctagagaatatatatcctgattctcaaattccacgtcactatttctcattgggagagatacgaaatgtggaaacgaatcagtgtctagataacatggctagaaaagagaatgaaaaagttggaatttttaattgccatggtatggggggtaatcaggttttctcttatactgccaacaaagaaattagaacagatgacctttgcttggatgtttccaaacttaatggcccagttacaatgctcaaatgccaccacctaaaaggcaaccaactctgggagtatgacccagtgaaattaaccctgcagcatgtgaacagtaatcagtgcctggataaagccacagaagaggatagccaggtgcccagcattagagactgcaatggaagtcggtcccagcagtggcttcttcgaaacgtcaccctgccagaaatattctgagaccaaatttacaaaaaaacgaaaaaaataaggattgactgggctacctcagcatacatttctgccacattcttaagtagcaaaaaaggaaaagtgctttcctcctctgcaggatgtaaggtttatcagccattaaaacttagacttctctagcttttcactagctgtgaaccagccttcctgtccatggacgtgaaactgcatagtaatgagactgtgcacactgatgtttacaagattgaaagagtctttctccgaaaatcatggtaaagaatactgagacaatgaaaaaaaatcaacaaaatatgctttctggagaactgtaccttttatggtttgcttgcacatcagtagtttctgctgaacgtgctgtcataatgaagagatttccaagattttttttcctgattagaactggtagccagtatattaaatattgatataaaaataaaagaactggaaccagattcagaatcatgaaaacaacatttttacaacaacaaaaaaactatattaaacagggtttaaaggaaattaaaacagaactatgagaagtacaatttgttatagtatagtatcaaatttctatatagattttatacctcagtggggaaaaataactgattccaatgacattcattttgttttcatctgtgatagtcatggatgcttttattttccttggggtgctgaaattgagctgaaaaaaaaaggctctttgaatatagttttaatttctctctacagttttttttgtttggtttgtgggctgttggaattgtaatttttaattgccttctaaaaaatggaaatttaacaatgtctgatctcagctgaacaaattagatgtttcagttgctcttgggtcaactggcttacagatttacatgtgcacacacacacaaatttcttatcacattttcgacttcttcacttgacctaactgattatgcgaaatacccaagattcatgctactgtaccacagatttgttttcacagcaataaatcttcagttctttgtttatgattccacttaacaaaaggcctgcagaagtgatttattatttgggtatttggagataatacatttgatggttttttggaaaacctttttcactccatactcagatatgcttcattgtcaaatgcatatttagattagattattgaattgtaatgtttatctgctgctttttttaaataaaatttgactgaaaatgtttaattggcattttttaatgacttagccaaagaagtgcagctattattccatattaataggcttgcatttcttttcctaaatcttatttaggctaaatcagttttatttttctctgattttttttaataccacagaatcacctgagtgtcaattgaaagttgtcaattaaaaggtaaccttttaatctcgtaggaggaatctcattaagacatttttcctgatatgtagagcagtctgttggcaaaaatgcatatattttctttcatatttgtaaaattatatttaatggaattcttttctttgattatcaaggactttcactgcaggcagtgctatttcttgtgcctaagaatgtttccaaaagtcgcatcgctaatgatatttgccaagttgagtgtacacaaagtttctcatatcctgttcaagttaatcaacatcaagcacatggggatgctttagggtgagtctatagtacaaaatgcataaaccatgtccccaggaaatttgaaaggaagcaggtgctgaatggaatttttttccttttccatgagctgtgttaattctatctccagtaggcctaatgcttgaataagcaagatgtctaatcaataaattattttcatgctcagaatttcaggtttttgtactccagcatagcttggtcttatttcttactgtatgaaagcttaacagcaatgtgatttaaggttttgttttaaatgggagatgtaagtgatttaattcatgggtacttttagaacctgatagataatcccattgcctttatttttctaattaaagaattcctaaatactttgaaaatacaaaatattcctgaataaaaaaaaaaaaaaa

SEQ ID NO: 868 - DNA, 3348 bp, Homo sapiens
atgcctggtgcacagagtctgcaggtcgggcggtagcgacaggtcagagctgcggcctgagcagccagcgtccggcatgaaggtctggggtctggctgctgcctgcttcttgctccagcaccatggaatgcctgcgcagtttaccctgcctcctgccccgcgcgatgagacttccccggcggacgctgtgtgccctggccttggacgtgacctctgtgggtcctcccgttgctgcctgcggccgccgagccaacctgattggaaggagccgagcggcgcagctttgcgggcccgaccggctccgcgtggcaggtgaagtgcaccggtttagaacctctgacgtctctcaagccactttagccagtgtagccccagtatttactgtgacaaaatttgacaaacagggaaacgttacttcttttgaaaggaagaaaactgaattataccaagagttaggtcttcaagccagagatttgagatttcagcatgtaatgagtatcacagtcagaaacaataggattatcatgagaatggagtatttgaaagctgtgataactccagagtgtcttctgatattagattatcgtaatttaaacttagagcaatggctgttccgggaactcccttcacagttgtctggagagggtcaactcgttacataccctttaccttttgagtttagagctatagaagcactcctgcaatattggatcaacacccttcaggggaaacttagcattttgcagccactgatccttgagaccttggatgctttggtggaccccaaacattcttctgtagacagaagcaaactgcacattttactacagaatggcaaaagtctatcagagttagaaacagatattaaaattttcaaagagtcaattttggagatcttggatgaggaagagttgctagaagagctctgtgtatcaaaatggagtgacccacaagtctttgaaaagagcagtgctgggattgaccatgcagaagagatggagttgctgttggaaaactactaccgattggctgacgatctctccaatgcagctcgtgagcttagggtgctgattgatgattcacaaagtattattttcattaatctggacagccaccgaaacgtgatgatgaggttgaatctacagctgaccatgggaaccttctctctttcgctctttggactaatgggagttgcttttggaatgaatttggaatcttcccttgaagaggaccatagaattttttggctgattacaggaattatgttcatgggaagtggcctcatctggaggcgcctgctttcattccttggacgacagctagaagctccattgcctcctatgatggcttctttacctaaaaagactcttctggcagatagaagcatggaattgaaaaatagcctcagactggatggacttggatcaggaaggagcatcctaacaaaccgttaggaacagccccgtggatactgaagttttttttatggtagttacaggaaacttctgatactctttttattattttcttgtatagagtcagacacttgaaaaaaactaatgtttgaagacaaaaatattttggcagtcacaataccagaactggattgcatttccagaattctgagttaaagaaacaaagtatttgctttgtaaaaggccaaaattctatttcctacaaactttaaatgctgtttttatagatgtgatatgaggcaacacaagcacagacagttgcatagattttaatttatacatatcaagaaaagtgcaatttcatgctgaatgaagcgtaggaacttgacaagcccataggtagctatagttctttgtcagtatagggaattatgttcatgtgaatttcctgattctcaggtgactaaaaagctagcattctatgtattaaccttacaacagactctgtaagtttgagctttaaaaaccaaactttgacataaccttatttcttgtatttgcccccttttttttataaaaggtgaataaaaagaaataatttaatatcaccattgtatggattcctaatcaagatttcacgttctcagcccctgagactagttttctttgctctctgtaattagagcctttggaagcaaagttgaaaggaagtatttccattctgttactgttttgtagcactttgtccatttattgatttttaaagtagatatttagataccacccctgccctgccccaaaaagaaaaatgtttattgtcctgctaatctatatgcctacacctcagaagctgacagatgagcttcctaaaacatgaggatgaataaatgttagaactgtgatatcttctcatttccacagagatttgggtttaaaacaaatggctaatatttgtaagcctgaaagctgccatcctctttaacatcctacctaccttttaaaatattttctggaggttaagtacagttaggcactagaacatttgttaagcctcccaaagtagtgtgcatggaagattctagagtgtccagctcttgcactacaaatgtaataataacagaataaatacacttaccctgatgatattgagggtacatgattagcctaatgtgatgtcatatgaggaagtttaggagtccatttttcaggtggtttggtgataggaataaaaatgttactcccgtcgctgatttggaagaaaaccgatgaagtacaagtaaggtttccccactcctgtgtgtggtcatgggaagccattagagggaagctgcagaacagaatggaacaggacaggctgggctagactcgagcacgcagtggcccctgtgccaccacactgtgggtcaggaacacgcgtcatggtgttcttgtcggaatgtgaacatacagcaccctctagcattacgaatctcttaggatttttaagattgtatttgataatacttatatttcacagggcacacttttggcacacctcagagcacactgctgctattttgggtcgtatcactgtaaaatacataataagtactacttaactgtgacatgaagaattggaatcccagagggcaacatttgatttgactaagatcaggcataagatagaatttttgtcatttttccttgcagttttattgacttagtttatgagcttggataaaataattttttgatgaatcatgtcaataaaaggaaaaataatgtaactacctcataagtctgataaaaggaagttgctagtgttttatagaatttctgaaggtggttaaatcaagtatgatttcaaaatatcaactagttccacttttgtgattgcaggatgcttcttatactaaagttctcataaataataaatcagcttatgccaaaaata

SEQ ID NO: 869 - DNA, 8702 bp, Homo sapiens
aggtgacgcggccggcgtcccaagatggcggcggcggcggctcccggaaggccgcggcggcgtcccggctgctaaggcgggccccacgcggctggcagcggacaggccggacctacggccggaggacgggcggcagccgcctctgcgcggaccggggctgggccgtgcggcggcagcggcgccaggggatgctcttgctgggcctggcctctcccttctcaacttagggcggcggcgggcccgcgcccctggctcccgggccatggcgctgagggagctcaaagtgtgtctgctcggggatacaggtgtaggtaaatcgagtattgtgtggcggtttgtggaagacagttttgatccaaacatcaacccaacaataggggcatcttttatgaccaagactgtccagtaccaaaatgagctacataaattcctaatctgggatacagctggacaagaacgatttcgtgccttagcaccaatgtactatcgagggtcggctgcagctataatcgtttatgatatcacaaaagaagagacattttcaacattaaagaattgggtgaaagagcttcgacagcatggcccacctaatattgtagttgccattgcaggaaataaatgtgatcttatcgatgtaagagaagtcatggagagagatgcaaaggactacgccgactctattcatgcaatttttgtagagaccagcgcaaaaaacgcgataaacataaatgaactctttatagaaattagtcgaagaattccatccactgacgccaacctgccatctggcggtaagggcttcaaactccgaagacagccttcagagccaaagcggagctgctgctgaccgaacctcagcctctcagacttgatgatgaagtaggtggtcctgaaagttaacaggagggctggggtccctgccaccagttttcacctagccagtcttgagtcttctccgtgcaaaaaggattcacagaaatggaccagttctgttctccaaagactgcagcaatgatatttcagtctgtgaacttctattatgtaaagaatctctagtgtacaaagggactacatcgttggcttttgaccttgctgaaaaggaacatataattgtatggatggtaggattaagttgttgagtagttttgtaatcaagattttatgtaacatttgtaaagggaaaattagcacttttgtggttcttaagggaaaagaaacagaccttgtggagattataatttccttggtttctgttaccactgttagagggagttgtatcatttaacatatagtaggatagtttaagtgtagggaggacaattattgtctgaagctaaaatgggttatttataggactgatggaaatgatttcatctctgccatctctaaagcacttttcattgaacatgttagcctaggatacgtacagtaaattaacaatgatagcagcagatgcctagctcatcctgggtttgcttctgaccttgtcatgtgtgtgccaccaaacacgttattggcacctttttaaataagctctcatgatcaagatggtgatggtagagaagctgcccggaataaactgaatttcatatgttctaaaatgactagcaatggtttaaaaaggaagaagagtggaagtgaagaaggtggtataaatgctgtcaatttttttttaacccaagtattttggtggggaaaagcaagtatctattgcttagcatatgtaaagttgtagtctatatttatggggccattgcttaaagattataaattatgtaaatacattaataaattctaagtttcatttgacattccattgaatctcgcacccagtcttgcgtatgcctgcccagttttcagcctcttaacgggagactcaagcacattggtattgtataaaggtatagagcacttagcttacaatctttaaaggtttctctgccttcccttctacccacccgcctcccaccagatcccatctggaaatcataataaagacatatgccactttgacaaacctgactagtccttactagcctgagggtaaaagattaagctccaacctcaagtcatttacctggtcttggtaataagtttcttttagcttgtacagcatcctcagaccaactgaggagctttccttgttaacaatttagcttatctttctgtttcctttatttttcccctgcctctgttagtggttaacactcttttccctcagggagcctaatgaggtttttaatatcatctaaaaataaagcattgaagtgaagttggtgaaaatttgttcctggtctaatttggcacccttccaacctgagtattgtaggggaaggaaatttacaagatttaataggaaatgaaacagcttgaatttcaaactaaattgtattttcagagctatcctgaaactgaacagctgaaactttaaaaaataattggtattattttgtgccccccacttaatatggatagattttaatgggaaaattataattcagattaaataaaaaacaattcccttttccctgttgtatatcttaagcatttggaattttttttatcttctgaaatcatataaaaagaatgtcattagtaaaaattctaacttcgttttgtttaaaagacatgtggatgctccatgcccctaggattttgcttcctccccggtgctaaattagcaagctcctagagaagccatgtgattcccagagccaggcgctttacacctaaagtagtttgactttcttctgtatacatccagatggatcccaggcatccgggcaccaccctggtgtgtccctagaattcccactgctgggcctctatctccatgacaacaaaataaaaacagaggttgcttgactcattaccaaagaggcaaagcatgtgcgaccctttctgtcttattttaccaaaagatggtgcaaatctatgaccttcacattttttccaccacacccaccagtagctgttggtgattgcatggtgtctcggtgcatggggaaaggcaaggtcttctgagctcatcttaactggtgaggcatctggatgtgtctgatcttactgtgatgttttactgtaccgagcccaatgtgggtccatctcatcagccctttgctgatttcatgatttctcaccctccctcccatatgtagggtgtgattctgttttattatagccacatgttttattaacagaatgagtgatatgaagcttgtacttatgcatttctcgggcctcttccctcattttcatcagtctgtctaagaacttgactcggcactgtttctcgtgtaatatccttctaatgcttagcaacaacaacaaaaaattgctctctcagatccataatccatactcagtgaaagcagggaaaaaatattttcacttattttatttgcttctaaaatgcaaagatgaatactaaagtcagaagcagtgtttcattttgaacacattttggattattaagctgactaagcaatgatctaatacacatttcatattttctttataataatttcttatggagaagaggctatatttcaaaggaattgagacatactcccatctataaacatgtttggttttcttacgatacagggccatttttttaaaactctcaggactgaacagaagagaaaaattattaattagctgctactgtatgttgattcttttcggagaaattgaaataagctctttgcaggcgtccaatcctagaaaccaatggtctccagaactctcacacaagtgtttttctgattctatgataactaattaaccatcatctggtgattaaaagaacataaagtaagattatgattaagtgtccatcacctgcctgtcagccgtggtcagaataagttttacacgaagcaggtgaaagatttagttcttttcaaagtaacttattttcttgtgacccgtttatgatgttgtttgaagtccctgtttcccattgtgtacgcactttctggatgtctggaaggatcgggacttttgtgtgagaggcttgagcgcctcctctatgtgggctggtgtccttcttgaagttgtcaattcctcttattcttaaatatctaaagggaaaggaaaccaactttaatttcagaacttctctttacgtcttgtatgtatttcttttctgttctcaaggaggaaaattggtctaggaagccttctaaattaaactctgggaaatatagtaatgaaaatatcctttagctaactttcctgtaactgtcaaaccaaaatgtcagtatttttagggcattgtgttaaaataagcagtttagattccgacgacactgcactaattggcatgtcagcctccagctcagaaaggcatttgctcatggttacaggcatcttttagattctaagagtgagttacagaattctttttggtactttcacttattctttcagaatacatcaaggatgtgatttatgggcccttaagagtataagatataggtgcacagtatgttacttaagtaacggatgagcccccctaaacatccacgtgtctctgcaggaacctgtgtaagtattgtgaaaacccttttcttccagggaaaaattattggaaattccttaactgagctatacttggtacttgctctagaacatttgggaaatgacaaactcaggctggctctcctctctaacctcactgggctataaatgttccttctaactctgtaatgaaagttcagtgacaaactagatagtgaacctgtgaaagtcattatttacatttgctttaaagggacagttttaccgttcaacttcaagagtttttctacctctttaacagttaatattttttaaaggaagaaatggaatgtaccttcaggggtcaagctgttaactgtatacctgcctctagttagcttggtttatcaaaaggatttttaaatgattcaaggtaatgtttaggatatttgttttaactcctgctgtgctgtgatttaaaaaaaaatagtctaagaaacaaatttatccatgagataaacatcatattttatagttttagaaaaaagggttgggggtggaatttagcctagaacttaaagaaacaacctctgcgaatttctcttgacagcggagttgcttgtcttgacttctaataatataaatccaggcagtttgattatccgatttgcaagaaactttaatggaattctggggcatttgtcctgttttatgtgcaaatgaaagtctaaaaaatatgaggaagatattacatttttcaggagcctccattttttcagtctaagagaatgataagtgagaggcctattgtgatgaagttgcattggacataatgtgggaagtgaataaatagaaccaagaatcttcatctatctctgttggtctttcaggattctcttagcatataggaaaatgatttaccttccagatctcgaaggacttccaatagcatagatcaggtttaatttgatggtctataccatcagaaataactaatatctgttttctttccttttagagtataatcaattatggataggccagaatatttttggcttcaaaacaaaaggattcataagcttaaaaaaacaaaaatcccaaaccttccatctatcccttttattacgttgaacattttagatagtaagattaagatgtatcattagtatatggtgaaattaaaaccgtggtgtctaacagatttaacaaaaagtgtttaatttactgcaagttcatttttagatctgtatggtgcccagtactccacaaaatgcatcataattgaaacaacaaaattattttcatgagcaagaattcaagtatcaaggcctatcagccaattaaaagccgtaagatagtaatgattttttttctttttttttttttttctttttttagatggagtctcactctgtcgcccaggctggtatgcagtggcgcgatctcagctcactgcaacctgtctcctgggttcaagcagttctcctgcctcagcctcctgagtagctgggatgacaggcgtgcaccaccatacccagctaatttttgtatttttagtagagatggggtttcaccatgtttgccaggctggtctcgaactcctgacctcaggtgatctgcttgcctcggcttcgcaacattctgggattacagacgtgagccaccgcgcccaaccagtaacgatttttttaaagggcctttcttaattgacagttttaagctgtagacattaatattataacaaacaaaacatgccagttttactgattccgctttttgcttgattcaggaacttttcattgtttggggaagcttttgaatgcagtactgtggaggaaatcatccttaaaatagcatttcacacatagggccaaaattgaaattgtcaaggaaacccctcagcatctaacgtcatcttgtagaagagctgggcatacctcttcctctaggccaattcagaggccactggccacccaagtagagtggggcccactggcatgagtagtccctgtgcccatgcccatggtggtgcttgactttgctttggggcttaatcctagtatcatttggccattaatttttaattaagtttatacttgaataatcagttttactcctgaaaaattttgaagccagcactgactttgtttatattcacttaccttgtatatgaacttatgacattagagtttgtgaaactgtcttaacgtggctcatacacgtgatgtcagagggactggtcagttctttacagggtgaattaatcggcagctggctagtcagagcaactgatgggtggcttttttttctttttttttttgagacggagtctcgctctgtcacccaggctggagtgtaagggcgcgatctcggctcactgcaacctccgcctcccaggttcaagcaattctcctgcctcagccacctgaatagctaggattacaggcgcccgcccccacacccggctaatattttttgtatttttagtagagacagggtttcaccgtgttgatcaggctggtctcgaactcctgacctcacgatccgcccgcctcggcctcccaaagtgctgggattacaggcgtgagtggtggccctatttttaaaccattcgttacgctgtgtagacagagctttattgccctggaaaagattttttttttaactctcatgcagttcagtctttccatcatttcactttgtgagtcactcacataattgtcaatcattcctctgaccttcttaagaatttacaccttaccgtctctgtgattgaagcagacttctcgctttatttcccttaggctcatttttctgtgggctctcccttaaagacacatggccacagacacctccttcgcatatgtaatctgccttcccctgcggccttccgtggtcacagcaacagggactgctcaccccctccagctggggcttttctaacaagcacagtcagaaatgcgcaggcctggggttggggatgaacagaagttgattagtgggcacagaaatacagttagatagaaggaatagttccagcattcgatattacagtagggagactgcatttaacaataattgattgtatatttgaaaacagctagaagaataagaatattcccaacacaaagaaaagataagcgaggtgaaggaaatcccagttaccctcattcagtccattacacattcgatacaggtatcaaaatatcataggcacctcaaagacatgtacaactcttaatttaacatttttgaaagaaaaaaaaaccggccagagcattaaaacaaataaaataagaaacacagaggccagtgttaggtgaagaactccgctgcttcagaaagagaatagcagcgctcgcttaccgtgggaacacggccagttaacaaaatgggttttggttttttgttttgttttgttttaccattggtaataagatagttaacataagtggtcagaacttcgctgaatttgtaataaagcatttgttaagcgtgtaaaagtccaaattaaaagtcttgaagaaaaacagctatggcaatgagcctagacatttttcaaaaaaaaaagctaagccgtcctaccagcaatctctctttctcctaagaatgtcatgccttctcaagacctgatgaaaggaataagatatttgtgcctttttataaaagcatctattacgaaagtaaaattcagttgcttacagttttggccgctttgtagcactattataaacagcccaaatttatggccttggacttactgcatgacacatggcctggttacctgtcatggaatgctgcagtggtggtttgccaagcttctgtggatgtttgaagactttatttttgcagtcttaaccttgggctggacctaagtgtatgtaaaccatatgatgcctgtattgtttatagatgctgacaaaagaaaactagaccttttgttttttgttgtaagatttttgttttcatgcctatgctcatagtagatagtttgcaaatgaaagttgatttgccatacttttaaataatattgttttagcttgaatattctataatacacttttatagagtataacatgctaaatcactgttttgttgtaagaagggtgtaaacattttgttaataaaatgctatgtttacaaatataaaaaaaaaaaaaaaaaaaaaaaaaaaaaaaaaaaaaaaaaaaaaaaaaaaa

SEQ ID NO: 870 - DNA, 5938 bp, Homo sapiens
ccgcgccccccgccccggcccggcccggcccggccgcagccccgctgggcgccgcagagatgacggatcctttctgcgttggaggccgtcggctcccggggtccagcaagagtggtcccgggaaggatggcagccgaaaggaggtccgacttccaatgctgcatgacccaccgaagatggggatgccggtggtccgtggtggacagacagtgcccggccaggcccctctctgctttgacccgggaagtccagccagtgacaagacagaagggaagaaaaaggggcggccaaaagccgagaaccaggccctccgagacattcctctctccctgatgaacgactggaaggatgagttcaaggcacactcgagggtgaagtgtccaaactcagggtgctggctggagttccccagcatctacgggctcaagtaccattaccagcggtgccaagggggtgccatctcagatcgcctggccttcccctgccccttctgcgaggccgcattcacctctaagacccagctggagaaacaccggatctggaaccacatggaccgacccctgcctgcctccaagcctgggcccatcagcaggccggtcaccatcagccggcctgttggggtcagcaagcccatcggagtgagcaaacctgtcactattggcaaacctgtgggtgtcagcaaacccattggcatcagcaagccagtctcggtcggcagacccatgccagtcaccaaggccatcccggtcactaggcccgtgccagtcaccaaacctgtcacagtcagcaggcccatgcccgtcaccaaggccatgccggtcaccaaacccatcacagtcaccaagtctgtgccggtcaccaaacccgtacctgtcaccaaacccattacggtaacaaagcttgtgacagttacgaaacccgtgccggtcaccaagccagtgacagtcagcaggcccattgtggtcagcaagccggtgacagtcagcaggcccattgctatcagcagacacacaccgccctgcaaaatggtgctgctgaccaggtcggagaacaaagcacctcgtgccacagggaggaacagtggtaagaaaagggctgcggacagcctggacacctgcccaattccacccaagcaggccaggccagagaatggggagtacggcccctcctccatgggccagagctcggccttccagctgagtgcagacaccagcagtggctccttgtcgccaggcagcaggccgtcagggggcatggaggcactgaaggctgcaggccctgcgtccccgcctgaggaggacccggagcgcacaaagcacagaaggaaacagaaaacacccaaaaagtttacaggggagcagccatccatctcagggacctttgggctcaaaggcctggtcaaagctgaggacaaggcccgagttcaccgctccaagaagcaggaggggccaggccctgaggacgcccggaagaaggtgccagctgcccccatcactgtcagcaaggaggcaccggcccctgtggcccacccagctccaggtggccctgaagagcagtggcagagggccatccatgagcgcggggaagccgtctgccccacctgcaacgtggtcacccggaagactctcgtggggcttaagaagcacatggaggtgtgtcagaagcttcaggatgcactcaagtgccagcactgccggaagcagttcaagtccaaagccggcctcaactaccacactatggccgagcacagtgccaagccctctgacgccgaggcctccgaagggggcgagcaggaggagcgcgagaggctgcgcaaggtgctgaagcagatgggacggctgcgctgcccccaggagggttgcggggctgccttctccagcctcatgggctaccagtaccaccagcggcgctgcgggaagccgccctgcgaggtggacagcccctccttcccctgcacccactgtggcaagacgtaccgatccaaggctggccacgactaccacgtgcgctcggagcacacggcccccccccctgaggagcccacagacaagtcccctgaggctgaggacccgctgggtgtggagcggaccccaagcgggcgtgtccgccgcacgtcggcccaggtggcggtgttccacctgcaggagatagcggaggacgagctggcccgcgactggaccaagcggcgcatgaaggatgaccttgtgcccgagaccgcacggctcaactacactcgaccagggctccccacgctgaacccccagctgctagaggcatggaagaatgaagtgaaggagaaaggccacgtcaactgtcccaacgactgctgtgaagccatctactccagcgtgtccggactcaaggctcatctcgccagctgcagtaagggggcccacctggcagggaagtaccgctgtctgctgtgtccgaaggagttcagttctgagagtggcgtcaaataccacatcctgaagacccacgcagagaactggttccgaacatcagcagacccacctcccaaacacaggagccaggactcattggtgcccaagaaggaaaagaagaaaaatctggcaggtggaaagaagcggggccgaaagcccaaggagcggaccccagaggagcctgtggccaagctgcccccgcgccgggacgactggcctccaggatgcagagacaagggggcccggggctccaccggccggaaggtgggagtcagcaaggcgcctgaaaagtgagcatggtgcgtggggcctggcccccatgcagccgccacaccgccctctgttcaaggcagggccagctccgggacctctgtcctccagttctccatcccccacccccgcctcttcatccgtccagtggggcagccagccactctcccttccctgaaggtggcccttcccctgttaaggctgccacagggcacacctgggttggggctccccaaggtgtgcccagcagaagtgcaatagccaggagggttgcccctcctcatgggaatgtgtctggggtcttggtgccacaggggctgcagcgcagagtaggcagatggcctttggccccccggctccgcttcctcaggccctgccgggtcccttccctggctaccccaaggctcaggcatccctggtgacctgtggttctgggctggtgagggcacctgagcaacctggcacgggcagccaccatcctggcctcacctccacccaacactggaactccagcacccccagctacctcccaggacagacccctgtctgaccactgccatgctgacctgacaggctccggcctgcccttggccacccacttggtccccttgcttctgttttctacctctccaggcctgcccactacccccacccctgctcctcctttgtcagtgcgatccctgctgtgctcaggccctgccccccaggcctgtctgtaattctcccagcttggggcaagggaggggttttgcttcttgtacctacagggcagcagaagcttgatgcccttcaacacagctgccagccctgggggtgtggggcccctggagtgtgctctcctccagtgttcagccttctggcactgcaggcctaggttggagcagcctcgtggagtagggacggactagttcgggccctggggtcttgctggggcccataggcatgtggggcaggaagctgggcagagctggcctggctctgagtggccactgggggaaaggcagccttctgtctgccaatctgggtaggcccagtggccaagctctcatgggagccccctccccacttttttttttaacctgcccccattgtttctggttgtgtggtcatttgatatgggaactgaaggccagccaggggaggggcttggccaaagtcacagcaggttgatggcagctccagagctgtctttgcccctttgtggccctgaggacggctgggtctataggtagggcaggggtcaggcagggagtccagggtgcctggaagaggtggccacagcctgtggctccctccctggggtcctgccttccaaccacggcattgcagggaggatgaggctcagagggggtaggtttggagggaggccattttccagggtgggtgggagtgggctgagggctcggccccactgaccctggacgatgagaattttgatgtttgcccgtgtgcgtgtgtctcctgggtgtagtggatgccagtcttgttgctgtgacaagtaacaaccttttttttaaattgttttttatacaaacactcgcaatccgacatttggtgctaagggtttcctggtgcagacggtgggcctgggggctgggctggaccagggcgtgggtctctggggttggggtcccttgctgctcagggaggcagtactgactgggcactgcctctgcccccagcacccaccctcccccattccccagggagaaggggccccactgggcttggcctgcagtagtagggagacaagttccaggagcactttggggactggggttgcagaacacttcctgtctctggcttcatccttgggccagaaggctccaaccctcagcagcccttgccagatgtgccagggagtgggtgtggagacccggactccccccacccacgcacacctcggcctgatgagaggatggaggctggggcagagatgggcgtgacccagcgtcagagggtcgggggaggcattccttcctgtgtcccagagcttcactggtggagctggaggagccggaggtggagggtggggtctggcagctgctgctggggcagcctcatgaggggaggggaggggaggggaggggagcaggcactgggcgggggcctaggtgcactttgtccttgccaccaatggcgggaggagggtggacctgaacacctgcagggtgtggtgcctgccccagcctctcaggtacttggcccttggggagaagagaagagggtctggtttttgctgggggtgagtttccgggacactcccaaagcccacagataatccctggtgtgggaagaggagtcctggataccttgatgtttagcactttaaccccctttgtctttaaggtaggcgtgggggctactgccagaagtggctgttgggtctgaccccctcctttctgccctccctctgccacatgctggtccgcagagccctcctcccaaggggtggggccctgggtggagctcagcagggtctgcccactccctacgctggcccacataggcctccaggagccctcagtgagagggaccagcatagctgacccccagagtgtggtgggcgccggccctgcccgaggcccagtcggggccctttctgcagatctacctctggctcagcgcacgccccctgccctgagaacaggaaagggcccggaagggctgactcaccgggccgacgctcacacgaaaatgggatgcactttatttgctggtgcaaaggcaggtgagggtgcctcctgtgtgaccgttggccctcctgcctggtggcgctgaagggaaggagccagtgagcctgaccccgggaggggccgtccccgtgtgccgcgtttggcggggccccaggcggctcccccaggcccgggtctggggccccaggctttcccctgcctcgcggccgggcgtcccgtgctttgggtttcttggtttgggttttttaatgccagttctcagtacataagtgcattttgaaagaggttccagctatcacttgtaaccatatatatatacatatatattctatctacaaagtgtttatttgcgagatgtttcaacggtgagttcgggccccgcccgccttgtgaccatctgtccccggtcctcgtccccgccccgcgccctggtcccgagtggcgtggggacgggccatcactgtatgtattaaaatgactgtatcaaataaatgtttattgatttttttccaaaaaaaaaaaaaaaaa

SEQ ID NO: 871 - DNA, 6540 bp, Homo sapiens
gcggcagcccgggactccggcgagagcgacgcaaggtcggctgcggcggcggcccgagggcgcccgtgtgcccagtgcgcggcggggacggccgcgagctcgctggagggctccccagaataatccagaagtcgattccatcatggcagaactcaaggtggaggcgccggccagcgtagactggcagaaacgctgcctgaccctggaaactcagcttttccggttccgcctacaggccagcaagataagggagctgctggctgacaagatgcaggagctggagcagaggctgctggaggcagagcagagagcagagaacgctgagacccaggtgggtgtcatggaagagaaggtaaaactatccaatctgaagaatgtggactctgaggggagcctgcaccggaaataccaagaattgctgaaagccataaagggcaaagatgagctcatcagccagctagaggctcagctggagaagcagaagcagatgagggcagaggaagcaaaaactgttcaagaaaaagctgcaaagatcaaggaatgggtgacactcaagttggcaaagcttgagatggagaatcagcatctgaaaagccataatcagcgcctggtggagcaggtgggatcccttcaagatgcgctagaagctattcagatagctccttcacggaagctgctggtgcccccctacggagctgcagagcaggattctgtcccttcagagccgggaatccagcctatgggccaggacagtggctcccaggcccagggtctgaaggcagctgtgcttgcaccttccccaggtgccctgcagagcaaggactctgtttctgaagcagcaagccccttggaggattctagttccagcacggtccattctggggaaacagtagaggccaagccccttcaacctcatctgggaagagagagccctccccaccagccatgcatgaagcttcttaccttcagatgtagttcagcttcctggggtgagggtctggttactgctcagagagggatgctccctgggacaaagacctctgccagggaaggtggtcctggcagcagtctgaccctaccaaaggtgcgggctcctggcaccccgcgggacagcatccagttggccaaaaggcaccacagccagccccaggtgggccatgggcactttggccgtgtggtgaacattgagactgaggccttctcagccctccacccctctggccttcctgagctggagtcccgagctaggtcccgggaggaaccagagaagatggagatggaggagccacccccagcagggaagaatgaggaaagagagagcccaaaggcccttggagctgagctggaggaagtggagctgggtaacaagccacctacacccccgctgcaccagttttcatcctgggagagccggatctatgctgtggccacatcgggcatgcggctctcagatatgtctcccagaagtaatactgcatgctgcgcttcaagccctcctgcccttgtttcccctgggtctttctctggcctggtctacaagaatgtcactgtgcctgtctacacagcactgaaggggagagctacacagatcagcaacatgccctttatggacgagtcctctgggtctgacgatgactgcagctctcaggcgagtttccgaatctcggtcccctcctctgagtccaggaagaccagcggactaggcagcccccgggccatcaagagaggcgtctccatgtcctcactgagctccgagggtgactacgccatccccccggacgcctgctcactggacagtgactactcagagcctgagcacaaactgcagcgcacctcatcctactccaccgacgggctgggcctgggcggggagtcactggagaagtcgggctacctgctgaaaatggggagccaggtgaagacgtggaagaggcgctggtttgtcctgagacagggacagattatgtactacaagtccccgagtgatgtcatccggaaacctcaaggccaagtggatctgaactcccgctgccaaattgttcgaggggagggttcacagacgtttcagctcatctctgagaagaaaacctactacctgacggccgattcacccagcctgctggaggagtggatccgagtactccagagcctgctgaaggtgcaggccaccgggcctccagctctgcttcggggtggcaccaagcccaccgtgaagggctggctgaccaaggtaaagcatggccactccaaggtggtctggtgcgctcttgttgggaaaatcttctactactatcggagccatgaggacaagcgacccctgggctgcctgcctgtgcgggatgcgcacatagaggaagtagatcgatcctgtgactcagacgaggactatgaggctggaggaaccagacggttgctttcctcccactgcaccctggtgatccaccccacagagcacagccccacctacctcctcattggcaccaagcatgaaaaggatacgtggctctaccacctcacagtggctgcaggtggcagcagtgccaaggtgggcactgcctatgagcagctcattggaaaactgatggatggtgaaggagatccagattcgccgctctggaggcaccccatgctgtgctacagcaaagacggcctatacgcctccctcaccaccctgccctctgaggccttgcagacggaggccctcaagctcttcaagtcctgccagctcttcatcaacgtgccggtggaagctgcctcggtggactaccatgtgtccctggcccagaccgcactgcaggtctgcctggttcaccccgagctgcagagtgagatctactgccaactcatgaagcagaccagctgccgcccacctcagaagtactccctcatgcagtgctggcagctcctcgctctgtgtgctccacttttcctgcctcagcatcacttcctctggtatgtcaagcagcagctccaacgccatgcagatcccagaagtgaaactggccagtatgccacctactgccagcgggcagtggagcggaccctgcggaccggggagcgggaagccaggccatcgcgcatggaagtggtgtccatcctgctgcgtaaccccttccaccactccttgcccttcagcatccccgtgcactttaccaacgggacttaccatgtggttggttttgacggctcttccacggttgatgagttcctccagcggctgaaccaggagataggcatgagaaagccatcccactctggctttgccctcttcacggacgatccctcgggcagggacctggagcactgcctgcagggaagtgtcaagatctgtgatgccatctccaagtgggaacaagccatgaaggagctgcaccccggaaagtctgagggtgggacacgcgtcgtgaagctgatgtacaagaacaggctgtactttcgcagtcaagtcaaaggggagacggaccgagaacggctgctccttgcctctcaaaccagtagagagatagtggcagggaggtttcctatcaacaaggaattggctcttgagatggctgccctgatggcccaggtagaatatggggacttggagaagcctgccctgccaggccctggaggcacatcccctgccaaggctcagcatcttctccagcaggtcctagacaggttccaccccaggcgctatagacatggggcccccgctgaacagctgaggcacctggcagatatgttgaccacaaaatgggcaacattgcaaggatgctcccctcctgagtgcatccgcatctacctgaccgtggccaggaaatggcctttctttggtgctaaactttttgctgctcagcctgcccagctgtcttccaaggagaacgctctggtgtggattgctgtgaatgaggatggcgtcagcatcctggaccacaacactatgcaagtgcacatcacttacccctactcttcagtgacaacgtttggtggctgcagggatgacttcatgcttgtgattagatctatcccagacaagagctctggaaaaagccacattgagaagttgatcttccggatggctgctcccaagattgcagaagctaccttcatcatggccagctatatgaaccattgcactacaactgtgaacccccccaccaacccacccggagcctgccagctgtgggaactggatggacgacagttcttttcttctgtttcctgtgctaccaaggggccaacgttgctgtgaatatttctcctacccgattccccaacaccactagtgcctctggatttagagatatatatcctagggtatgatactactgtgacgggtctaacagcccccggctactcttgttctgtgaaatgtgtattttagtctctgtgaagcctttactctctaggtgccttataatgtttcagggctcaactttttaaaatccagacccagtgttaaaaccatttattccttttttcataagaataatgactccagatgctacctgattctagacatagacagggatgatccactgttactgagggcatcagtgctataagttaaggctttctgcactggtactctcaaggaagctaattttctttctggggggggcgggggacacagtgtcactatgtcacccagtccacagggttcaagcaattctcctgcctcagccttcggagtggctgggattacaggtgtgcgccaccatgcccggctaatttttgtatttttagtagagacggggtttcaccatgttggccaggctggtctcgaactcctgacctcaggtgatctgcccactttggcctcccaaagtgctgggattacaggcatgagccatcgcccagcccagaagctaattttttaatattgtatatggtcttatttatacttgaagttttgtgaacgtcgctaaacaggataggactaaaatttccaattctcctacactctgtcagaagcctagaactcactaaactgggctgcctttcccaaatgggaaaggtgctgacagagttggagaaaaaagaatagactcatttttccccattattggtatgtaggcattggtacagccccttctggggcagtctttgcaggataacatgctatacctgctaagattcaagctgttttcctcacactggactttaggccaaacccagtaccacgcaatgtgcaagcaagggcaggaggtaggtccaatctgacccctccctgtctcattttaatgactggacagcgctcggtgaaggctgtgttcactgtagtgggccatcatttgtttccttcttcttgtaaaagaccaagcaaatgcactctgctttttgctgctgtaagaccaccaaaaatgagtcagaaacacagaagactatttcaggcatgtgggcctggatatgctccttgagacttctggcaaacttctgctgggaattagtttgagggtgagggtacatatgtgacatttgccctagcctaagagtagcaggtaaaaaaaagtttctttcatcttttgccttactgataataccataatccccctcaattcagaccttctgattgagtgcagaggagactagacagtctcctctagacaggttgtagacacaccctcccctaacaaaaacaaaacgaaagagttcatactctgattttccaacatctaggaaactgagttttatttcctagctctaaggcagccttactatatgtcagtaaagtgctgaaaactgtatatttagcagtagcacccaaaaccaagcctttaaccccaacaatgtgtgtatcttttgcacagcaaaaactgcgaggccagaactagtttatctgaacacctcagctgctgtaagcttctcctctctcaccccgtaaactgacaagcatgatgaaaaaagaagcacatccaagtttctgcctcttttaaatgtacttgactttgcaaggcaagtagttttacagccatttctgttcacacttttcaccccacaacttggggatctagctgagacatttctacctcgaacaagtcacatgtaccacaggttcctgaataattcctgcagggctggtgacagacataacagctctggttttataatatcttgggtatctctaaggccaataaggataacattatctacccagagagtttagaagaaaagtaggagtccaaaggaagagtaaacaagaatggagctgtgttcacactgaatttggggtcaatctatttcccccaccctctctcctccccaacccttcaggaaccctttagtttattaatcttatacagaagaaactaacttagaaacaaaggattcaatatttgcttatttattctttgttaacatgagagtcccatgtctgaaaaccaaagtccaatttctgtctggccttttgtctcatccttcttggcaaaagtagcttttgaactgatataaaaaaaaatgctgagtaacagaaaagtattaatgtgcttgacaccatgactgaaatactatgatcttgtttgtcaataaaaagcagctatctgtgaaccaggtaac

SEQ ID NO: 872 - DNA, 8672 bp, Homo sapiens
ggggctggtaggcgccggcgtggagctgccgcacgtgggagggcgctggccaggcagccactgtggcctctgcggctaggccggctcgagactcccgggcgcccaggcgctgccgcccgcctcgccgccccacgccgaaggaccacgcgcccgccgccgccagcctctcagcgctcccatgatcgcccggtgccttttggctgtgcgaagcctccgcagagttggtggttccaggattttactcagaatgacgttaggaagagaagtgatgtctcctcttcaggcaatgtcttcctatactgtggctggcagaaatgttttaagatgggatctttcaccagagcaaattaaaacaagaactgaggagctcattgtgcagaccaaacaggtgtacgatgctgttggaatgctcggtattgaggaagtaacttacgagaactgtctgcaggcactggcagatgtagaagtaaagtatatagtggaaaggaccatgctagactttccccagcatgtatcctctgacaaagaagtacgagcagcaagtacagaagcagacaaaagactttctcgttttgatattgagatgagcatgagaggagatatatttgagagaattgttcatttacaggaaacctgtgatctggggaagataaaacctgaggccagacgatacttggaaaagtcaattaaaatggggaaaagaaatgggctccatcttcctgaacaagtacagaatgaaatcaaatcaatgaagaaaagaatgagtgagctatgtattgattttaacaaaaacctcaatgaggatgataccttccttgtattttccaaggctgaacttggtgctcttcctgatgatttcattgacagtttagaaaagacagatgatgacaagtataaaattaccttaaaatatccacactatttccctgtcatgaagaaatgttgtatccctgaaaccagaagaaggatggaaatggcttttaatacaaggtgcaaagaggaaaacaccataattttgcagcagctactcccactgcgaaccaaggtggccaaactactcggttatagcacacatgctgacttcgtccttgaaatgaacactgcaaagagcacaagccgcgtaacagcctttctagatgatttaagccagaagttaaaacccttgggtgaagcagaacgagagtttattttgaatttgaagaaaaaggaatgcaaagacaggggttttgaatatgatgggaaaatcaatgcctgggatctatattactacatgactcagacagaggaactcaagtattccatagaccaagagttcctcaaggaatacttcccaattgaggtggtcactgaaggcttgctgaacacctaccaggagttgttgggactttcatttgaacaaatgacagatgctcatgtttggaacaagagtgttacactttatactgtgaaggataaagctacaggagaagtattgggacagttctatttggacctctatccaagggaaggaaaatacaatcatgcggcctgcttcggtctccagcctggctgccttctgcctgatggaagccggatgatggcagtggctgccctcgtggtgaacttctcacagccagtggcaggtcgtccctctctcctgagacacgacgaggtgaggacttactttcatgagtttggtcacgtgatgcatcagatttgtgcacagactgattttgcacgatttagcggaacaaatgtggaaactgactttgtagaggtgccatcgcaaatgcttgaaaattgggtgtgggacgtcgattccctccgaagattgtcaaaacattataaagatggaagccctattgcagacgatctgcttgaaaaacttgttgcttctaggctggtcaacacaggtcttctgaccctgcgccagattgttttgagcaaagttgatcagtctcttcataccaacacatcgctggatgctgcaagtgaatatgccaaatactgctcagaaatattaggagttgcagctactccaggcacaaatatgccagctacctttggacatttggcagggggatacgatggccaatattatggatatctttggagtgaagtattttccatggatatgttttacagctgttttaaaaaagaagggataatgaatccagaggttggaatgaaatacagaaacctaatcctgaaacctgggggatctctggacggcatggacatgctccacaatttcttgaaacgtgagccaaaccaaaaagcgttcctaatgagtagaggcctgcatgctccgtgaactggggatctttggtagccgtccatgtctggaggacaagtcgacatcaccatgtgttactggcctggaaactgaagggagttttgcaagtgaaaatttagatttctattgacatccttttgttttctaattttaaaaattataaagatgtaaatggaattataaatactgtgacctaagaaaagacccactagaaagtaattgtactataaaatttcataaaactggatttgatttctttttatgaaagtttcatatgaatgtaacttgattttttactattataatctagataatatgatataagagggctaagaatttttaaattgaatcatatatatgatataatttgatccttcttgtatcttgaagttttgtacttgggatttctggactgataaatgaatcatcacattcttctggtaaatattttcttggagctctgtgtcaactttgatcctttgtctcccaggaaggtgtgacctctcctttgcctgcatacctcaaggccaggggaatatgcctcagtgatgcatttatctttgtatatcaggccgcatgattcccaactttctgccacacttaaattacgttcctccatttcagttttgtcttttctgtctaaagttcagtcaaagagtatcaaaaaattatgtttcagctagactggtgtaatgtataagtttttgtatcttgtattagaggatttcgtagcttttattagaggctcatttccacctcagcatacaagatcgttagtcttttggcatgtgtgccaattagaatactaaagcaagtccaagcacatttttctcttctcacgtttctaataagtgttagggactttgcctcttttacttaccacgtccccaaaagtgtcaggtagacatgtcacaaatggctctgtagagagccatgggaagagagaggaggtggatgtggaacataaagggttcagaaactccagaagaggagtgggttttggatagaagcatttgaggacagctgctccaaagccttatgtgtatgatgaaacttaaccacggggaagagactcttcagtagcctgttctgtctggtgatttttattttaagtgaacctttggatctatctttaactctctttattgtgagtctaaattccaattctgcagcagatcagtaaactcacagtatttttcctgtggaaatctattcaataaggaaaccaagacaggataataaaatttaaaaaaaaaacaactttgaattcccctgcctaggtcttccagttgttttccagcgcatacctcaggtatgactttgctagccggggacaaaattagcaccttccgattctctagtccaaatgaactttgtgctaaataaaaaattattatactacataataaagttacagatagcaggaaatgcaagagctaggagattcctagattatatctgccaagcaaataccttaaacatccacctgaaatcctactaccccctcttctgagataatttgcccagcccttctcttcccacacactcactcaatgtcacccccttctaatccccaaaactgtttttgtggtctttgtagcctatagtagttttctcacatctttccccctagacttttctgtttttcagtttcagacaaaaaaactcttcagctttttccagtgtgtctccttaacagtaactttaccacttgaaatcttatttcatagaaaaactaaattggtgtggaaaggctgcacacaataaagttatattattatccatgaaaatgaactcatatttctttcatactttaacgttaaaaccgaaatgcatgagagcaaaagcaccatggtgttctttctatttagggcctacctctaatatttaaaatctaccaaagagcagtcacaaaattaaaactcagcccgggcgcagtggctcatgcctgtaatcccagcactttgggaggccaaggcaggaggatcacctgaggtcagagttcaagaccagcatggtcaacatggtgaaaccctgtctctacaaaaatacaaaaagctgggcatgatgttgggttcctgtagtcccagctacttaggaggctgaggcaggagaatagcttgaacccgggaggtggaggttgcagtgagctgagatcatgccattgcactccagcctggacgacagagtgagattcagtctcaaaaaaaattaatactcaaagaattatctagcataatttaaaagaaaggactttttaaaaattctctagcataattcaaaagaaaggacttaacttttttttttttagtgtggtcatccgtctagttgttctttttttccagatcagagcagagaatatcactgacatgcttgaaatggtggataactatgtaaattgtaattggacaaatgtacactttagatttatggactgagccacatataataaggtctctcctggtaattgatccaggggatttaggcctctttcgggttttttgttttttttttaggcattgttatgttgtgaaggataaaatcttcaacatcttatgcaaatggatagtaggcatgatcctaaaggtttagttttacgatgctgcagagaagagaaatgtcttgacgttttgccacctgatgtagactttgtccccctctagtataaatgttgcatgttacctagataaacaactaaaaattgccttgagttatcacctgagctacttatgccaaggtcttgcctttctaaagctaataaggtgagaggtggatatctgtagctcttcggatgaaaaattgcattgtgggagataccaaaattgaggaaatagctcttcaaagaaaaattactgatatgatcattgtacttgtaaatgccttaagtagcaggcagtgactcaattttctactttaccattttacctttagcttttatgtatgaattataggtctgtggagattctgcctccccactaggccagtgtgtgtttaccatttattcattttctatcatacacaggtggattaaaatttacattaaaatttacattaaaataccatcatacttcaggcttctataacaaaatatcagactgggtggcttcaaaagcagacatttcttacagttctggaagctgggaagtcccacaatccacatgctggtaaatttggttcgtggtgaggcccctcttcctcttttactgaccacatccccaaaagtgtcaggtagacatgttacaaatagctctgtagagagccatgggaagagacaggaggcagatgtggaacataaagggtttagaaacttctgcaggcagcagtggcagggagcaagccctagagtgtctctttttacgagagcaggaatcccatcatgagagttccttcctcatgactttatctaaacccagtcacccccaacaaaggccccaccccctaaccccatcacattggctgttacggcttcaatgtaggggatggggcacaaacattcagtccataacgaatactgattcctcaaatagggtttaaacatagttaactgagcccccaaagaatgttaaaagagaaaatccattttatttgaatagatgcagtgaccacagcttcttccctcaaatcaacacattacagttagatgtctcccatctgaaattggatagcccactgaaattgaacatgccttctcttataaatgtgtggtgagaataaaagcaacaaagaaatgaatgtggtggctcacacctgtaatcctaacactttggaaggttgaggcaggaggatcctttgtgctcaagagtttgagaccagcctgagcaacacagtgagaccctgtctctacaaaaactaaaaaaattagctagggatggtggcacatgcctgtagtcccagctacttgggaggctgaggtgggaggattgcttgagcccaagaaggtcaaggctgccatgagccataatcacgccactgcactccagcctgggtgacagagaccctgtcttaaaataaaataaaaaaaaaaggaaaaggaaagacatacataccctcagttcttcgaaaaacagtcaacgtccaaaaagtttattttttgagtcacctttaatagagaaatttcccactggaaacagatccacctaagtgattatctagtatcagctgtatcaaggcaaaaggtaaaggttataagatgtaaatattagaccaaaatagccttttttaacaaacacaataatgctgtacgtctgtaacaaaacaaaatttgaaaaattgaggtaatgtacacagcgatgcacacacccccacaccacaccgtgattcctgagttttgatttggttgaattcaccttgtagttccctttcctgagaaaatacaggttcaacacatctagtccacgatgtacgtacaaggggaaggggtgaacaggaaatagactcccttattctgctcacatgagctggaacctgtactagctgcatatttcatagaccccagaggctcacctcaattgtactcctatgataaaatgtctctagcatttgtcatgagagaaactggctagaaatagtttgttcattgcgtccagcaagacacgcattgctgttgatatctttgtggctaagatggagaatgtgactggataatagttatccaggtggattactagctattgaaacagtctgagatagttgcatgatgattaacgttaaactgggagtaatttcaagtcatttggctaaaaatgaaaaaaaagtcccataaaaaggtatcaaatgtacagataatagggctggaattattaagtatgatgatgttattaacatctaaaattattttggccgggcaaggtgggtcacgcctgtaatctcagcactttgggatgccaagatgggtggatcacctgagttcaggagttcaagaccagcttggccaacatggcgaaacccgtctctactaaagaatacaaaaattagccaggtgttgtggcacatgcctgtactcccagctactcaggaggctgaggcagaagaatcatttgaaccccggaggtggaggttgcagtgagccgacattgtgccgcttcattccagcctgggcaacagagtgaaactcttgtctcaaaagtaaaaaaataataatgtttaaaaatatttcaatgtggagacaagctcaaaatgaaattagacacattccattacccaggtaaaagaaggggaagcctgacttgatagtagtattcaggaaaaaagagttggcagttttatttggccaaattccaatatcagctcatggtacagcacaccgggggagggggacgggaggcgagaactaaggctttttaagaatgtgttgatggaagtatgtgcctagatcaaaagaataatccccccggactccagtgtaagatcaattactgttggaatattgtgttcctttctagatatcacattttaagcagactttggccaagtagtacagtgtttgcaggagcagtaacaagatggtgataactttgaaaatacttctcaaaagaaaaataaaaaagaattagggaagttcagtctggagataattcagaaatacagatgataattgttttcaaattcttgaaggaaatgggagagagaataggctaattctgtattgcttcagaaaccaaatggaaacaattaaattccattagagaaacggttggaaaatatgaggaggatttagttcagtacgaggaagctgtttctaatactttttgttggttaaaaatacattccgctgctgtggaaagcctgtagctgccaggagtgttacagagggcattcctcccttgagttgacatttgtgccaaaccggcttttagggcttctccagcttttaagatgcgataatgataagatgatcatcgggaaaacatccctcagatgaaacgttcacaggctggctctgaaaactggcattcagatgattgcggctcccccatactgtaggaatattgtttatggcttaaggttgcctcgctcctcatctgtaatcagtgaaagtttatccagaggttaattaccggttttctggtgggtatctgggaactgaggatgggagattaactgttgtatatgaccatagtaaagcaaaagactgttagagaatgagtaaacgttcgttttcctccctacagaatttacagttactctctgtccattccactcactactgtcttcatcacacacacagaggcaaacgtctgattcagatagccaggtgtgccatgcatgcactccaccatattgtgatctcttcgaggcttgtttctgtcccctgtcctccacagtcctggattgttaatgaatagttcatacatgtttgttaaataaatataccttctttaaaattaaaaaaaaaaaa

SEQ ID NO: 873 - DNA, 5881 bp, Homo sapiens
ctctgcctttcctctcgcagccacccttcctctcagaccagtacggtggccgacgggagtcagacgctggggatgaatgaaggatcaacaaacagtaataatgactgaatgtacaagtcttcagtttgtcagcccttttgcttttgaggcaatgcagaaggtggatgttgtttgcctggcatctttaagtgatccagaattaagacttcttctgccctgtttggtacggatggcactttgtgcacctgctgaccagagccaaagctgggctcaggataagaaactcatccttcgccttctttctggagtggaagctgtcaactccattgttgcattgttgtccgtggactttcatgctttagaacaagatgccagcaaagaacagcagcttaggcataaacttggaggaggcagtggagagagcatcctggtatcacagcttcagcatggactgacgttagagtttgaacacagtgattcacctcgtcgattgcgtcttgtgcttagtgaactgttggcaattatgaacaaggtgtctgagtccaacggagaattttttttcaagtcttctgaactttttgagagtccagtatatttggaggaagctgcagatgtactttgtattttacaagcagagctcccttccttgctccctatagttgatgtagctgaagctttgctacatgttagaaatggtgcctggttcttgtgtctcttggtggccaatgttcctgatagttttaatgaagtttgtaggggcctgataaaaaatggagaacgacaagatgaagaaagtcttggaggaaggcgcaggacagatgccttacgcttcttgtgtaaaatgaatccttctcaggccctcaaggtccgaggcatggtggtggaagaatgtcacttgccaggccttggtgtggctttgacattggatcatactaaaaatgaagcttgtgaggatggagtgagtgacttggtttgttttgtaagtggtttgcttcttggaacaaatgcgaaagtccggacttggtttggaacttttatccgaaatggacagcagagaaaaagagagaccagcagttctgtcctttggcagatgagaaggcagcttcttctggagttgatgggcattcttcccacagtaagaagcacccgaattgtggaagaagctgatgtggatatggagcccaatgtgtctgtgtattcggggctgaaagaagagcatgttgtgaaagccagtgcactcttacgtctgtactgtgctttgatggggatcgctggactcaaaccaactgaagaagaagctgagcaattactgcagttgatgacgagccgtcctcctgctacgccagctggggttcgctttgtttcactttccttttgtatgctactggccttttctacacttgtcagtacacctgaacaggagcagctgatggtggtgtggctaagttggatgataaaagaagaagcgtattttgagagtacttcaggcgtctctgcttcttttggggagatgttattattggtggctatgtactttcacagcaaccagcttagtgctatcattgacttggtctgttccactttggggatgaagattgtaattaagccaagctccttgagcaggatgaagacaatcttcacacaggaaatttttactgagcaggttgtcacagctcatgcagttcgggtccctgtcaccagcaacctgagtgccaacattactggatttttgcctattcattgtatttaccagcttctcaggagccgttcctttaccaagcacaaagtgtcaataaaagattggatttatagacagctgtgtgaaacctctactccacttcatcctcaattacttcctttgattgatgtgtacataaattctatacttactcctgcgtcgaaatctaatccagaagccacaaatcagccagtcacagaacaggagatactcaatattttccaaggagtcattgggggtgacaacatccgccttaatcagcgtttcagtatcacagcacagcttttggtgctctactatatactgtcttatgaagaggctcttctagcaaacacgaagactttagctgccatgcaaagaaagcccaaatcatattcttcttctttaatggatcagattcctatcaaattccttattcgacaggctcaagggctgcagcaggagttgggagggttgcattcagctttactacgtctccttgctactaactacccacatttatgtattgtggatgactggatttgtgaagaagaaatcacagggactgatgccctgctacggcgaatgctcctgactaataatgctaaaaatcattctcccaaacaactccaagaagcattttcagctgtcccagtaaatcacacacaagtgatgcagattatagaacacttgactctactctctgccagtgaacttataccatatgcggaagtgttaacatccaatatgagccagctattgaattcaggggttccacggagaattctgcaaacagtcaataaactatggatggttcttaatactgtgatgcctagaaggctatgggtaatgacggttaatgcacttcagccttcaataaagtttgtacgacaacaaaagtatactcagaatgacctgatgatagatcctctcattgtcctaaggtgtgatcagagggttcacagatgccccccactgatggatattaccctacacatgttgaatggatatcttcttgcatctaaagcctaccttagtgctcatctgaaggaaacagagcaagataggccttcccagaataatacaattggtttagttggacaaactgatgctccggaagttaccagggaagaattgaaaaatgcattactggccgctcaggatagtgcagctgtccagattctcttagagatttgcctacctactgaagaggagaaagcaaatggtgtcaatccagatagcttgttaagaaatgttcaaagtgttattaccaccagcgctccaaataagggaatggaggaaggagaagacaatttgctctgtaaccttcgagaagttcagtgccttatctgttgtctcttgcaccaaatgtacattgcagatcccaacattgctaagcttgttcactttcagggttatccatgtgaacttttgcctctgacggtcgcaggtattccatctatgcacatctgtctagatttcatacctgagcttattgcacagccagaacttgagaaacagatatttgctatccagttgctttctcacttgtgtatacaatatgcattaccaaagtcacttagtgtggctcgtttagctgtcaatgtcatgggaactttgttaacagttttaacacaggctaagcggtatgctttttttatgccaactctgccaagtttggtctctttttgtcgagcatttcctccattgtatgaggatattatgtctttgctgatccaaatagggcaagtttgtgcctctgatgttgccactcagacaagagacattgatccaattattacacgtcttcaacaaataaaggagaaaccaagtggatggtctcaaatctgtaaagattcatcttataaaaatggatccagggacactggaagcatggatcctgatgtacagctctgtcactgtattgaaagaacagtaattgaaataataaatatgagtgttagtggaatttaaaacaaaatttaaaacaacaaaaagttgtttgctgcatatacccaacatgaatctgcatattagtaacaactctaaactgaatgggaacagtaaagtattgtcttggaatcactaaaacaattcaattcaacatgagtatagtttagaactttatgagaattatgcttgcttgtttctgattggcacatctttggatctactttgctgatatgtttctattgtagcagctgagctttttttttttccactgggaacacatgtaagaaactcattattggaaagggaatttggccttgtatttagcttttgaagtgaagactgccatgcctttaatttcttataaaaatgagtctgtgggtagccctagtgtttattttaactgtgagcttgtaacagaatgtgacaaagatgcaaagatgggagaggaaaaaagggtaaagggaaaggagaattaaggaaataataggagttaaaaacacaagtagaaatctcaaagatttgcagtgcaagtaatagtaatgcaagttggaattctagttctcaagaaagagtattgagaagacttttaaaaaggcaagtagcttttgtaaatgatttctgtggaaatacagatgaggatttaaagatttcacatatttgcttcaatttttattaatatatgaagccatatgtttaaagagatacttgaataatttggaattttaagatactggtgtaaaagtgtttacagaaacatctttgttcaaagaagaacctgagagatctcatttagttttatgttttaaatttatttttataatgctttattaacttacctaatgctcagaggggggaaatatgtatcaaattaaatgaaggtagagcaataaaacccactggattaaagagctcttggtttgtcatcaggattataattcatatcttactttgagaagatctttgagtaagaaaatgcagtgtttgaacctgaggaaaagttaaagtgtagaaaatattgtcttgccgaaggattttgcagtcctctgtcagtaacttccattgattaggcagacatattcaggtaaaccctaatcattaaaaaaaaattatcaatgtagaaagtaattcccttttttctctctgagatatacctcaatcacacacttccccacccccacttgaaacagacctcttcacttgtgttttttttttttttttcctgaggtggagtcttcccctgttgcccaggctggagtgcagtgggatgatcttggctcactgcaacttctgccacctgggttcaagggattctcgtgcctcaacctcctgagtagctgggactgcaggcacgcgccacctgtatttttgtatttttagtaaagacgggggtttgccatgttgcccagactggttttgaactcctggcctcaggtgatctgcccaccttggcctcccaaagtgctgggattacaggtgtgagccaccgcacctggccagaccgcttcacttgtaaaagaaattaggctaataagaaggtgtagtttttgagaaatgaaatttaactttagccttttcactagtaaatagtcacatctcattttcttcctttgtaaaatggggttactactggccctacctcatattctatgagaatgagtttgtagctgtttcaaatcatgaagtgcatagtatcacatgtgatagaatatttataactttttattagatgcttaatgttcaattaagtaattttgatgtgaaaaataaaagtaataaaagtatcttaaaaatagcataagaattttcatatttttaaacaaggcagttttgtagtcccttaagattaaatacaactgctccttttttttttaaactgaggccttgcgatattttgtgtgaatagatatgccctaggagttcagaaaaagttaaaagtatgttttctaattaaatgcagtgcacattcctggatcaatattcaaagactggtcataacctgctgtgttaaaataatcacatatgctctttttcatcagatttgttgatgatgtaaataaaatgtgtaaatatattagtaaatgttaatattcatgtattttaagttaaggttataaaatttgtcacaatgtgtttttttattcaagtgaaaacagatgtgtgcagctattttgaatattggtttataaacattcatattctttatcaaacgaa

SEQ ID NO: 874 - DNA, 15584 bp, Homo sapiens
gggggcctgggatgctgccgctgagctgacccgctggacttgggttgtggcagacggatggcgaacgtgcaggtcgccgtgcgggtccggccgctcagcaagagggagaccaaagaagggggaagaattattgtggaagttgatggcaaagtggcaaaaatcaggaatttaaaggtggacaatcgaccagatggctttggggactcccgggagaaggttatggcatttggctttgattactgctactggtcagtcaacccagaggatccccagtatgcatctcaagatgtggttttccaggatttagggatggaagtactgtctggagttgccaaaggctataacatatgcctttttgcttatggacagacaggctctgggaagacatataccatgctggggaccccagcctctgttgggttgacaccacggatatgtgagggtctcttcgtcagggagaaagactgtgcctcactgccttcctcctgtaggataaaagtaagttttctagaaatctataatgaacgggtgcgggatctgttgaagcaatctggtcaaaaaaagtcctataccctgcgggtcagggagcatccagagatggggccctatgtacaaggtttatctcaacatgtagttaccaattataagcaagtaatccaactcttggaggagggaattgcaaacagaatcacagcagccacccatgttcatgaggccagcagcagatcccacgccattttcacgatccactacacgcaggcaatcctggagaacaacctcccttctgaaatggctagcaagatcaaccttgtggacctagcaggcagcgaaagagcagatcccagttactgtaaggaccgcattgctgaaggagccaatatcaacaagtcccttgtgactctaggaattgtcatctccaccttagcccagaactcccaagttttcagcagctgccagagcctcaacagctcagtcagcaatggtggtgacagtgggatccttagctctccttctgggaccagcagtggaggggcaccctcccgaaggcagtcttatatcccataccgagactctgtgttgacctggctgctgaaggacagccttggaggcaactctaaaaccatcatggttgccacggtgtctcctgcacacactagctacagtgagaccatgagcacactgagatatgcatccagtgccaaaaacattatcaacaagccacgagtaaatgaggatgcaaacttaaaactgattagagaactcagagaagagattgaaagactgaaagccctgctgctgagctttgaactgagaaacttcagttcattgagtgatgaaaacctgaaggagctggttctccaaaatgaattgaagatagaccagctgactaaagactggacccagaagtggaatgattggcaggccctcatggagcattacagtgtggacatcaacaggaggagggctggggtggtcatcgactccagcctgccacacttgatggccttggaggatgatgtgctcagcacaggtgttgtgctctatcatctcaaggaagggacaacaaaaataggaaggattgactcagaccaggaacaggacattgtcctgcagggtcagtggattgagagagaccactgcactatcaccagtgcctgtggtgtagttgttctacgacctgcccgtggggcccgctgtacagtcaatggccgggaggtcactgcctcctgccgtctgactcaaggagctgtcataaccctggggaaggcacagaagttccgattcaaccacccagcagaggctgctgtcctgcggcagcgaaggcaggttggagaggctgctgctggtcgtggctcgttggagtggctggatttggatggagatctcgctgcctcccggctgggtctctcccctttgctttggaaggaaaggagagcgcttgaagagcaatgtgacgaggaccatcagacaccgagggatggagagacatcccacagggcccagattcagcagcagcagagctacgtagaggatttgaggcatcaaatcctagcagaagagattcgagctgcgaaggaactggaatttgaccaagcttggattagccagcagattaaagaaaaccagcagtgtctgctcagagaagagacctggctggccagcttgcaacagcagcagcaagaagaccaggtagcagagaaagaacttgaggcatctgtggcacttgatgcttggcttcagacagatcctgagattcagccatccccatttgtccaaagtcagaaaagggtggtgcacctgcagctcctgcggagacacactcttcgggcagcagagcggaatgtccggcggaaaaaggtctcattccagctagagagaatcatcaaaaagcagaggctgctggaggcccagaagagactggagaagctcacgacattgtgctggctccaggatgacagcacccaggagcccccataccaggtcctcagccctgatgccacagtcccacggcctccatgtagaagcaaattgacgagttgcagttctttgagcccccaaagactctgcagcaagcacatgccccagctacacagcattttcctaagttgggatccctctaccacattgccacctaggcctgaccctacacaccaaacatcagagaaaacatcatcagaagagcatttgccacaggctgcttcctaccctgcaaggacagggtgcctccgcaagaacggcctgcattcctcaggtcatgggcagccctgcacagccagagcagccttggccaggaagggagcctcagctccagacgcttgcctcaccatgagtcccaactctgttggcatccaggaaatggagatgggggttaagcagccccatcagatggtgagccagggcttagcatctctgaggaaatcagctaacaaactaaagccaaggcatgagccaaagatcttcacctctactacccagaccagaggggcgaagggactagcagaccctagccacacacaagctgggtggcgaaaagaagggaaccttgggacccacaaggctgctaagggagccagttgcaattccttgtatcctcatggacccaggcagactgctgggcacggaaaggcagtcaagactttttggacagaatacaaaccaccttctccaagcagggcatcaaaaaggcatcagagggttctggcaactagggtcagaaatattaccaaaaagtcctctcacttgcctcttggcagtcctttgaagagacaacaaaatacaagggacccagacaccatggtcccactcacagatttcagcccagtaatggatcattcaagagaaaaagacaatgatttatctgacacagatagcaactactcattggattctctctcatgtgtctatgccaaagccctgatagagccactgaagccagaggagaggaaatgggatttcccagagccagagaactctgaaagtgatgacagccaactatctgaggactcactggctgagaagaggtaccaaagccccaaaaacaggctagggggcaatcgtcccaccaacaaccgtggccaacccaggaccagaactagagcttctgtgaggggcttcactgcagcctcagacagtgacctacttgctcaaactcataggagcttctccttggatagcctgattgatgcagaggaagaactgggggaagatcagcaagaagaacctttccctggttcagctgacgagatacccacagagactttttggcacctggaggactctagtctgcctgtaatggaccaagaggcaatatgcaggcttggtcccatcaactacagaacagcagctaggctggatgccgtcctgccaatgagcagttcgttttaccttgatcctcagttccaaccccattgtgagctccaaccccattgtgagctccaaccccattgtgagctccagccccattgtgagcaggctgaatcacaggtagagccaagctactctgaacaagccgactctctccaaggcatgcagctttcaagagagagcccactgatgtccatggattcctggttttcctgtgactctaagatcaaccccagcagccccccaggaatagtgggttctttatgtccaagtcctgatatgcaggaatttcactcctgtaagggggagaggcctggatactggccaaatactgaggaactaaagccatcagatgcagaaacggttctgccatatagctccaaactgcaccaaggcagtactgagctcctctgcagtgcaagagatgagcacacagcctctgctgctgatacgtctaggctgtctctctggggaattcaaaggcttattcaaccaggagctgatggcacctttcagggcagatgtatccctgacatgacccagcagggcagctctgaagcatcccacaattctagcgtatcaaacgtgctggctgcctctgccaccaccttgactcatgtaggcagcacccatgaaagggattggtctgcccttcagcagaagtacctccttgaactctcttgtcctgttttggaggccataggagcacccaagccagcttacccctaccttgaggaagactctggttccctggcccaagcttctagcaaaggaggagatactctattgccagttggccctagggtatctagcaatctgaatctcaacaactttccagtccatctgtccagaatcaggcgtttgagggcagagaaagaacaggacagtttaaatgccaaattagaaggtgtttcagatttctttagcactagtgagaaagaggcgagttatgacgaaacttattcggcagacttagaatcattgtctgcttctcgatctacaaatgcacaggtctttgcaacagagaacgcgataccagattccatgacagaagcatgtgaagtcaagcagaacaacttggaagaatgccttcagagttgcaggaaacctggactgatgacttcctctgatgaggattttttccagaagaacgcttgtcacagtaatgtcactacagccaccaaagcagaccattggtcccaaggctgggctcctctcaggaaaaatagtgcagtccagccagggcaattaagtcccgacagccactacccactagaggaagagaagacagattgccaggagagctctaaggaagcagttagaagacacataaatgtttcctttgcccttccttcaggtccagagctataccttcactctgctccctggaatccattgtcatcttccctgcagcccccactcttggaaacattctatgtgaccaaaagcagggatgccctgacagaaactgccttagagattccagcttgcagagaagtaagggtaccctccccaccccccagggaagcctggggctttggtcacaaccaccaagctctccaaggtgcttatttgaagaataatttgccagtgctgttacaaaaccagaattctaagattgcctcatctcagcaggtcacagctgagataccagttgatctgaataccagggaagtcatcagagaatcaggtaaatgccctggaaatattacagaagaaagccatgattcagtttattcttctgttactcagaacagacattttctcccctctaccagcacaaaagtatgtgaatttgaaaaccaagttgtaattttaaataaaaaacacagttttccagcacttgagggaggagaggtcactgctcagtcctgttgcggtgcttcctcagacagcactgagtctgggaagtctctcctctttcgtgaatctgaggcacgagaggaagaagagctggatcagaatacggttctgaggcagaccatcaatgtaagccttgagaaagacatgccaggggaaagtgctgtttctttgaaatccagatcagtagatcgtagagtaagcagcccagtgatggtggcccagggtggtggcccaacccctaagtgggaagggaaaaatgaaactgggcttcttgaaaaaggtcttcgtcccaaagatagctcagaagagtttaagcttccaggtacaaagcctgcatatgaaaggttccagttagttgcatgccctcaggaaagaaaccccagtgaatgcaagtcacaagaaatgttaaatcccaacagagaaccttctggaaagaaacagaataaaagagttaataatactgatgaaatggctaggctaattaggagtgtaatgcagctggaaaatggcatcttagaaattgaatctaagcagaataagcaggttcatgcttcccacacaccaggaaccgataaggagttggtgttccaggaccagaaggagcaggagaagactgaccatgcctttaggccagacagctctggaaaccctttgccctctaaggatcagccatcttctccaagacagacagatgatactgtctttagggatagtgaagctggagcgatggaggttaacagcattgggaaccatccccaggtccagaaaatcaccccaaaccccttcaggtcaagggaaggtgtacgagagagtgaacctgtgagagagcacacccacccagctggatcggacagacctgccagggatatttgtgattctttagggaaacacacaacttgcagagagttcaccaacacttctcttcacccacagagaatgaaagcattggctagagctctgccattgcaacccaggctagagaggtcttctaagaataatggccagtttgtaaaagcatcagcaagtctcaaagggcagccttggggcttaggaagtcttgaggaattggagactgtgaaaggttttcaggaaagccaagtagctgaacacgtaagtagttccaaccaagaagagccaaaagctcaaggtaaagttgaagaaatgcctatgcaaaggggaggcagccttcaggaagaaaataaagtgactcagaaatttcctagtctcagccagctttgtagggacacgtttttcaggcaggaaactgtcagcccattactaagccggacagaattctgtacagctcctcttcaccaagacctgagtaataccttgcccttgaattctccaaggtggccaagaaggtgtcttcatgtacctgttgctctaggcatctcttcacttgactgtgtgctggatctcacaatgttgaaaattcataacagtcccttggtaactggagtagagcatcaggaccagagtacggagaccagaagccacagccccgaaggaaatgttagagggcgttcctctgaggcacacactgcctggtgtgggtctgtgcgatccatggccatgggatctcatagtcaatctggtgtaccagagagcattcctctggggacagaggacaggatctcagcaagcaccagcccccaagaccatggaaaggacctcagaatcaccttgctgggtttcagtaccagtgaagattttgcttctgaagccgaggtggctgtacaaaaagaaataagagtcagttcactgaacaaggtctctagccagcctgaaaagagggtcagcttctccttggaagaggatagtgaccaagccagcaagccaaggcagaaggcagagaaggagactgaggacgtcggactgaccagcggtgtttccttagcacctgtttccctgccgagggtgcccagtccagagcctaggctgttggagccctctgaccatgcatccatgtgcctggccatcttggaggagatcagacaggcaaaggcccagagaaagcagcttcatgactttgtggccaggggcacagtcctttcttactgtgaaactttactagaacccgaatgttcttcaagggttgctggcaggcctcagtgtaaacaaatagaccagtcatcatcagaccagaccaggaatgagggtgaagcaccgggatttcatgtggcatctctatctgctgaagcagggcagatagatctgttacctgatgagaggaaagtccaggccacatctctgtctgcagacagctttgaatctctgcccaatacggaaactgacagagagccatgggatcctgtgcaggctttctcccatgctgctcctgctcaagacaggaaacgtcgtactggagaactgaggcagttcgcgggagcaagtgaaccatttatatgtcactctagttcttctgaaatcatagagaaaaagaaagatgcaaccagaacaccttcctcagctgatcctttggccccagacagtcctcgttcttcagcacctgtggaggaggtcaggagggtagtatcaaagaaggtagtggctgccttaccttctcaggccccttatgatgatcctagagtgactctgcatgagctaagtcagtcagttccgcaggagactgcagagggcataccccctggcagtcaggacagcagcccagagcatcaggaacccagaactctagacaccacatatggagaagtttcagataatttgttagtgactgcacagggagaaaaaacagcccattttgaaagtcagtctgtgacctgtgatgttcagaattctacaagtgcctcagggcctaagcaagaccatgtccaatgccctgaggcttctactggctttgaagaaggtagggcaagtcccaaacaagataccattctgcctggagctctgacaagggttgcactggaagctcccacacagcagtgtgtgcagtgtaaggagagtgttgggtctgggttgacagaagtctgcagggctggcagcaaacattccaggccaattccactgccagatcaaagaccaagcgcaaatcctgggggaattggggaggaagccccatgtagacacccaagggaagctttagatggccctgtcttctcaaggaaccctgaaggcagcaggactctcagcccgtctagagggaaagagagcagaactcttccttgccgacagccatgcagttctcaacctgttgctactcatgcttattcctcccattcctctactttactgtgttttagagatggtgacctagggaaggagcctttcaaggctgccccacatactatccacccaccctgtgtagtaccttccagggcctatgaaatggatgagacaggagagatctctaggggacctgatgtgcacttgacacatggccttgagcccaaagatgttaacagggaatttaggctaacagagagcagcacttgtgagccttctactgtggctgctgtcctatctcgagctcaaggctgcagatccccttctgctcctgacgtgaggacaggttccttcagccactcagctactgatggaagcgtggggttaataggggttcctgagaaaaaggttgctgagaagcaagcaagcacagaacttgaggctgcctctttccctgcaggcatgtactctgagcccctgaggcagtttagggacagctctgtaggtgaccagaatgcacaggtgtgtcaaaccaatccagaaccacctgcaacaactcagggaccacacaccctggatttaagtgaagggtctgctgagagcaagttggtggtagagccacagcatgaatgtttagaaaataccactagatgttttttggaaaagccacaattttccactgagttgagggatcacaatcgcttggattcccaagccaagtttgtagcaaggttaaaacatacctgcagcccccaggaagacagtccctggcaggaagaagagcagcacagagaccaggcttcaggtggtggagaaggcttcgcccagggtgtgaatccccttcctgatgaagatggcttagatggctgtcagattttagatgctgggagagaggaggtggctgtggccaagcctcctgtgtccaagattttatcacagggcttcaaagacccagccactgtgtccttgaggcaaaatgaaacaccgcagcctgctgctcagaggagtggccacctctacactggcagagagcagccagcacccaaccacaggggctcacttcctgtgactacaatcttctctggccccaaacactccaggtcctcccccacaccacagttctcagttgtcggctcttctcgttctcttcaggagctgaacttgagtgtggagcctccttcccctacagacgaagatacacaggggcctaacagattgtggaacccacatctcaggggctattcctcaggaaagtcagtggcaagaacatctctgcaggctgaggacagcaatcagaaagcctcatctcgcttggatgatgggactaccgatcacaggcacctgaagcctgccacccctccttatccaatgccttccactctctcacacatgccaacccctgatttcacgaccagctggatgtctggtactttggaacaagcccaacagggaaagcgagagaaactgggtgtccaggttaggccagaaaattggtgctctcagatggacaaaggaatgctgcactttggctccagtgacatcagtccctatgcgctgccgtggcgtccggaggagcctgcacgtatcagctggaagcagtatatgtctggcagtgcagtcgatgtttcctgcagccagaagccccaggggctgacactatcaaatgtggcccggtgctccagcatggacaatggcctagaagaccagaactcccctttccactcccacctcagcacttacgccaatatttgtgatctgtcaaccacacacagcagcactgagaatgcccagggttcaaatgaggcctgggaagtattccgagggagttcttcaattgccttaggagacccccacatcccgacgagccctgaaggagtagcccccacttcgggtcatgacagaaggcctcagttcaggggcccttctggtgaagcagactgtctgaggagtaagccccccttggccaaaggaagtgctgcaggtccagtggatgagattatgctgctgtatccatcagaggcaggctgccctgtgggacagaccaggacgaacacattcgaacagggcacacagaccctcggcagcaggcgccactggagcagcactgacatctcctttgctcagcctgaagccagtgcagtatcagcctttgatctggcctcatggaccagcatgcacaatctgtctctccacctctcacagctcctgcacagtacctcagagctgcttgggagtctctcccagccagatgtggccagaagggagcagaacaccaagagggacatcccagataaagccccacaggccctgatgatggatggctctactcagaccactgtggatgagggcagccagactgacctcaccttacccaccctgtgcctccagacttcagaggctgaacctcagggagccaatgtgatccttgaagggctaggctcagatacctcgactgtgtctcaagaagagggagatgtgccaggggtacctcagaagagagaggcagaggaaacagcacagaaaatggctcagctcctctatcttcaggaagaaagcactccctacaagccccagagcccttcaataccctcatcccacttgaggtttcagaaagcccccgttgggcagcatcttccttctgtgagcccctcagtttctgatgctttcctgcctcccagctcccagccagaggagtcatattgcttagttgtcagcagtcccagtcccagctcccctcattccccagggctctttcccagtacttccgagtatcctggggactccagggtccagaagaagctgggccccacaagtgctttgttcgtggacagggcctcctccccaatcctcactcttagtgccagcacccaagagccgggtctttccccaggctctttgaccctctcagccccttcaactcaccctgttgaaggccaccagaagcttgactccagcccagaccctgttgatgccccaaggactccaatggataattattcccaaaccactgacgagttaggtggctcccagagaggtagaagttccttacaaaggagtaatgggagatccttccttgagttgcactccccacacagcccacagcagagtccaaaactccaatttagtttcttagggcagcaccctcagcagcttcagcccaggacaactatcggggtccaaagcagactgctgccaccaccactgaggcacaggagccaaaggctgggcaacagctttgtgcctgagaaggtggcttccccggagcattgcccactgagcggtagggagccaagtcagtggcagagcaggacagaaaatggaggtgagagttcagcatctccaggggaaccacaacgcactctggaccgaccttcttcatggggaggcctccagcacctcagcccctgccctgtctctgagttgactgatactgcagggctccgaggttctgccttgggcctccctcaggcctgccaacctgaggagttactgtgcttcagttgccagatgtgcatggcccctgagcaccagcaccacagtctgagggacctcccggtgcataacaaatttagtaactggtgtggggttcagaagggctcacctggggggttggacatgactgaggaggagctgggggccagcggtgatctcagctctgaaaagcaggaacagagtcccccacaacctcctaatgaccacagccaggattctgagtggtccaagagggagcagatccccctgcaagttggggcccagaacctctcactcagcgtggaactcacagaagcgaaactgcaccatggctttggggaggccgatgccctgctccaggtgctgcagagtgggacaggggaggcgcttgctgctgatgaacctgtgacatccacctggaaggagctctatgcacggcaaaaaaaggccattgagaccctcaggagagagcgggctgagcgacttgggaacttctgccggacgcgaagccttagccctcagaaacaactgagcctcctgcccaacaaagatctcttcatctgggatcttgacttgcccagcagacgccgagaatacctgcagcaactgaggaaggatgttgtggagaccaccaggagcccagagtcagtgtcaaggtcagctcacacaccctctgacatagagttgatgctgcaagactaccagcaggcccatgaggaggccaaggtggagattgcccgggcccgagaccaactgcgggagcggactgaacaagagaagctgagaatccaccagaagatcatttcccagctattgaaggaagaggataaactacataccttggccaattccagctccctgtgcaccagctctaatggaagcctctcgtctggcatgacctctggctataatagcagcccagccttgtcaggccagctccagttcccagagaatatggggcatacaaacttgcctgattccagggatgtatggataggggatgagcgaggaggccattctgcagtgaggaagaactctgcctacagccacagagcctccctgggcagttgctgctgttcaccatccagtctgtccagcttggggacctgcttttcctcctcctaccaggatttggccaagcatgtcgtggacacttctatggctgatgtaatggctgcttgttcggataatttgcacaacctcttcagctgccaggcaactgctggctggaactatcagggtgaggagcaggcggtgcagctttactacaaggtgttttctcccactcggcatggcttcctgggggcaggtgtggtgtcccagccgctgtctcgtgtgtgggcggctgtcagtgaccccactgtgtggcccctgtattacaagcccatccagacagcaaggctgcatcagcgagtgaccaacagcatcagcctggtgtacttggtgtgcaacaccaccctgtgcgcactgaagcagccacgggatttctgttgtgtctgcgtggaagccaaagagggtcacctgtctgtcatggcagcccagtctgtgtatgatacatccatgccaagacccagcagaaaaatggttcgcggggagatcctgcccagtgcctggatcttgcagcccatcactgtggaagggaaggaagtcaccagagtcatctacttggcccaggtggaacttggtgctccaggcttcccacctcagctcctgagctctttcatcaaacggcagccactggttatagccagactggcttccttccttggtaggtagcatctcaccgtcaagatggtgctgctgagatgcaggcccaggctgctcaagagagacactgtggcagctccttgttactttccataccacagtgcaggaaaagctgatgctacctgctgtggccgattggggcagacagcactggcccagggatgctagcaaagcccagtcagtacttggtcacagctggcaccagtgcagagcaaacggcctgagctcctggcccagactatccagagtgaatgcagctccgctcaccttttggatttctcacctttctttcctgtttctgggactctgcggcagacaggacacttaaggaccaggactgggcacagccagcagagccggggactgcagtgctttggcaaggtgcttccgcaggctggtagggaagcaggcagccactggccaagactctgttctgaatctacctcctctagcattcagctctactgtgtgatgggacgttaaaaataccaaaacagaaagagggtttaaaaaacagctgcacaaaccagaacaccgattcagaatcttttctccctcttgagtttttgcaaaatactttattattgatttttgctttttttctccctttccctcccaggagaagacatttgggtcttggcctgaggcaggggtgttgagcgatgatgctctgatatggagctgtcactctagagctcggtcagatggaagacactatagaaccaggttggacagatttggggtcagggttggaggctgagttcttttgaggactggttggagtggcagccagatggtggctgctgacaaggcaagaggaatttcagagattaaacattgtcctttgaggaagggagaggaggtgaatgaactcccagaggaggtgagtggcttgttgggaggaagctcagttccagaacttacctcagtgcacttgggaggggtggagtcctgagcattccatgatttctgccctggccccacctatcctaggatggggtgggatggagagtgggttcagttttcttgtactttagcctggctgaacatgaactttgtgtttacctggaagtggtaggggtgggagagattctcatctttagttctggtgcccaaaatctttggtagatggagggaactggggattcagaagatgtggtaaaggtctatttctgtagtgtggcagagatgtgtttttctaaagtgtttgcagggcatttttccctcttacctcagattaagttatttatatattgttgattgaaggttttttaaaattgcttttaaacttctatttctcgggtaaattttttggtgacatgatatatttaacaccctatttatatactcctacctcttttcatataaatctcttactaagactactgaccaaaaaagaacattttaaaattaaaagtcctctgtgtacttta

SEQ ID NO: 875 - DNA, 8475 bp, Homo sapiens
gttgtgaccactgaacaaaacttgcccattgaaagcaaacccggaacagctggataatgtccaccccgagccgattcaagaaggacaaagagatcatagccgagtatgaaagtcaagtcaaagaaattcgagctcaactggtagaacaacaaaaatgcctggagcagcaaacggagatgcgagttcagcttctccaggatctgcaagatttcttccgaaaaaaagctgaaattgagacggaatattcccggaatctagagaagttagcagaaaggttcatggcaaaaacaagaagcactaaggatcatcaacaatacaagaaagaccagaacctgttgtctccagtgaactgctggtatttgctcctgaaccaagtaaggagagaaagcaaagaccatgcaaccttgagtgacatctatctgaacaatgtgattatgcggttcatgcagataagtgaggattctaccaggatgtttaaaaagagcaaagagattgcattccaacttcatgaggatttaatgaaggttcttaatgagctttatacggtgatgaaaacataccatatgtatcatgcagagagcatcagtgcagagagcaagctgaaagaggccgaaaaacaagaggaaaagcaaattgggagatctggtgatccagtcttccatattcgactagaggagagacatcaacggcgaagctctgtaaagaaaattgaaaaaatgaaagaaaaaagacaagcaaaatattcagaaaataagctaaaatcaattaaggcacggaacgaatatctcctaacacttgaagccaccaatgcctcagttttcaagtactatattcatgatctttctgatttaattgattgctgtgatcttggctaccatgcaagtctgaacagagccctaagaacatatctgtctgcggagtacaaccttgaaacctccagacatgagggcttagacattattgagaatgcagttgataatttagagcccaggagcgataagcagagattcatggagatgtaccctgctgcgttctgtccaccaatgaagtttgagtttcagtctcacatgggtgatgaggtgtgccaggtcagtgcccagcagccagtccaggcagagctcatgctcaggtaccaacagttgcagtcccgccttgccacgctcaaaatcgagaatgaagaggttaagaaaacgactgaagccaccttgcagacgatacaagatatggtcaccatcgaggactatgatgtttctgaatgcttccagcacagtcgttccacagaatcagtgaagtccactgtctctgaaacctacctgagtaaacccagcatcgccaagagaagagccaaccagcaggaaactgaacagttctacttcatgaaactcagagaatatttggaaggcagtaatctcatcacaaaacttcaagccaaacatgacttgctgcagaggaccctgggagaaggtcatagagctgaatatatgactacaaggcctccaaatgttccccctaagccccagaaacacaggaagtccaggccccgctcacagtataatactaagttgtttaatggggatttggaaacattcgtcaaggactcaggacaggttattcccctcattgtggaaagctgtattcggttcatcaatctctatggtcttcagcatcaggggattttcagagtgtctggttcccaggtggaagtcaatgatattaaaaattcatttgagagaggtgaaaatcctttggctgatgaccagagtaaccatgatattaactcagttgctggcgttctgaagctctatttccgtgggctggaaaaccccctctttcctaaggaaagatttaacgatctgatttcttgtatcagaatagataatctctatgagagggcgcttcacatccgcaaactcctcctgactttgcccaggtcggtccttatagtgatgaggtacctctttgccttcctcaatcatctatcacagtacagcgatgagaatatgatggacccttataacctggccatttgctttggcccaacattgatgcctgtcccagaaatacaggatcaagtgtcttgccaggcacatgtgaatgaaattatcaaaaccatcatcatccaccatgagactattttcccagatgctaaagagctggatggccctgtttatgagaaatgtatggctggagatgactattgcgacagcccatacagtgagcacggtacattggaggaagtggaccaagatgctggtacagagccccacacaagtgaagatgaatgtgagccaatagaagcaatagccaagtttgactatgttgggcggtctgccagagaactatccttcaagaagggtgcctccctgctgctgtatcaccgtgcatctgaggactggtgggaaggcaggcacaacgggattgacgggctggtgcctcaccagtatatagtggtgcaggatatggatgatacgttttcagacactctgagccaaaaagccgacagtgaggccagcagtgggccagtcacggaagacaagtcctcatccaaggacatgaactccccgacagaccgtcatcctgacggctatttagccaggcaacgaaaaagaggagagccaccccctccagtaaggcgtcctggcaggaccagtgatggccattgcccgctccaccctccacatgccctttctaactcctcagttgacctagggtccccaagccttgccagtcacccccggggcctgctgcagaaccgtggcctcaacaatgacagtcctgagcggaggcgcaggcctggccatggcagcctgaccaacatcagccggcacgactccctcaagaagatcgacagccctcccattagaaggtccacgtcatcagggcaatacacgggcttcaatgaccacaagccactggacccagagacaattgctcaggatattgaagaaacgatgaacacagctttgaatgaactccgagaactggagagacagagcacagcaaagcatgcccctgatgtggtgctggataccctggagcaagtgaaaaactctcccacccctgccacttccacggaatctctcagccctttgcacaacgttgccctcaggagctccgagcctcagattcgacgtagcacgagctcctccagtgacacaatgagtactttcaagcctatggtggcacccagaatgggcgtgcagctgaagcctccagcccttaggccaaaacctgctgttcttccaaaaacaaatcctaccataggacctgccccacctccccagggtccaacagacaagtcatgcacaatgtaaaaaccagccaagcaaggccataaagggaggtgacttaaaaaagaaaatggattagtgacaaaagtcactgatccataactttccttagttttgtgcttataactggagatcttttggcttttctatgttgtcgaatgtaatgtctgagactagctaaattaacacgggcatttgtattttgtaatttttttaaataactggacatatgtcattttaaggacaatagaaacacttagacttacttgaaaatccaatgctgcaccacttgtaatgaaggcaacaccgctctccacattgtacagagcttcaggtttaatgtagcccagctgagtcagaaaggttgtgacctgaaggcagaagaacccgaatgccacacctcattggagtatagccagtgttggtctgtggcacttgggctgaaaggtgataatggcattgcgtggtagctgacaatgagcaccttcggttccatgtggagcggggtttagctcatgcaaaagacttgcaattgtctccatgggacgatcccagtgggactgtcagcccacagctcgagtgggttggatgcttgcctctttcctaacagttatttccccgggtccagcttaaagactcgatggaaggaggtagaacctctgctgttactgcttgaacttaacctgggaaaggagaggaagacaccatctccaaagctattaatgtcactccttttgcgagcatgattaggccccggagatttccaagtccccccatctacacttacaaacgattagaagggtttaattttaaagactttctggttacactactccacgaactcctccaaagatccgttattcaataactgcctagaaaatgtttccatctcctctaaatccctgtgttctcctctgtggaaatgaaggcagcaagaagcacctgaggccttggttcatgcagtgttctcttttgactaaatcacctaggttcctttaaacatgctacaaagcccaggcatggtggtgcacacctgtactcccagctactcgggtggtttacacaggaggatggctttgggcctagtagttcgagtccagcctgggcagcatagtgtgagaccctgtctcttaaaaaaaaaaaaaatgctacaaagtcctgatgatcctaaatttgaaatcccaactgtcctctccatttgtctttgagccaaccctgaactggccctggtacctgagtaagagccatgcagggccatcagcagaacatggccttgtggttctcacccagttgtgtacctcacaaccacaacttctttttctttgtcccttttcccctttttggttttggttttgtatgtgggctctatgtaactcccatagtcagctgaactctcaattggagaccctctttctctggcatcctagcacacaggcaattttttaagcctatatttatgctacattttcccccatcttaagaaaatttgctttgatttccattctcctactagcagcagctgatatcacctgtagacctatgagcattttatctattctatcattgaagttactgataaagatttttgttgttgttgttgttgttgggagaaatggatttcccacaactaatccctctggcccaccattaatttccttcttggtttcatttcaaactggcagccaattgcacgcccatctaagagctacacagtgtagattttacttcatcagcccattggtgaatgcatcgtgcagaaaagaactgggatctgtactaaaatcaagatcattactttgatctctacctcagtttgccagtgtagtcattctattgcaggaagagattaaattgatgagatattgttactttcagagtcacactgctgattgcttgcctggggcctaatttcacaaatgaatagtgacttttttcccatgtatttctaggtatggtaaacttttaaacctccaaattttcagagccatactttttgcccattttgaaaaagaagcccaggacagcaccttgtctagcccctccccatttctcctgagcttttggggtccttcagcacccttggacaccgtggagatccagccaagactgagctttgaatagcactagcccttttaaacaatcctcacaaattccttaggaatttaaactttccaaaataatcccccacttttttttttttttttttttttttttgagttggagtcttgctctgtcgcccaggccagagtacagtggtgcaatctcggctccctgcaacctccatctcccgggttcaagcaattctcctgagtagctgggattacaggcgccaccaccacgcccagctaatttttgtatttttagtagagatggggtgtcaccatgttggccaggctggtctcaaactcctgacctcaggtgacccaccagcctcagcctcccaaagtgctgggattacagatgtgagccaccatgcccggccattccaccacttctttaaaatagtaagaattcttaaaaaccatattccttgtttgatggaagagtaagatgttaacagagggcatcaaagggccagaggtgtctttgaatttattttttttcaatgtcttttctgagcttcagccttagcttttcagatcttcctcctacctgttcatttattcagccttctatctggtcatcctccccagcggctcctctctctgatgtgtccacctacggtggaacgaggattgcctttctgtgctccccatcaggactttgctgtcttggccggcaggagtcgtgctgctgcagagcctcacaggctgtgccttgtttcaggaaacagctcctaatactctcccatcactcactttacctgtctccatcttatttccctatactcctattgtcagcttgagactttttttttttttcaattccaaatgaagggtatgacctcagagtgagtgaggactcagtaaagactcacctctccttacttggtttattaaatgtcttcagattccagagataagacaaggtggccacttcacaaagaatccagaatcatgctcagtaaagctcattaaaagccactgcagctgagaaggttcacagcccttctttatagccacagaggcagcacacaggggaggtgggaagacacagggaaacgagagaagaaggataatgaggccttgaggtgttctgcccccaatttcaaggagcttatcaggcttcatgtgcaatttggggaggggagctttttgatggtgggtaaataatggctctacaaagattacctgactccactgacacaagaatatgtattctcagctgatataactgtgtgttcacatcccatccatagaactcactgaaggagattcatcaagtcagccttttggactgggttggggtttggggagtggatttggggatagagagaaaggtgtacttagtacacattttctaatgggcgttacgtgaactgtttgaacctgctgagtggcgctttgtagagctccatgttcacgttcagtgtcaacaccattcaacagctttgcacatcttcgtacaacataatctggctttggtgccccttgagccacctgtagaataatttatagcagggtcccacaatctactgcaatgatcgtgaacagttatcagtggatatagtgctccaagagtcaaattgtatccgttaagggttttctaacttttgctatcccccccgcgaccaaaaaaagggggggtttataatttaaagaaaaggaaaagaggcgtgggttggtagttgtgtccttaacatttaggaatgacatagcctctggagtctacaaactgaagaaactttcatctgatcagccttggaaatccaaagttaaagagcctatgtgtctcttgaggcgggggttagaggattcaaatttgggatgatgctcattgattcctgaccatagcagtgagaggccattttttgtgcaggaaatgtgcttaggactcagtcttgttttcgattatccaccacagaaaccctgagacacagagcagcttagaagtctctacccaggcgtaaatagagctccctactccagaccacctgccacccacctcccaagttgagaacacaagctccagctgggctggagagtcaggcttggtgcagggtgactttggcgaagttttgtcagatccataaagcaaactggaatttgagctttcacttaccctagtatacgttcttaaaaaaaaaaaaaagtctatgtggtataatcgagatggatacctgtgtctttaaattacgtagggaattttgtatgtttaaataattgtactgggttccataatgcttatcttagaaactttagtaaaagaaaatatatgaaccgtgcatttgtgaatgccccccttagagcattcatccaagttcagtgtgtagtgtgatggttattatagatatttaaagtatagtaagtggctgtgtaacaggagagactgctgtttacctacgtactgaagggtaactgctgcccgcgtaattaaatcagtattgtcctttcctgtcggtttgatcaattgcggtaccggtagcttcctgcttgtgactgttacctaattgtgtcaatgtacatctgtagtatgtacatgtgaaagtgcctttctattttagaggagttttagccttgctcttgtaccgttgccccgctctgtgccccacccccacctcctcctcccaattcctgctgcccactcgagtgtttcgaagcttcctccctgtcccccaccttccccatccccgccttcctgtgcctcggtgctcagtaatgtcccatctcacctccctgtcggtcctcagactgtctcgttttccttgtagacgtgattgtgcctttctcacccctgtgtcctcccatcccaccgcatcagtcccccgctcatgtgctgctgacagcatcgcattcgcccgtgctctgtactgcctctcaccatttcattccctcctctctgaggtgaaaataaagggggatgcttttacagtctggaaagaaaaaaaatgttttgttaatctgttgtgacaatgcacttttatgtatagtactgtacatttttggcatgtaccattacaggcttcagtatacagtcaggtttgttcttcacggtgtatctttataataaataagatagttctggc

SEQ ID NO: 876 - DNA, 5695 bp, Homo sapiens
cgcagccgcgtcgctgcggccccggccgcgccatggggaaggagcaggagctggtgcaggcggtgaaggcggaggacgtagggaccgcgcagaggctgctgcagaggccgcggcccgggaaggccaagctcctgggttccaccaagaagatcaatgtcaacttccaggacccggatggcttctcggctctgcaccatgcggccctgaacggcaacacggaattgatcagcctgctgctggaggcccaggccgctgtggacatcaaggacaacaaaggcatgcggccgctgcactatgcggcctggcagggccggaaggagcccatgaagctggtgctgaaggcgggctcggccgtgaacatcccgtctgatgagggccacatccccctgcacctggcggcccagcatggtcactatgatgtgtctgagatgctgctacagcaccagtctaacccgtgcatggtggacaactcggggaagacgcccctggacctggcctgcgagttcggccgcgttggggtggtccagctgctcctcagcagcaatatgtgtgcggcgctgctggagccccggccgggagacgccaccgaccccaacggcaccagccctttgcacctcgcagctaaaaacggccacatcgacatcatcaggctcctcctccaagccggcatcgacattaaccgccagaccaagtccggcacggccctgcacgaggctgcgctctgcggaaagacagaggtggtgcggctgctgctggatagcgggatcaatgcccacgtgaggaacacctacagccagacagccctggacatcgtgcaccagttcaccacgtcccaggccagcagggagatcaagcagctgttgcgagaggcctcagcggccctgcaggtccgggcgaccaaggattattgcaacaattacgacctgaccagcctcaacgtgaaggcaggggacatcatcacagtcctcgagcagcatccggatggccggtggaagggctgcatccatgacaaccggacgggcaatgaccgggtgggctacttcccgtcctccctgggcgaggccattgtcaagcgagcaggttcccgagcaggcactgaaccaagcctgccccagggaagcagctcatcgggaccctctgcacccccagaggagatctgggtgctgaggaagccttttgcaggtggggaccgaagcggcagcattagcggcatggctggcggccggggcagcgggggtcacgccctacacgcgggctctgaaggcgtcaagctcctggcaacggtgctttcccagaagtccgtctctgagtccggcccgggggacagccccgccaagcctccggaaggctctgcaggtgtggcccggtcccagcctccagtggcccacgccgggcaggtctatggggagcagccgcccaagaagctggagccagcatcggagggcaagagctctgaggccgtgagccagtggctcaccgcgttccagctgcagctctacgcccccaacttcatcagcgccggctacgacctgcccaccatcagccgcatgactcccgaggacctcacggccattggtgtcaccaagccgggccaccggaagaagatcgcggcagagatcagcggcctaagcatccctgactggctgcctgagcacaaacccgctaacctggccgtgtggctgtccatgatcggcctggcccagtactacaaggtgttggtggacaatggctacgagaacattgatttcatcaccgacatcacctgggaggacctgcaggagatcggcatcaccaagctggggcaccagaagaagctgatgctcgctgtgaggaagctggcagagctgcagaaggctgaatacgccaagtatgaggggggccccctgcgccggaaggcgccccagtctcttgaagtgatggccatcgagtcgccgcccccgcctgagcccacaccggccgactgccagtcccctaaaatgaccaccttccaggacagcgagctcagtgacgagctgcaggctgccatgactggcccggctgaggtggggcccaccactgagaagccctccagccacctgccacccaccccgagggccaccacgcggcaggactccagcctgggtggtcgggcacggcacatgagcagctcgcaggagctgctgggagatgggccccctgggcccagcagccccatgtctcgaagccaggagtacctcctggatgagggccccgcccccggcaccccgcccagggaggcccggcccggccgccacggccacagcatcaagagggccagcgtgccccccgtgcctggcaagccacggcaggtcctcccaccaggcactagccacttcacgcccccccagacgcccaccaaaacccgaccaggctctccccaggcccttgggggacctcatggtccagccccagctacggccaaggtgaagcccaccccgcagctgctgccgccgacagagcgccccatgtcaccccgctccctgcctcagtcaccgacgcaccgcggctttgcctacgtgctgccccagcccgtggagggcgaggtggggccggctgccccggggcctgcgcccccacccgtgccgacggctgtgcccacactgtgcctgccccctgaggccgacgcggagccggggcggcccaagaagcgggcccacagcctgaatcgctatgcggcgtccgacagcgagccggagcgggacgagctgctggtgcctgcggctgccggcccctatgccacggtccagcggcgcgtgggccgcagccactcagtgagggcgcccgcaggtgccgacaagaacgtcaaccgcagccagtcctttgccgtgcggccccgaaagaaggggcccccgccgcccccacccaagcgctccagctcggccctggctagtgccaacctggcggatgagccggtgcctgacgccgagcctgaggatggcctgctgggggtccgggcacagtgccggcgggccagtgacctggccggcagcgtggacacgggtagtgccggcagtgtgaagagcatcgcggccatgctggagctgtcctccattgggggtgggggccgggctgcccgcaggcctcctgagggccaccccactccccgccctgccagcccagagccgggccgggtggccaccgtgctggcctcagtgaaacacaaagaggccatcgggcctggcggggaggtggtgaaccggcgccgcacgctcagcgggccagtcaccggacttctggccactgcccgccgggggcctggggagtcggcagacccaggcccctttgtggaggatggcactggccggcagcggcctcggggtccctccaagggcgaggcgggtgtcgaaggcccgcccttggccaaggtggaagccagcgccacactcaagaggcgcatccgggccaagcagaaccagcaggagaacgtcaagttcatcctgaccgagtctgacacggtcaagcgcaggcccaaggccaaggagcgggaggccgggcctgagccaccaccgccactgtccgtgtaccataatggcactggcaccgtgcgccgccgaccggcctcggagcaggctgggcctccggagctgcctccaccgcccccgcctgccgaacccccgcccaccgacctggcgcacctacccccattgcccccgcccgagggcgaagcccggaagccggccaagccgcctgtctctcccaagcccgtcctgacgcagcctgtgcccaagctccagggctcgcccacacccacctccaagaaggtgccgctgccaggccctggcagcccagaggtgaagcgcgcccacggcacgccaccgcccgtgtctcccaagccgccgccgccgcccacagcgcccaagcccgtcaaggcggtcgcggggctgccttcgggcagcgccggcccttcacccgcaccctcgcccgcgcgacagccgcccgccgccctcgccaagccgcccggtacgccgccctcgctgggcgccagccccgccaagcccccgtcccccggcgcgcccgcgctgcacgtgcccgccaagcccccgcgagccgccgccgccgccgccgccgccgccgccgcgccccccgccccgcccgaaggcgcctcgccaggggacagcgcccggcagaaactggaggagacaagcgcgtgcctggccgcggcgctgcaggcggtggaggagaagatccggcaggaggacgcgcagggcccgcgcgactcggcggcggaaaagagcactggcagcatcctggacgacatcggcagcatgttcgacgacctggccgaccagctggatgccatgctggagtgaacgccgcctggccgggccctcccgcgccgcccgggccctccccgcacactgacctatacctcaggatgggcgcgtctgggcgcggcgcgagcggccgggcagggccctgcagaagcacaactccggcccctggacccgggccggggcgcccaccggggaccgcctggccgggggctccaagggctctaggcagaccctgcgcccgcgggtcctccccacctgctgctccccgtgcaatacctgctgggcctcctgcccgcgcgggaggggagggcgccccgggaccagggatggggcagcgcacaggcccgggcccagcacagaactgcccatcgggacgcccggccagccgctcgggcgcagcacaagggacaggggaccaaggtcagggcccccctgccccaccgcacccccagaatataagctatcaagagtattaatttattgggaatgagctgaggcggatttccccagagaaacaaaaaggtataactttaacaaatatatatttaaagaaagaaatattattgattctatagaaaaccatttaccaactgaaaggacacgaagtctagctccggacaaaagctgttagaggcccaggctgtctgcctgcggtccttcctccggccagagtggaggccccaggctgctagcacaggtggaaggctggggcccgggggcgggtgctctgccgggggctcctccgtgcttctctcctaagttctctgcgccccaagaactcgaggttgtgccttgctctcggcggccgtgtcctcctcctggcgtggctgcgtcccagggcgcgggtgggtttggtgaatgtgggtgtgtcagcgtggcagccacgtggaagcagggcatgtagcaggccaggccacgggcttgcagctcctctgagggtgtgcctggccccctctccaggggctgtgcaggcagcccatccaccccagtggagttcccacggacgcttctgctcatggtccaaggctgtgttgtgtggtcattctcgccctcccttttcctctctcctcctgccccctccaagaagtactgactggtctcctctatcgtgtttgctgatccacagtgttgggcacaactttgacgtttcttaaaaaaaaaatttaaaaaatgccgaaaaccagcgattgtggtgtggggcgggtggaggcggctggcggaggtggcgtcccggcgtgcagggccccttcctgctgtctcaccccgtgtttccctgcgagtggacgtgcccagctgtccccccaggcctctcctcagagggcggcacaggctgggctccagcaggtgggcaggggaggtctgggcaaggcgctgccgtcggctgtcaataaacagcaggaaac

SEQ ID NO: 877 - DNA, 5183 bp, Homo sapiens
agacctaggtgatggaggaagactgggaggcgctaaaatgagacagacggagtcccctctcctgtccacaaactacaatgcctacaatgcctcggtgtcagcatttactgtgattcaagcactgtgctaaagtgtttttcatatgtcatgaaaagttgtgccagaaaattatggtttgaacatgggcagttttctcctaccgtcagctatatccacaagcatcacatgaagtggagatctggcagctctgtgtatttcagtcaagttccacaatgaaacctgacaataatggtaaaaaccaatacggacatctgagtaactggggaattggcctgccttgcatgtgagcttgatggaagattggatatagacgagttgattatattttatgaagtagcagctcactaccatccaccatccagggtttaaactactttttcagcatcacttcacctgtggactcttatacattttgatttcttgggggaaaaatactgggataagaggaggtcattttttaataagttagcatccttttccctttcttacaagttgatccaaaggataaggctgtgactccattggattgcacctttaaatcaaaatagcagcagcagaagaaagggacaatggctctgagtggaaactgtagtcgttattatcctcgagaacaagggtccgcagttcccaactccttccctgaggtggtagagctgaatgtcgggggtcaagtttattttactcgccattccacattgataagcatccctcattccctcctgtggaaaatgttttccccaaagagagacacggctaatgatctagccaaggactccaagggaaggtttttcattgacagagatggattcttgttccgttatattctggactatctcagggacaggcaggtggtcctgcctgatcactttccagaaaaaggaagactgaaaagggaagctgaatacttccagctcccagacttggtcaaactcctgacccccgatgaaatcaagcaaagcccagatgaattctgccacagtgactttgaagatgcctcccaaggaagcgacacaagaatctgccccccttcctccctgctccctgccgaccgcaagtggggtttcattactgtgggttacagaggatcctgcaccttgggcagagagggacaggcagatgccaagtttcggagagttccccggattttggtttgtggaaggatttccttggcaaaagaagtctttggagaaactttgaatgaaagcagagaccctgatcgagccccagaaagatacacctccagattttatctcaaattcaagcacctggaaagggcttttgatatgttgtcagagtgtggattccacatggtggcctgtaactcatcggtgacagcatctttcatcaaccaatatacagatgacaagatctggtcaagctacactgaatatgtcttctaccgtgagccttccagatggtcaccctcacactgcgattgctgctgcaagaatggcaaaggtgacaaagaaggggagagcggcacgtcttgcaatgacctctccacatctagctgcgacagccagtctgaggccagctctccccaggagacggtcatctgtggtcccgtgacacgccagaccaacatccagactctggaccgtcccatcaagaagggccctgtccagctgatccaacagtcagagatgcggcggaaaagcgacttactccggactctgacttcaggctccagggaatcgaacatgagcagcaaaaaaaaagctgttaaagaaaagctctcaattgaggaggagctggagaaatgtatccaggatttcctaaaaatcaaaattccagatcggtttcctgagagaaaacatccttggcaatctgaacttttaaggaagtatcatctataagggagggctgggggcgggaaaagaaaaaaaaaagtcattttgaaattaacctcctaaaaggaattcatattttaaaggaaaaaaatacaactaatgatgcacatttcttagaacacaatagtccattgatatactactgcctactttacctagttcaccttaacatgtaaatccacagggtagatttctttctagatgtggaagtacaagaaaatcttttttagttatttgtttgtttacttcgtcccatgtgctaactatcttatatataatgagagccagctacgtaaaagtagctgagaggccttgggagtcatttatcccaaactgggttttttctctcatccttctacctccctcctttgaatgagggtatggtagaaaaagatctggcccaatggcataagtttggaatttttaattttggtttttccttttgtttatggggttggggggaatggcagatttatatgacttttcactcaaatctatatgtgccagtttatattgactccgtatgcatgagtatttgtgcaacacaagcacaactaagtatgtatatacacatgacgcacacgatgccagggcctagacctcccaagggctgtgctcctgctcccagcagccctctcttagaatatttcagatggatgagcttctgactctttcttaaaattcttttgggaagatttcccagcctttcttcacaacactttctaacatcaaatgactctcatcatcaacaaattgtattccttattgtgaaattaataccctcaggctccattttactgctttgctctttgtctgcattaagagaggatgaggagagctggtcaaacattccttgtgttaaaaaaatcaaacattcatatccacaaaattttctgctaaatgactccacactcagccttctctaccctgaactgaattatcacccttttctccatgttttcagagttcttactgcccacagtttaatggtgtggcctttccacataatccacattaagttctgtgttcctgtgttgttgtggaactaaggacaacacacagtacttgaataagggtccggccttttgtttgttttagagaaagttgtattccacacacaacctaataatttcttataaaaattttaaactacaaagctacatttttacttgcttgtagccgtttttgtttgcctttgggattcgggctttggctgtgcccatgctaggatttagctgtgtcatttttatgatgtctgtaacaacccaacaaggtaactgaagctccagagttaaggtttcagatttctaaatgaaactatctttttcaattacatcctgacttgtatagacacagccaaaaagaaactgttaatagccatccgtccatgtaactctgtattttactaaggtaccaatagctctttcatagacttgtgctacaagaaggttaaaagaccagttttattttcagcattcctcatgcatttcagtggtaaccaaaaaataatttgtcaattaatagttgtgtgccaagcactcctaatttgttttattgcgtgtgtgtgcatgtgtgtatgtgtatcacaggtaataaaggcaattggatgatatctgtaggaggaaaacaatgactaatttcttccttttgaaatctttcattgatgcacatttattatgtaagatgttctgtcttgatttctgttcttagtgatgattagtatatgaatatctttctgaatttttgtaattctcgccttcacactaggatgacagactcagctaatgtttccttgtcctgaaggtttgaatggagttgaaagttttacataagtgaaaaagaaagtttatcttgggagttgagttgtcaagagaattataatttatgaatttaagtggtattcttttctgtattaatatattagcagatatttggtcttaactacaacatagctttgtttgtaaacttaccagtatgtcttgattcttttcaatgtttcttgatagcacatggcaataccatcatcctaataacagaagatcttgcaaagaatcacagagcttaatgggtcaagaagttgaatttggggaaaatatcctgaaactcactttggtcaaatgattattgtgttgtcactggaagtactgtcaaagactttgggggtctaactaaaatggccaaagttccaacttccttaaatttcagacctgactgtaatggcctcaagatagagagatacccttataagagtaaagaattaagatgatagtcaacccaatatttctactacattctttaaacaggaaattaaacactgcaaaaggagtgttcgtggcagtgttcctctgacccctgacctgtcatgagttttctctgctctgacattccttatacatccagtgaacaaagctggaatagaaaacctgtttaaaaccatcacaacagcaatatttttattctgggccacctctcgactggcactcatcccatggtaaaatattcaagtaactaagacaacagcatggcatttatttgtgtgagtgtttatatagaaatgaacatagacctggccagtaaaaggctctgaggaggcttaaagtacctagtttgagtggagttatcaagtgaggtccaggtagcctgcaacactggaaatgagttctgggtaagtgagttataagagtacatgctctagtaactctggtagtcactgtgactcgggcatgtttccctgaagttaaaatagtttttagaactttttgtttaattctgaagaaaacaatatatatggtttacttctcgaacattggttatgacaagggccataaattgctaatataaagaagttagtagtattgagtggatacaatgaatggggaatcacatgtgtagagccccaacttagattgccttctgggaaatcccgcgatactaaaatccagtgagctttgggagatcattccctaaaggtatgtgggttgtctgaagtcagaaacatatttacaaagtccttctacccactatcaaaaatgaactgatctgcattcagcaggaaaaggggaagacaggaatgtaaaactactagatcatatggtattgtgattttctttcccctgctaggaaaaaattgcactgaaatgctgacaaaaaataatgaaatgaagtggcttccaaaatatgcactgatgttatcctttgtatttataggcacagttatcttactgaaaatgcatgcatggtgaattaaaataaaagggggaacaatgcacaaat

SEQ ID NO: 878 - DNA, 5426 bp, Homo sapiens
ggcaaagggcctcagccccgccctactgactgtgaattctacaacatatggagcgcctaccttgtgcaaggcattgtggcccttcagagacttgaagacagtgtgtgactctcctgtgagttaagagcactggctgagtcagacagacccgagtgacaagcccagcttcgctccctctcagcggtgagagccaagattttcttgcctcctgggctccctccacactatcctgtggctgtggcagatatgtcaatacccttacattcactgcgattcaacaatacaatgagggaggaaaatgttgagccccaaaacaagcagatggccttctgtagaccaatgacagagaccagagcagacgtacagattctgcattctcatgtacagttgcctatagtctcaacttcagcctcagaccctggagggacatccacacagttgatgacatctccagtctttgacaccatgtctgcacctctaatgggagtaccaaactctggagcattgtccccacccctaatgccagcctcagactctggggcactttccccattgctaatgccagcctcagactctggggcactgtccccattgctaatgccagccttagattctggaacattgtccccattgctgtccacttcagagtatggggtaatgtccccagggatgatgacaattcctgattttggaacgatgtccgcaacgctaatggtagcaccagattctgcagagatatcaccattggcaatgccagctccatcctctggagtggtgtgtacacctataatgagcacttcatcctctgaggcaatgtccacaccattaatgctagccccagattctggagagttatccccaattctaatgcaagatatgaatcctggagtgatgtctacacagccagtgccagctcccagctctgaggcaatgtccccattgcaaattacagatgaagacaccgaagcaatgtccaaagtgctaatgactgctctagcctctggagagatatcttcgctgctaatgtcaggcacggactctgaagcaatatcctcactgataatgtcagctgtagcttctggaggtacatcaccccagccaacaagcacccaaaactctgggggaatacctaccccgctcatgtcagatctagactctggaataatgtcatcgcttttaatgtcatctccaggctctgaagtaatgtccacaccgctactgtcagtcccagatgctggagaaatgtccacattaccaaagccagctccagatgctgaagcaatgtccccagcactaatgacggccctaccctctggagtgatgcccacccaaacgatgccagccccaggctctggggcgatgtccccatggtcaacacaaaatgtagactctgaaatgatgtctaatccgccagtgagagcaacagcctctggggtgatgtctgcaccaccagtaagagctttagattctggagcaatgtccacaccgctaatgggagccccagcctctggaaatatgtctacattgcaaaagacagttccagcctctggagccatgaccacctcactgatgacagtcccaagctctggagtgatgtccacagagcaaatgtcagccacagcctctagagtaatgtccgcacagttaacaatggccaaaacttctggagcaatgcccacaggctctatgaaagccgtggcaaaacaatacaagagagccacagcctctggaaagatgtccacgccactgaggagagctccaacttctggagcaatgtccacccaaccagttacggcaacagcctctgaaacaatgtccatgccacaattgacagtcccagcctctggatcaatgtccatgctgcaaatgagagcccctgtctctgaagcaatgtccatgccacaaatgagaaccatggcctcaggattgacatctgcagcacagatgaaagccatgacttctggagcaatgtccaccccactaatgacagcccaaacctctggatcaacatccacgctgttaatgagagacacagcctcaggagtgatgtcctgtccacaaatgagatctctggcctctggagcattgtccaagccactaatgacacccaaagcctcaggaacgatgttcacggagaaaatgacaaccacagcttctgaagcaatgcccacactgctaatgagagacacagtttctggagctctgtccatgccgcaaatgacagacacagcctctggagggttgtctgcatcgctaatgagagacacagcttctggagcaatgtccacatcacaaatgacagccacagtctctggagggatgtccatgccactaatgagagctcaagacccaggagtaatgcctgcctcactaatgagagccaaagtgtctggaaagatgctcagtcagccaatgagcacccaagatcctggagggatgtccatgtcgcccatgaagtccatgaccgctggagggatgcagatgaattccccaacctctgatgtgatgtccacaccaacagtgagagcctggacctctgaaacaatgtccacaccactaatgagaacctcagaccctggagagaggccctcactgctcacaagagcttcatcctctggagagatgtccctaccactaatgagagctccagcttctggagagatagccacgcctctgagatccccagcttatggagccatgtctgctccacaaatgacagccacagcctctggaatgatgtcatccatgccacaagtgaaggctcccatctctggagcaatgtccatgccactaacaagatccacagcctctggagggatgtccatgccactgatgagagccccagactctagagtgacatccacatcacaaatgatgcccacagcttctggagacatgtgcacactaccagtgcgagccccagcctctggaggggtgtcctcaccactagtaagagctccagcctctggaactatgtccacaccactaaggagaccctcagcctgtgagactgtgtccacagagttaatgagagcttcagcctctggacatatgtccactgcacaaacaacagccatggtctctggagggatgtccaagccattaatgagagccccggcctctggaacaatgcccatgcctttaatgtcagccatggcttctggagagatgtctatgccgctaatggaaaccatggcctctggagcaacgtccacattgcaaaccagtgttgcgaactctagatctatgtccttgtcacaaacaacatataccgtgtctggaaggatggccacagcgccaattagagcctctgcttctggagcaaggtccacatcatttatgagagcctcagtttctggatcgatgcccatgccactaccaagagccacagcctctggatgtggcatgggtatgtccatgccacaaatgacagccacagactctagagggatgtccacaccactaatgagggcctcaggccctggaacaatgtccacaccacagacagcctttggagtgatgtccactccggaaatcaaagccacagactctggagaggcatccacctctcacattaacatcacagcctctggatcaaagcccacatcgcacatgactgccacaactcctgaaactgcgaaaccaccaccaaaggaagtgccatccttcggaatgttgaccccagcactctgctacctcttagaagagcaggaagcagcccggggctcatgctctgtggaggaagagatggagattgatgaggagaagcaaatgaaggggtttttggacgattcagagagaatggcatttctggtatctcttcatctgggagcagcagagaggtggttcatcttgcaaatggaggtaggagaacctctctcacatgaaaataaatctttcctgagaagatcccagggcatatatgactccctatctgagatagacatcctcagtgctgttctttgccatcccaaacagggccaaaagtcagtcaggcagtatgccactgacttcctgctgctggcccgacatttgtcttggtctgatgccattctacggaccaggtttctggaaggactctcagaagctgttaccaccaaaatgggtcggatcttcctgaaggtggctggcagcctaaaggagctgatagacaggtctctgtacaccgagtgccagctggctgaagagaaggattccccaggcaactcaagccaggttctgccaacagcctgtaagcggaataatgaggaggccatggggaatgaactgagctctcagcagcagactgaggagcaccagcatgtttccaaacgctgttactacctgaaagagcatggagacccccaagaaggtcttcatgatcaccttggacagagcacaggccatcatcagaaggcccataccaacaagtaaaactccatggaatcttctcctgtgatatctgactcgaccgctaactggaggactggttcctggacccattccattaaactacattataaaccttgttgccttcacccttcagcctcccgctccaggcacatcccaccttacctctcacttggctgatttgaccttctctttcacccacatgcctaagacctgccctgacaatcagagtagggactacaagagtgtatggtgtatgaggttctgaactcccatcaccaccgaggccagtcctagttcttggtccagggagaagtctaggcaggataaatcatatcttacctcaaaaaacccttagcgtatcttgccatgtgtcagcaggcaaacttgaggaagccctggttctatttcacctggcaggggagcctataaggagagcgatgcccactcctataccacccttgtaacccagtagacttgccccatatgccccaactcatagcacctaaaatgggtctccagggtccttgccctgtttatagtatccatcctgaaccattcgttttgacccataataatagtgatagtataatggctaccagttattgataatgtatcatgtgacaggcattgggctaaactcttgacaagcaccatctcactacattcttacagtaacacaacttgttcttgtgttgtcagcttctgacctcttgatctgttgtttatggcctttgtcttgtccctcagtgggggttctctagctctgacctctgggtgaccccctcagttgttgattgctctcactccccttggctgttgtgcttcatggccagcactcttgatgagggtcttggtctataaacaggcatagatagctagaacataatgtgagcagtgtttgccttcaggtggtggggttatgggtagtttttattttcttccttctacttctctatacatttcagattctctacagtaagcatgtgttacatttgtaattataaaagtaagtaaacttcatttatgaaaaaaga

SEQ ID NO: 879 - DNA, 9567 bp, Homo sapiens
tccgccgccgcctccgagcagccgcgggccgccctccactccgagcggggggcgcggcggcgacagctgggcagcggctttgggctccgcggggaccgcgccgccgcccccgtgagttattctcacgtcccccggggctcgctgccgcccccgccgacgcctagagtccggcccgggcccaactccctcacgggccccccggcggcagcggcggcggcggcggcggcagcggcggagcccaccgcccgggccccgatgagtaactcccggaataaccgggtgatggtggaaggggttggcgctcgggtagtgcgcggcccggactggaagtgggggaagcaggacggcggcgagggccatgtgggcaccgtccggagcttcgagagccccgaggaggtggtggtagtgtgggacaacggcacagctgccaactaccgctgctccggggcttacgacctccgcatcctggacagcgcgcccaccggcatcaagcatgatggaaccatgtgtgatacctgccgccagcaaccaatcattggcattcgatggaagtgtgcagagtgtacaaattatgatttgtgcacagtgtgttatcatggagataaacatcatttaagacatcgcttttaccgaattactacaccgggaagtgagagggttctgttagagtctcgtaggaaatctaagaagattacagccagaggaatctttgcaggtgccagagtggtgcgaggagtggactggcagtgggaagatcaagatggaggaaatggacgtaggggaaaggtaacagaaatccaggactggagtgcatcaagcccacatagcgcagcatatgtcctctgggataatggtgctaagaacctttacagagttggctttgagggcatgtctgatctgaaatgtgtccaggatgccaagggaggttctttctacagagatcactgccctgtgctaggtgagcagaatggcaacaggaatcctggtggattgcagattggtgacctggtaaatatagatctcgacctcgaaattgtacagtctttgcagcatggtcatggaggatggactgatggaatgtttgagactttaactacaactggaactgtttgtggcattgatgaagatcatgacattgtagtacagtatccaagtggcaataggtggaccttcaatcctgctgttctcactaaagcgaacattgtccgaagtggagatgctgctcagggtgcagaaggaggcacctcgcagtttcaagtgggtgatcttgtacaagtttgttatgacctggaacgaattaaacttctacaaagaggacatggagaatgggctgaagcgatgcttccaactttaggtaaagttggccgagtacaacagatttattcagacagtgatttaaaggtggaagtttgtggaacatcttggacatacaatccagcagcagtttccaaggtggcatctgcaggatcagccattagcaatgcatctggtgaaagactctcacaactcctgaagaaattatttgaaacccaagaatctggtgacctcaatgaagaattagttaaggctgctgccaatggagatgttgctaaagtggaagatttgcttaaaagaccagatgtggatgtaaatgggcaatgtgctggccacacagctatgcaagctgctagtcagaatggacatgttgacattttgaagttacttttgaagcaaaacgtggatgtcgaagcagaggataaagatggtgatagagcagttcaccatgcagcttttggagatgaaggcgctgttatagaagtactacatcgaggtagtgctgatttgaatgctcgaaacaagcgccgacagacaccacttcatattgctgtcaataaaggtcatcttcaagttgtgaagactttattggactttggctgtcatcccagtctccaggattctgaaggtgatacccctcttcatgatgcaataagtaagaaacgtgatgatatcctagcagttcttttggaagctggagcagatgttaccatcacaaacaataatggatttaatgctctgcatcatgctgcactaaggggaaatcccagtgcaatgcgtgttttactatctaaattaccaagaccatggattgtggatgagaagaaagatgatggttatactgccttacatctggctgcccttaataatcacgtagaagtggctgaactgttggtacatcagggtaatgcaaacctggatatccagaatgtgaaccaacaaactgccctacaccttgctgttgaacgacagcatacccagattgttaggcttttggtccgtgcaggtgccaagcttgatattcaggataaggatggggatactcctttgcatgaagctctaaggcatcacactttgtctcagctacgtcagctccaagatatgcaagatgtggggaaggtggatgctgcctgggagccatccaaaaacacgttaataatgggacttggtacccagggggcagagaagaagagtgcagcatctattgcctgtttcttggcagccaatggtgctgacctgagcattcgaaataagaagggtcaatcgccacttgatctctgtcctgatccgaatctctgcaaagcactggcaaagtgtcataaggaaaaagtcagtggtcaagtgggttctcggagtccttctatgattagtaatgattctgaaaccttagaagagtgtatggtgtgctcagatatgaagagagatactctttttggtccatgtggacatattgctacctgttctttatgttctccacgtgtcaagaaatgcctcatctgtaaagaacaggttcaatccaggacaaagattgaagaatgtgtggtatgctctgacaagaaagcagctgttctttttcaaccctgtggccacatgtgtgcttgtgagaactgtgctaacctgatgaaaaagtgtgtgcagtgtcgagcagtagttgaacgaagagtgcctttcattatgtgctgtggagggaaaagttcagaagatgccactgatgatatctcaagtgggaatattccagtattacaaaaggacaaggataataccaatgtcaatgcagatgtgcaaaagttgcagcaacagttacaagacattaaagagcagacaatgtgccctgtgtgtctagatcgtctgaagaatatgattttcctttgtggtcacggaacctgtcaactctgtggagaccgcatgagtgaatgtcctatctgtcgcaaggctattgaacgaaggattcttttgtattaactaagacacatggtgtattttgttagctaatgtatctagtcatgagatcttaataggcttttgatctagttggaagttctgatgagttaatttctaatatcatagtttctttactagagtataattgggctgtaaatgtaccagaacaaaaaaccctacaaaatggtgttggaaattgtgttttttgtttttgttttaaatttgaaacatcaaattcatgtaactcataggataatttacctttggcttctaagaggaaagtcctttaaggatatccttttttaaaaaattgcatttttctcttataatttgtaaatttgttggatctcaaaagacataattctttgtgatcagttatccttcatttcatcgtggttttacacagtgagttgataacaggttctctgagaagtcatgcatcaaataaaagaggcaggtcaaacaattatgtcacatggtaaattataaaatgacagtacaagttccagatagttaagggaataccgaagggatgattctttttttaagataacaggaagttacccacatgtttgtttctgaattcttagagtaaatggaagcatagaatgagggaataatgactttgcatttctcttgttttctagattcaaaaggaacattgtttaacttgaatcagattaccagtttcaaggtgactgatagacaagaaaaggaaaaataagcaataatagtgggcaactgaagagaaaaaaaaaacgagtatctattaactggccactaacagttgcctttcttacattaatttatacactattttgttcagccagtgtttttaaaaaaaatctatgaaaagtgtacttccggttttctgtgattacttatctgggcttgatctgaccagtgaaatgacattgccctatttggacctctgaggttctatttagctttgcagatgtacatagtatcccagtgatctgcaaaattaatgccttttccaagaaaaaatcttttcttctctgtatcagttaattctgacagtgttagtgattctgtcttcattataggccttatttccattatctctttctttatagtattttttgttataaagaaaacagtctttctgtgtatacctacggatgagggtattatttaaactgccaacaatatccaagacatggtcaataacctaattataaatactttagaaagagtgaccaggacatgtatagaaatgtctgcttacctgtagactttaaaaacaaacaaaatttttggagcatttaatcattttttttctccttttatctcctttgtaatcttattgtctcctgagtaaatatacacataaatgtttggggattcattgctgctagattatatcaggtgtttacatagtgtctactatatgctgttgataagctttttcctaaaaatagttatcctcttttgtagtttttttccctcctttaaatctggctagcttttcttacttcagtttttatagaacaccaactaaatttgaaagtatgaagtctctagccctcttacactgtttctggctgtttaatccttgctgcctttgcaagtcctggtgaaagcaatggggagctttgctggctggttttgtagtctcaacaattccatgtctgtgtttagctgagtaactgctatcatttagaacagtaaaatttttatagatttcaaatttgaaaattcatgtacactcagttatctaataaggggccaccgacgctgtttttaaaactattttgaagttataaaaaggtagaacatctgactgatgatgttcacataaagagacagacagactatcatgttgcagacatgaaaacagcatgtcaggtttttcctttccttccatgccatgggctacccatctcttcccactagatcacctggtgaggagggagcacctggctgactcatgcagagtttggccaatcagagaattgtgtggtctccagctctactttccttaaacaaatcctttctgttttctgagctgcagtgctaaaacagatccctaaaaggtaatagcatcttccagactagtttaattatttcctttataagaatatgacataaatttttattatagaaataatgtcattataattttagtgctagtacttgtgggttttctgtatttgtatcaccttgaaatttgttccatgaatagaaaatacttctttattcatgttttcaatcacttagaattattttaaatttattttgggtttgtgagagataataagattaagaacttcatcatttcagtgactttcctccaactctctgaatctgctacctcttattatatgtcccttagcagtacttttccagttaggttcgttaccctgctcattagctaaacctctttatcttgtgcctcaaaagagcttttacttttcttagaaacatttataaaaaagaaaaaaactgacacgcattcattcaaaaaagtatttattgggctttagggattagatacacaacagtggaaaaatggcatcttagcacactcagaatttattgtgcagcagttgtgtattttaaggaatctgtagttaaaaggaagagatccaaaggtcctgataacatttcctaacgtttcagaagagttgtcattgagtagtgtttggatttcctctctgtatccctcaccctaccattttctcctttattcttctaagattgttagcgttgttactcaaaacatacacatacaacataccagatggtgctgttctaatggtatttgttcacgtaatttaacgttcttactgcttatactatatacatatttaattttgttgggagcaagaaggttttcaagaaaagataattttgtattagtgtaggaatatattagacaaatgtttagttggtcaaattatgcataagatatttgtaactttaaacattgcaaattgaccagctagctatggaagcataaaattaattgataattaatgttggaaatacatttctaaaatttatatttttatggtgttagcctgtaagagcattttagcatattgaaatgcatgctgcttaagatgtgtctggttcaaatatcaaaacttgctgggtcatttttacatagtagaaacatactgtctatgtgttgcccaattgctgtttgtccactctgaattctggaccctttttggactaagaattagttaaattcatgaactaagagaattagagatggggtagagtaggatcaggacagtggggttacaacagataggaaaggaaagtcagcatttgagtgtagagaaaaaaagaggatcatacagatgtcatcaaattataggctttaatacaggttgctttttttaatccaaaaggaaaagcacttatcctatcagaatgtctaccatgttttatagtaataatttgtgtaaaaaattgaatttttgaatagttttttgtattttttgtgatgaaaaactcataacataaaatttaccatattaactgtttctaaagaatacagttcagccatgtgaagtacatttacactgttgtgaagcagatctccagaactttttcatcttgcaaaactgaaactccatacccattaaacaactcccctttttgttttctcctcagtggaatagaattttgactccatataaatcaagaaacacctaaattctttagttgtttgtgtttgcaagatctaaggtcatggtaaacattaagttcttaaaatttttgggagggacagtgcacctctcctctgaattgttagcaattaaattgagtaggttttaaatgtctattcattggaagggtttgttatttcattttgagccagaggggagaggcacattttaaatatcagaattagattagctttgagtttgtacaattgggaacataatagattttcataaattatgtgtgccttgttggaagtgtcaactgtctttatgtctgcttgtaaaagtttcaaaatatgttttccctcaaaaaggcaacgttacttcatttgcttgaatattatgataggaatgcttactgatattacttgatagtcatatatagcctaggaaatttaacatatatataactatagcagtattaataatgatagttgtacttctttaaaacattaaatttgaggaaactttaatgctgtctcgtgtacattgctttactacagtgagggggaatatcctttagattgagcctcaatttactggttagtagtatgtgaaactctggtataaaaacgtaaactagacagtagagccgatgaattaaaattgtaaattgctacattggcattttctacctccttttctgtcagagtattactttttccagcatttattcttatttgtgagtaaagaggaaatgggaacctgaggttaaaattgacatttttgtttcattgagaatttaagcagtaggtacaggagaagtgacttgtcacattaatttggtgcctaaatctgtaactacaagttgtgatcgacatgtacaaaatgtctaagaaaggtcatatgctgaatattttacttttcctgtatagtctgcatgatttgtttcataaacccagcttatttcctccaaaaagcaaaatggtcctgtaatttttaaagtaaaataaacgtgccattttgtctgcaatctataatttcaggaagttattgaaagttctgactcagggctttttaacagttcaagcaattgtcagttatattttggaaactccatctgtgtaattctccagtgccttgaaagaattattaacttggcaacactattaaaactttataaaagatggtctttagtgcacgtgtatcattatatacacgttttaaagtcatattgcttagcttgttaataatgattctgcatgtgtgctgggtttgggtaattctttaaaggaagttttctagatttgcacttgatgtttgttttttaaaaactgattatttatggccgtgacactgttaccagaaaagtaattctaattaagttattatgcaaagtcatctataagtagcatctgggaagaggagatcgaggccacagtttgctattttagtatgaaaggaggatctgtttgggaaacatagattgtcttcccctcaaatgaggggaaaaaaaaaagaccctttgttcaaatggattctgttgtaaaaaattatttttaaaggaaatcacaaattgtatgtcattcttaatgctagtcttatagaataaatccataaaattgtttttatgttcagtatgtttatgtcattctaaatgcagcaaattcaatgatagcagttcaattgactcatagcagtgttttgtattttttctaattctttagctttcaatattggattaaagtcttgtttgtgaatatagtttccgtatggcaaatgatttcttgcttattagcttttgttaaagaatgcttagtaagagctaagcttttaaaagtaatgcaaacatttatcgttaataaaacctatggtgtaatatcatataatgcttttctttgatctttggagaattattcttttatagtagtatacatgaattttgatttttaaagcatttaaaaacaaatctcaatacattaaaaaacctgttattgttaaaaaggaaattaccatgcctttaagaaacaaggatgtacatcttcaattcagcataagtgtccacatctagaaggctctcattgcagttgtttacagttaaggtacctctatctaaagggccaaagaagcatttcatattttaacacctcacattctttcaggattaagacatatgaaaatagtctgaataggataaatttgataggaagtaacttaaccagtctggaagattcagctttttctataaaaagcttattcctcttcacaactcagatgtagatttcattttcaagaggtagatattttaaagcaatgatctatttgggttttagttttatgagtaaatcattaattgtatggtttgggggttattttattttccatgttaatataagcacttatttctgaagttattgagaggtcatctagctccagttcaaaagattatgtatatctgatgtttaagaggaaaaacatctgaaaaaatatcttttgtttatttgaaaaaagcatatatattccaactttaaaattgtgaatttattttgagtaacctctaattaactgtatttttttgtttctgttgctgtatagttagaaatttcatggcaatattttttactaaattgaaactataggttttaaaaataaagacattttagaaaatttg

SEQ ID NO: 880 - DNA, 10936 bp, Homo sapiens
gtatcaggactcagcccatttccccctctggtgctgagaaatggaggccgaaggagtgatctagaagtgttaattgagcccctaatctatgctagttactgggggtgttgggggagacaggagagagatcccacggggttccggcctcccagggactcaggtcactaatggaggtggcttggcttgtctatgtgctgggccaacagccactggcgaggcaaggcgagggtcagtcacggctggtgccaggaagagggctggttctttggctccctggtctcccgcggtctagcccaagctggccagcggttgacctggctcccctggccccggccaggcctcgtggacccctcatatgccacacgggacatgagcaggccggccgggagccgggtcccgggagctccacgaaggggcctgtcctccatgaccaggacacccgctgcgccttcctcccgaggcctcccgggcctctccagacgcggcgctactgcagacaccagggccgccaagggagcggactcggagccggccctggggcgggcacatgggccccggcgccccccggcgtctccaagccgcgctgcccgggtcgggccaggccaggggagggacagcagcaggtgacgacggcccggccaccggctataaataggggcgcgcgtcagccgcgggcgggagcggcggcggcgggcaggggcccgggggccggggcctggaggacaggcgaggcagcggcgagtgcggggccggcggtcggggagggcggtgccatggggtcgcggagggcccccagccggggctggggcgcgggtgggcggtcgggggcggggggcgacggtgaggacgacggccccgtgtggatccccagcccagccagccggagctacctgctcagcgtgcggcccgagaccagcttatcaagcaaccggttgtctcaccccagctctggaaggagcaccttctgctccatcattgctcagctcacagaggagacccagccgctatttgagaccacgctcaagtcccggtctgtgtccgaggacagcgacgtcaggttcacctgcatcgtcacaggatacccagagccagaggtgacctggtacaaggatgatacggagctggaccgctactgtggcttgccaaaatatgagatcactcatcagggcaaccgccacacactgcagctgtacaggtgtcgagaagaagatgccgccatctaccaggcctctgcccagaacagcaagggcattgtgtcctgctcaggggtcctggaggtgggcaccatgactgagtacaagatccaccagcgctggttcgccaagttgaagcgcaaggctgcggcaaagctgcgcgagatcgagcagagctggaagcacgagaaggcggtgcctggggaggtcgacactctgcgcaagctcagccccgaccgcttccagcgaaagcggcgattgagcggggctcaagcgccgggcccctcggtccctaccagggagcctgagggtgggaccctggcggcttggcaggagggagagactgagactgctcagcactcaggtttgggcctgatcaacagttttgcttctggagaagtgaccaccaacggggaggctgcccccgagaatggagaggacggagagcatggcttgctgacatacatctgtgacgccatggagctggggcctcagagagccctcaaagaggagagtggggccaagaagaaaaagaaagatgaggaatccaagcaaggcctgcggaagccagagttagagaaggcagcccaaagccgccgttcttcagaaaactgcatccccagctcagacgagcctgactcctgtgggactcaggggcccgtgggcgtggagcaggttcagacccagcccagaggcagggctgcacgggggcctgggtcctctggcacagatagtaccaggaagccagcctctgctgtgggcactccagacaaggcccagaaggcccctggcccaggcccaggccaggaagtgtatttctccttgaaggacatgtacctggagaacacccaggcagtcaggcctcttggggaagagggaccccagaccctgagtgtccgggcgcctggggagagtcccaaggggaaggcacccctcagggctagaagcgagggggtgcctggcgctcctggccagcccacacactccttgaccccccagccgactaggcctttcaacagaaagagatttgcccctccaaagcccaaaggagaggccaccactgacagcaagcccatttcttctctgagtcaagctccagaatgcggggcccagagcttaggaaaggccccacctcaggcctctgtgcaggtgccgacgccccctgcccggcggagacatggcacccgggacagcacgttgcaggggcaagcaggccacaggactccaggagaggtcctggaatgccagacaaccacggctcctaccatgtcggccagcagcagctctgatgtagcctccattggggttagcacttccggaagtcaaggtatcattgaacccatggatatggaaacccaggaggatgggagaacatctgctaaccagagaactggaagcaagaagaatgtgcaggcagatgggaagatacaagtggatggaaggaccaggggagatggaacacagacagcccagaggacacgtgcagataggaagacgcaggtggatgctgggacacaagaaagcaagaggccacagtcagacaggagtgcacagaagggcatgatgacacagggaagggcagagacacagctagaaacaacacaggcaggtgagaagatacaggaagacaggaaggcccaggcagataagggcacacaggaagacagaaggatgcagggagagaaggggatgcagggagagaaggggacgcagtcagaggggagcgcgcccacagccatggaaggtcagtctgagcaagaggtggcaaccagcctcggcccaccatccagaacccccaaactcccacctacagcgggtcctagagctcctctgaatattgaatgttttgtacagaccccagaagggtcttgtttcccaaaaaaacctggttgcctgcccagatctgaggaggcagtagtaacagcctccaggaaccatgagcaaactgtgctgggtcccctgtcagggaacctcatgctcccagcacagccgccccatgaggggagtgtggagcaggtgggaggagagagatgccgagggccacagtcatcaggcccagtcgaggccaagcaggaggacagcccgttccagtgccccaaggaggagcggccagggggagtgccgtgtatggatcagggtggctgtcctctagctggcctgagccaggaggtacccacgatgccttctcttcctggaactgggctgacagctagcccaaaggcggggccgtgtagcaccccgacttctcagcacgggagcacagccaccttcctgccctctgaggatcaggtcctgatgagttctgccccaacactgcacctggggctggggacccccactcagagtcacccaccagaaaccatggccaccagcagtgagggggcctgcgcccaggtaccagatgtggaggggcggaccccaggtccccggagctgtgaccctggcctcatagattccctgaagaactacctgcttctgctgctgaagctgtccagcacagagacaagtggagcagggggagagtcccaggtgggggcagccaccggaggtctggtgccctcagccactctgacacccactgtggaagtggctgggcttagtccccggacatcgaggcgcatcctggagcgtgtggagaacaaccacctggtgcagagtgcacagaccctgctgctgagcccctgtacctcccgccgcctcaccggcctcctggaccgtgaggtgcaggctggccgccaggcccttgctgctgcccgaggctcctggggtcctggtcccagctccctcactgtccctgccattgtggtagacgaggaggaccctgggctggcctcagaaggagccagtgagggtgaaggagaggtttcccctgaggggcctggcctcctgggggcctctcaggagagcagcatggctggtcgactgggggaggcgggtgggcaggcagcccctggacaggggccctcagcagagagcatagcccaggagccctcccaagaggagaagttcccaggggaggctctgacaggtctcccggcagctacacctgaggaactggctctaggggcccggaggaagagatttctccctaaggtcagagcagcaggagacggggaggcaaccacacctgaagaaagggagagccccacggtttccccccgggggcccaggaaaagcctggtgcctgggtccccagggactccagggcgggagagacgctcccctacgcagggcagaaaggcgagcatgctggaggtgcctcgggcagaggaggagctggcggcaggagacctgggccccagccccaaggccggcggtctggacacagaggtggccctggatgaaggcaagcaggagacactggccaagcccaggaaagccaaagacctgctgaaagccccacaggtgatccggaagattcgggtggagcagtttcctgatgcctccggtagcctgaagctgtggtgccagtttttcaacattcttagtgactcagtcttgacatgggccaaggatcagcgcccagtgggcgaggtgggcaggagcgcaggggatgaggggccggcggccttggccatcgtgcaggcctcccccgtagactgcggtgtgtatcggtgcaccatccacaatgagcacggctcggcctccaccgacttctgcctcagccctgaggtgttgtcaggattcatctccagagaagaaggtgaagttggagaagagattgagatgacccctatggtgtttgctaagggtctggctgactctggctgctggggggacaagctctttgggcgactggtaagcgaggagctccgagggggtggatatgggtgtggccttcggaaggcctcccaggccaaggtcatctacgggctggaacccatcttcgagtcgggccgcacgtgcatcatcaaggtgtccagcctgcttgtgtttgggcccagcagtgagacttctcttgtgggcagaaactacgacgtcaccatccaggggtgcaagatccagaacatgagtcgggagtactgcaaaatcttcgcagcagaagcccgggccgcgcctggctttggggaggtgcctgagatcatcccactgtatctgatctaccggcctgcaaacaatatcccatatgctaccctggaggaagacctgggcaagcccctggagtcttactgttctcgggaatggggctgtgctgaggctccgacagcatctggcagctctgaggccatgcagaaatgccagaccttccaacactggctgtatcagtggacaaatggcagcttccttgtcacagacttggcaggggttgactggaagatgactgatgtgcagattgctaccaaactccgaggataccagggcctcaaggaaagctgcttccctgccctgctggaccggttcgcctcctcccaccagtgcaatgcctactgtgagctgctggggctgacacctctcaagggcccggaggcggcccacccccaagccaaagccaaaggctctaagagtccatctgctggcaggaaaggctcccagctgagtcctcagccccagaagaaaggcctccctagtcctcagggcacccggaagagtgctccaagttccaaggccacccctcaggcctcagagccagtcaccactcagttgttgggacagcctcccacccaagaggagggctccaaggcccagggcatgcggtagcctccgcagaggctgggggcctccacccagcagcagaccaaccaggaagcagcttgaactggatggagactttccaaatatggaactaactggagaaggtgcacgaaggagacaccacttggggacctctctgagcaggctctcgtgaatcagctcgtcatcagatggctttggtgcatggcacatagcccactggcctcttctggtgccactgtcacccagggctcccgggcctcaagcagtccccacctccaagtgcctggcaacctaggccctccttgaagtttacactttgccactgctggaggctcccctgagtcctctgcatgagttctgcaccccaagcccttgccccagcccagtccagcagcagatgttacaatctgagtgaggacatgcaggccaacttttaccctcctgcatttgcctggccctgatctcgcctgtcctcagggatccagacttcctctgctggtctggcctggtgactctcagggtatcttctccttccagctactttcgctcactgatctcagcttatcctgcaactaaccatccttgagcccagatggggctcagggcccttccagagcctgtcatgtccttgtgcagtggcctttgatgtgtgttcacgctcttcccccttcactcactcgcctgcttcccatgctcccttgtaccccctcgccacatccctgtcttggggcccagctgcagcctgctgcctgcccttcatggctctgcacatggccctttgcttgagggctccccactccctgcccaccaatacccaggtgaggaacagaccctctggcctctcaccccacttcagtgctctcttccccaacttctctcgggctctttgctcatgaggtgagagctggtgtgagggttgtgtcagcagctgtagccagagagaggtgttgactctgagagaccttgcactccatactgaaaggaggtggggtcacagtgaatttcacatcccctctcaaccaggagtggagggctaggtcccttccccatggggagtacacttgggtgttctaggagggatgcagtctatccatgcacttgggtggaggggagtctctgtgcctgggaattaggacccctgctccaaccatcgctcttgatcctggggccccagctctgggtcctcatgtatgggctcccaaggacccagcagcctggatccttccagagcatccctcctggaggcctgggatggggtaggtctgcagctagcctactccctttggaatgcaataaaggcagcattgtgtgccctgcttgccctcatctggtgtggttggaggtctgtggagtcaaggtccccctctcccaggcaggctctctgagggcattctgtagtcccaggcccactggaaaaatgaatctatattttggttcctggaccgaagttcagtcgcagccttctgtggccacagaaagacagcttgtgctgcttgcacaactgagctgctggtgtgtaccccttagcagggtgtctggggacttacgcctttggaattgctcttcattcagaagaggaacacaaaggaagccacccaggaaggaagcacagagctgggggctctggaaacgccctgtgtctctggctacagcaagaccagcccaggagcccaccagcacctgcctctcagctacttgctgaccatttcctgcttctcaagctgcagagaagcttttcattcccacccccacccggaacctccccttgcctaacatttcccctctatggtaacatctctgacttctctacctcctctgtgctcaggtgactccacatcttctgccccagtgtgtccccacctctcccagcctgtatacccagattactttggtgaactgagagctggagtactgttcattcatttattcattcacccactcattcagcagacatatactgagtgctactttatgccagaccctgggctggcagctgtttggaggcaaagatgtatgaggccatctcaggagagactacttgttaggattcttgagttttgaccaacagaaatgaacttggaccaacttaagcaaggaaaaagcgttcatgggaaggatgctgggatagctcacaaaaccaaaagaatagctgaacaattaattggccctgggaagggtgggagctggggcaactacgaggcttgcctcccaggagctgctgcggttggcagatcaacaccaacttgccattggttctagtgggtccccttccactcaagattcaaattccaagtgaaagaacctggcctggagctcagggcttcatagagtgggaggggggcagtcttccaaaagatgcggactcttgccacatggaatggtggagtacggaagggtggaaagggtttggtaggtaaaccctgaagatgcttctaacacacgtgctgttctcccatctcacgtatgacgactctcccacaggtaaccaaaaccacatttctctctgcttagggaattcaagatcatatctaacttcgaattccaggggtaatgacacggcttctattctccaaagtccagtgtcattagggataatctccctctttcagttttatcacaattccattttgaaattctacaacctgtagattaactggtaaaattaaccatattcaaccaaaattgtataacccagcaagaatggaagaatgggtaaagtctacagtccatttctagaactggtcatgagaactcatgtttatgatgatggacttttgatctggtggagggacccaaaccttcagttctgaagctcattagtggtcctacctgtgtgacaggcatttactattggactggcagtcccaggacaaactccaggaatccccccatgtccatctctactcctgccctcttttacgtagcagcaatcatattttcccttgatagggttcatcattctagatactccgatgacttctttataatgagcctgaagtggcctggtggctgcctcagcttccagttcagttgaatagctactacgtctttgaggatgtgctccttgctgggggactaaactctccacgccagcccagtcccaaacctaaacctcgggtatgagaaaagcattgagatctagcaatagcagggccatgtccacactgcgtcctatccctgaaggagaaacagcgccaggtatggttgccggctccaagcgcatgctgcctcctgcaggcctgacccagcctctcggggtgttgtttctggtgccatagttgaattttcaacaaaccatttcaccaccctctcaagacagctgctgctggtttgtgggttcctgacaagatgagtgaatgcctgcccatcaacccgttactattcttttagctgtaaagtgaattctctggttgggtgcagtatgtgaggaggtcacatgatgtttatggcatttgagaattccatggatattgatggcaggagaggcatgatgggttagaaaagcaaatccaaatccagaacaagggcccaaaagggccaagacaaattactgcccctctcagagccacaggtgtagacaggtgaaaacactggacagtgagtgagctacccacacacgacccactggtgccttcagagccttagcctggagcgacagtgtaccgttgataatggaacgcactggccatgccagactttatggctaggcggtcagataacactacgaggggcagcatggccaccaagtgtgccagggccaagtgttcaggctctcccagagcccagtggtgagccagaagggcattttgtacaaggataatggttactttttggccagagcatcacttggctccaaatcctgggttcccgtatcatattttcttgtcaggacttaccgcaagctatgtatggctccgcggtatgccacccatggaaagacacctcatgcaccattgacctgccaggtcacgtggcctgatggcagcgtcggctgcacaaaagactttcccagctgcaatgccttcgcctgctctaggcccaccccaaagctggcagtcttctaggtcagttggtaaatgggttagaacaagatgccccaaagtggcataaattgcatggaattaggccttagtggcgagggattcgacatacagtcatttgtcctacattgtgaaggaaacattctgacctcaaacagatccctcaaccccagaactttatagaaggggcagaccttggcattttcacatgatttatctcccactctgattcacatatgtttgaccaaggcactgggcagctgccaatttcccgtcccttctgtagtcccagatgaatggatacagacctctttggggaaggctgcaaggaaggttcacaacatgcatctaagtgttaaaataagtttttccttcaaaaatacatttgacttcctctccatttaaggtctggaaatcaagtgggagatcttgactttaccttggcacttgagacagaactgttggcccagaagtctttagttaaggtcattactaggccatatcttaggggcgtctggcctttttcattcctgggacccacagctcgaggtctggtttccatgccctatcccttacgatgagcgccctattttgttccttctgtctatctctgttgctgagatcagggagcccacgttcacagcagctctttcaagcagcctcccaggcctagagaggaaaatcagcagagcctcgtgaatgtatttctcgtggcaagaagggagctcatcttctgggtcctgccagagggcagtgagggggttgatgggctgggtgcatgccagggacccaatcaagcatttttatcttctgaaatctttgaattcctgcctttcttggatgtttggtcttttgatataatttagcatgggccaacatttggtccagatttgtattagccaagccctcctaaaatagtaataacagtatctggcgatttgagcttttacgtagaatgtagaatctctggtgagtgaacatatcaataaagacaacctgaaccaaaattaaaaaaaaaaaaaaaaaaaa

SEQ ID NO: 881 - DNA, 7042 bp, Homo sapiens
aattgagccaaccagggctggcgggagggcgcttccttctggagctgggtcctgactagggaccgcctgggtgaggtgaggacctggtggccgcagttgtggcactgtgcgcaggcgctgaactgaccggacggagcgggcggctgtggcctcgccagctggtttaaaaatatccttttttgctgaaggaacacatttgctggtatagtttcagaatgtcaagtactgtgtcctactggatcttaaattctacaaggaacagcattgccacattgcaagggggtagacgcttatactccaggtatgtctcaaataggaataaattaaaatggaggctcttttcccgggtgccacccaccctaaacagttccccatgtggtggctttactctgtgcaaagcctacagacacacatcaacagaggaagatgattttcacttgcaactcagccctgagcagataaatgaagtgcttcgagctggcgagacaacccacaagattcttgaccttgaaagcagagtcccaaattcagtgttgcggtttgagagcaaccagctggctgccaattccccagtggaggaccggcgaggtgtagcctcctgcctgcaaaccaatggactgatgtttggcatcttcgatggacatggtggtcatgcatgtgcccaagcagtgagcgagaggctcttctactatgtggcagtgtccctgatgtcccaccagaccctggagcacatggagggagctatggaaagcatgaaacccttgctgcccatcctgcattggctcaagcacccaggggacagtatctacaaggatgtcacatctgtgcatcttgaccacctccgtgtctattggcaggaactgcttgatttgcacatggaaatgggactaagcattgaagaagcattaatgtactccttccagagactggattctgacatctcgctggaaatccaggcccccctggaagatgaggtgacaaggaacctgtcactccaggttgctttctctggggcaacagcttgcatggcccatgttgatggaattcacttgcacgtggcaaatgctggtgactgccgagccatccttggtgtccaagaggacaatggcatgtggtcttgtctgccccttacacgtgaccacaatgcctggaaccaggccgagctgtcccggctaaagagggagcaccctgagtcagaggacaggacgatcatcatggaggacaggctactgggcgtcctcatcccctgcagggcctttggggatgttcagctgaagtggagtaaagagttgcagcgcagcattctggagaggggcttcaataccgaggccctcaacatttaccagttcacacccccacactactacactccaccctacctgactgctgagcctgaggtcacataccacaggctgaggccccaggataagttccttgtgctggcctcagatggcctgtgggacatgctgagcaatgaggacgtggtaaggctggtggtggggcacctggctgaggcagattggcacaagacagacctggcccagagacccgccaacttggggctcatgcagagcctgctgctgcagaggaaagccagcgggctccacgaggctgaccaaaatgcagccacgcggctgatcagacatgccatcgggaacaatgagtatggggagatggaggcagagcggctggcggcgatgctgacattgccagaggacttggcgaggatgtacagggatgatatcactgtcactgtggtgtattttaactcagaatcaatcggtgcatattacaaggggggttaagaatctcccatcctattgtcaaggttaacataaatgctcttctaaaatgtttcacttactcctaaactagctatccaaaccttactattaaaagcgcaggcagatttaatttgctaaatagactaacaggaggaaaaaaacaaacagcctagctttaaaaaacagtgaaatagcagtgatttcatgtccctgtatgttctgattaagtcttatatgcagagaggacagagcataaagtctatagaattggcttgggcttgtgtagccccagtcatttgataaagatgttgttaaactgtgtcagcctgagccttcaaagggtaaatttaatcatgattctgagaataaagaacttcaggagcttcttaggtcttgccacaaaaatctgcaaatttgataattctcctgaattcacaatcatggacttgtagactatgaagagatattttatttgtttgtcttttatttaaattactaaggtctaggtttacaaagcatactacaggacccttttctatgcaatatcctaacttttttttttgtgattatgcttgtgagaaattttgtaatactacattctagttctgttttcgtttattttaaaactgaatccttaaacttgcaaacacgcctactgtaagcatgcttggaatgacttgttttggttttcagctgataggatctatgcctctggaccagctgaacttactggtgcagctttttgtgccctctactgagtcccattccagaaactttgagccatgctaggaggtaactagtctatgccttaactcctgacctttcctgcattagtaaaatttcctcctgggctgagcctttgggggttgattcacagcatttaagctttctgattatacctctcaaacattcttctgtcaattccacacaatccttctacctctgctatgctgaacccctcattcaccctgcacctgccaactgcaaaatattgtctgaaagaatctttcacatgttcctgcttcctatggctgcaggaaaggagaaaatgtgattgcatgtggtagttgtggtgatagacgtttagacaggacaggttaatttagcggattgtggacttaagattcaacctctatctggagaggtgaaaacacaaaggcttaaggacaacagtttctaaccaagtttctctgaatcctttcctgagaggtggtgggcaggagggaggagtgagacttatcagatgggacgcttgccccaagactgtgggataaaccaccattgctagtcctcaggaattagaccatatttagtataggagttggggcaaaaataaaagtgtaatttgtaatggtttctgtgggctgtagactctttgtatttacttggaaattcagttatgtggatccattttggagatgaatttcatctcatgagttgctgtggcatttaaacaacaggaaatgtgtccctaaatggaaacaaatataatcccacaaaaccaacaattttatttgcctctactacgtcaggcagaattcttcaattaagttgaactacatttgttgatcccttttctcatcttacccctttatgccacctactgaaaagaaaaacaaatagctaggtttggtttcctgttttttgtctatgtcccagctgacattcagtcaaatgttgggatacttctaatttggtggtgtttctttgtacatttttcagtgcaactgtttagtcatgtgttttcatctaagaaattatcttttgaatatttaagccttgatccttttattctgaaaccattaatattccttcttggctgggtgcagtagtttacgcctgtaatcccagcactgtgggaggccgaggcggatggatcacctgaggtcgggaattcgagaccagcctgaccaacatggagaaactccatctctactaaaaatacaaaattagccaggtgtggtggtgcatgcctgtaatcccagctactcgggaggctgaggcaggaaaatcacttgaacccgggaggcggaggttgcggtgagccaagatcgcaccattgcactccagcctgggcaacaagagtgaaactctgtctcaaaaaaaaaaaaaaaaaatccatcttatctcttagtccgtccttccttccttccttccttccttccttccttccttccttccttccttccttccttccttccttcctctctctctctttctttctttctttccttcttgacagggtctccctgtagccaggctggagtgcaatggcatgatcttggctcactgcaacctctgcagcccaggctcaaacgatcctcctgcctcagcctcccgagtagctgggactatgcaccaccatgcctggctaatttttttaattttttgtagagacagggttttgccatgttgcccaggctggtctcaaactcctagactcaagcaatctgcccacctcggcctcccaaggtgctgggatgataggcatgagccaccgcacccagcctatctcctagatcttgaatcaaaaataaaatgtaaatcacttccattctgctagcatgagggtttgttgctaaaattgaggattctatctgacgtttactttttgttgttttttgagacaaggtcttgctttgtcgcccatgctggagtgcagtggcatcattataactcactgtcaaactcctggactccaatgttccctccccttttagcctcccaagtagctgggtctacaggcatgaaccatcaggcccagataattaaaaaaactttttttggtgaaaacatgatcttgctatgttgctcaggctggttgtctggcattttctttgtcctttattctttatactagctaaaccctggagtatccttgaagcctttactggcatacagagtacctgaatcttactttggagcctagcatgggtcataaatatatctgattcattaacctgtgagacagctgagagaacacagactccttacctgtatctccaggcatatctggtttttctctgcctaatagattttcctgctttctagttagtaatattgagaaagaagaaaggcttatttatcatttgctttttttccactgtgaatcatctgttctttccatgaacattctggggagcacctcctgattaaactcctgtctccctgaccactatcctgctgtcattggacttcttgaagcacatgggctactgccccaggacactgggatttgagaggagtttagtggtaattgtcaggtctttcaaagcatttattattccttttatacggagatttcagtattgagacttaaaatgaactgaaaaatgagattgaacatttaatattttggatgtaacttttgaagaaagtatgctttggtgcttaaaattgtatatgattttaggtaagaaactttgataatattggcataatttagatttattttctttcttttttttgagacagtctcactcagtcgcccaggctgaagtgcagtgacacagtctcagctcactgcaacgtctgcctcccagattgaagtgactctcgtgcctctgccacagagtagctgggattacaggcatgcaccaccacacaccgctaattttttgtatttttagtagagacagagtttcaccatgttggccaggctgcgaactcctgagctcaagtgatcctcccacctcagcttcccaaagtgctagcattacaggcatgagccaccacacctcaccagatttttaaaaaatatataactgcatctctcttgattctggggcttggtaaaaatggatagataagatagtattctaaattcaaattcgtggctaggcacagtggcccacacctgtaatcccagcactttgggattccaagacagaagactcacttgagtacagtatgagaccagcctgggcaacatagatcttgcctctacaaaaaaaaaaaaaaatagccaggtgtggcacatgcctgtagtctcagctgcttggaaggctgaaatgagaggatctcttgagcccaggaggtctaggccagagtgagctgtgatcgtgccattgcactccagactgagtgacagagtgagactgtgtctaaaaaaaaagtttgaattaaaaaaaaaaaaaaaaaagtcggctgtgcacggtggctcatgcctgtgatcccagcactttcggaggccaaagtgggtggattacctgaggtcaggagtttgagaccagcctgaccaacatggtaaaactccatctctactaaaaatacaaaaattagcctggaatagtggcgcatgcctgtaatcccagctacttgtgaggctgaggcaggagaatcccttgaacccagaaggcagaggttgcagtgagctgagattgtgccattgcactccagcctgggcaacatgagcgaaactccatctcaaaaaaacaaaaacaaaaaacaaactcaaattagcatgatagatcaggctacttagattcagctttctgagatgttatttgttaacattaaggctaatttattataatgaaaatgtaaactttgaggtatgttaatatataaacatctttttcctttggcctaaaaggtctttagtattcagcacactgggtaaagttcagtttagacacaatcaaattggcatcttttaaacataagtgaaatatagagagcttgaacttgagttacttaaagaagatacagtataattaattatacagaacaaaacaaagatgtgtttagagtgactctggcctgactcttgtccatcagcccctagtagcctatcttcagcctttgggaagtcttaacttcccaggttaaactagaatattctggaactgagctgtccaaatttcatcttaaagtggatcatttgactctgaaacacgattctcatggcagaaaaagccctggtgtttccttggagctggggataaaggccagtgagccagcctgtgatgagagctgcccctggcactatctgagtggaaagctcattgggacagccatgcagctatcagagccgactgaagccctgtcccttacccctcaggcacctgatgcttaacttgcctcctgggaaataatgatctagcatttacttggaacaatgattaatcatgttctttaataattgctgacatttgtattttaagctgtataccaatgttcgtatttgacattgattttctaaccattagagatatttaattaaaacttggaaatgaaagaaacaaaaaaaaaaaaaa

SEQ ID NO: 882 - DNA, 12096 bp, Homo sapiens; identical to SEQ ID NO: 33

SEQ ID NO: 883 - DNA, 6196 bp, Homo sapiens
gaggcgcgtgtccgtgcactagaggcccccgtgcgtgacacaggccgatgagctcctgcgggctgcacccacgcggagtcacagaccgaaaagcccgcggtgtcgagcgcaggcggaggtacatggccccgacgggaggcgcgcggcgagcacccggagctcggctccctgcctgagcacggcagccgcgcctccgcccgcgcgtcctcgcccctccggccggcagcccgcggacatgatcgtgtagcctcctcctgggctgggatttgtttgaagattttcttcatggaagcgatgtccccccagcaggagactctagggggacagccggggcgctcctcttccctgacaggagtgtctcggctcgcgggaggcagctgcaccaagaagaaaatgaaaacactagcagaaaggaggaggagcgctccatctcttatcctggataaagccctacaaaaacggcctactaccagggacagtccttctgctagtgttgacacatgcacatttctgtcatcattagtgtgctccaataggactctgctgattgatggccgggcagaactcaaaagaggcctccagaggcaggagcggcatcttttcctattcaatgatctgtttgttgtggccaaaatcaaatataacaataactttaagataaaaaataaaattaaattaactgatatgtggacagcaagctgtgtggatgaagtgggagaaggcaacaccaatgccatgaaatcctttgttttgggctggcccacagtgaactttgtggccactttcagttctccagaacaaaaggacaaatggctctctctccttcagagatacatcaatctagagaaagaaaaggactacccgaagagcattcccctcaaaatcttcgccaaggacattgggaattgtgcctactctaaaactataacagtaatgaattcagatacagcgaatgaagttatcaacatgtcattaccaatgctagggataactggctctgagagagattaccagttgtgggtcaattctggcaaagaagaggctccatacccactcattgggcatgaatatccatatggaattaaaatgagccatcttcgagactctgcactcctgacaccgggatcaaaggactctaccacccctttcaacctccaggagcccttccttatggaacagctcccccgagagatgcagtgccagttcatcctgaagcccagccgcctggctgcagcccagcaactgagtgattcaggtcataagacatttaaaaggagaagatctatcataaactgggccttctggcgaggttctagcactcacctggacaacttgccctcatcgccaacatcacctatgccaggacagctctttggaatttctctgccaaatatttgtgagaatgacaatctgcccaaacctgtcttggatatgcttttctttcttaatcaaaaaggacctctcaccaaaggtatcttcaggcaatcagccaatgtgaaatcctgcagagaactaaaagagaaattgaattctggagtcgaagtacacctagactgtgaatctatttttgtgatagcatctgtcttaaaggattttctgcgaaatattccaggaagtattttttcatcagatctctatgatcactgggtctctgtaatggatcaaggaaatgatgaagagaaaataaatactgttcaaaggctattagaccagcttccgagagccaatgttgttctcctaaggtatctttttggggtgttacacaacattgagcaacattcctcatccaatcagatgactgcatttaatttagctgtgtgtgtcgctccaagtattctttggcctcctgcttcctccagcccagaactagaaaacgaatttacaaaaaaggtttccctgcttatacaatttctgattgagaattgccttaggatatttggagaagaaatcacttccctcttcagagaggtttcagtgagatgtgacactagagagaatgcctcagatatttcttgctttcaactgaatgactcctcctatgacagcttggaaaatgagctaaatgaggatgttgatgcaccatgcagtgacttggtaaagaaacttggccaggggagcagaagcatggactctgtcttaaccctcagtgactatgatcttgaccagcccgaggtggaaggccttttaaccctaagcgactttgacttggcccattctaaagatgaagatgttcaaatgaaacggcctcttgaatccaagccggtgaacattttagtgtacacaaagatcccactgcgggatcatgccagggccccatctgccatgtgcacacccagctacctgtccacagctgcagcaaatgctgcaaaaagcctgaggcgacaccggcgttgctcagagcccagcatcgactatctggattcaaagctttcctacctcagggagttttatcagaaaaagctacgcaagtccagctgtgatgcaattctttctcaaaaagatgaagactatctgaagcagaatcaacccctccaggaggaaggaaagacatgttttaaacagagtttagtcacaggcactgatgtcagcaagaaaaatgccactactcaaaacactaagaagaaaagcttgtctggtagtgaaggaaatcacgtgaaacttttccctaagtctaagccagtggccatttctgtggcatcttatagtcctatgtcctcacaggatcattccaagaaccagccctttgatgtgaatacatctggatactccccaccacacacagcagatgccctcaagggtccaaggacacatcggcgctgctcagagcccaacatagaagaccagaaccgcaagctgacctatctcaggggaatttattcaaagaaacaacataaaaccagctgtgaagctggtctcttgcatggagaggaggattatctcaaacggcataagtctttgcaaatggaggggcagaagctcattaatcagagtttagtcatggggattgaggtgggcaagagtagtgccacaaaccaaaacactgagaaggttttacccccaagattaaacctttgcccaaggaccagctattccagcttatcctccccaggcacttccccatccggctcatcagtaagctcccaagacagtgctttttctcagatttctgaacactctgtgtttacacccactgagacttcctctccaatagattgcacttttcaggctcagagaaaacgggaagacctttctcctgactttagcaatgccagccatgtttccggaatgcccggtccctcatcagggcaggcttgcagccgcccagcctatacaaagaaggacaccatggagtggcattcacaaatgcattctgtaactcttcatcccagcacatggttgagaaatggtgtggccagtttgaaaaactggtccctcaaaaagaaagcaaaggcagccagaccagaggaagagaaaatagcttctccaaaaggacccttagagccacccccacatgcttctggtgttccagaagccaactcactgcaagaggaacaaaaagacttgcccttaagggcagctgaaggactgtcccctgtgcagtcagcccaaaggtgtagttcttctcccttccaggactcagagagacactgtagctctccattcagcctggtggagagcagacttaagctgtgcatgaagtcacatgaggaaatagagcctggtagtcagagctcttctggttctctgccttgggaaagagcctcagccagctcttggactctagaggatgcgaccagcccagactcagggcctacagtggtctgcgacattgaggacaggtatttaaccaaagacatttaagcatagtaagaatctgatgtccacaagaacaggaactgggttaataataatagacaataattattatgacccctttgtataagatacctgggagaggtagcataaggattatcattgctaatacttaggacaacgaaataattctctttattgagactacttgacaaatactttatgctaaaaattttgtcacctaagtgtttgggaggctttttcttattaaaggttgggattggtcctgtcatgtggttttagagatactaacagagggctagagaaagcatcttctgcagaggaagcacttatgggaacagtctgtgagattgatgtcctgagaagaccaagatatcaggaatgaggaataggggcctgaggagagaggggaagggtacagagaaaccatctacattccatggaatgtttttaataagtaggcaagaaaaatgccactaatcaaagcattaagtgtgtccagtaatgaagaacatcatataaaatctttccctaaatctaagccagtggccatttttgtgggatcttactaatcacgtgtccttacagaatcattccaagaaccagcccattgctacagctagagtggagaaaaacagagtgactcaaaagccatgggtaccatgatatcagttttgttggttgtatttgtcggtttgttttttcattcatgttgaagtgctttgcaaggcttcaggaaacagagttgtgaggagaaagaagaaaatggctgcccatttcagtaccctttcaaaggtatctctgcctaggaacattcttcagaaatgcaacttcttctatttagaaggtgacctcctgacagcgttcactctcaatatggaggaaaagaccacaacaactgtcctttctcaattacacaaatgctgttaaaatgtgatcaaaccatggcatcactttgctgaaatgtttctgcacagtcctgcctcttagattacagtcagccagaaaaacatacttataaatcatcccttttctgatttttgtagtttggcaattgagagagcaatattgaggttggccggttataaggagtcccacaatagaatacccaacaaagtggctgccaggccttctcagacagccatttgctttgggttttgcttccagacgttgttccatatttttgccccaaatgtttcatggcttataccccattggtttattttatatccatggacctttctttctctgctttcttgacttaaaggttgcagcagtacatctcgtcacctaggaatagattatcaggccttgccaactagtatgcagggatggcactaaaaatggatgtgcatcttctttcacattaactactaacctataagaagttgctctgagcccatttatttaaactctttagttcaccatcagatggacctttctctcacaagctagcttattccaaattatttgtcttattaatcaccagaaaatggtcatatcaaatgttctttcttttttgttctaaaggttgcattttcagttataggggaaaaaatattttctctaagatagaagaagttatttcagtattagctataggtgctacctacctcttggggacatggccctgtttgcgctaaccattacaatgatcttttagaactctgtatccaaagagctacttcgtgacactggccatctgagtcacagatgtgaagtcgatttcactttataactaaccagtcctacatattaagacttctaagtgtccatatgcatcttttttggtataatatataaagtcagcagggactcccctttcccttagggcatactactgtcagtcagaactgcaagatgtgaatgaagctcttaacggcttggagtgtctttctggaagaaattgccttttttttttttttcatgttagcaggtaaaaaatcattcacccaatttgaagcatagaagaaaatagttgctgaggttttttaataaccattcctactatctgtgttcccttagatactcctgtaattcttaatgtgaatagtttgttaatattgctgtaaagtattatattgtatgatttgaagacagactatatgtcattttattatactccatcaatctataatatattagactgatgctttatctaaaatgctttgagtttgtataatatatcttgacaaattttactaccatatgttatgtaataaatgtgtatttttgtacttgcagaaactgctgctaacttttaaagttgtttggttttcaaggcactgataatggatatgtatgaagtccatgctgtctgttaaataaaatgccattctgcagaattaaccatcccaccaga

SEQ ID NO: 884 - DNA, 4725 bp, Homo sapiens
gcacgcgcaccggggcctcagccatggcgaccgtgctgtccagggcgctcaagctgccggggaagaagagcccagacctaggggagtatgatccacttacccaggctgacagtgatgagagcgaagacgatctggtgcttaacctgcagaagaatggaggggtcaaaaatgggaagagtcctttgggagaagcgccagaacccgactcagatgctgaggttgcagaggctgcaaagccacatctttcagaagtcaccacggagggctacccctcagaaccccttgggggcctggaacagaaggcggcctcctccctggtgtcatatgtgcgcacgtctgtcttcctgctgactttggggatctcgatgatcctggtgctcctgtgtgctttcctgatcccctgtcctcccagagatctgcacagcacctggagccgccacttgggctcccagggaggtggggacctgtctccattggaattggctgatgtgaatggagatggcctgcgtgatgtgcttctctcctttgtgatgtcaaggaacgggagtgcagtaggtgtctcaagaccagctgctaatcttgtatgcctttcggggatgaatggcagcacactgtggtctagtcttctccctgaggaggctcgagatatcacatgtttggagctgatgccaggaagcttggctgaaaccatctgccttgtgacagggacacacaagatgctcagcgcattcaatgcaacgtcagggaaagccatttggactttaaacccaaactacttgtccaacggtaccttggctgccccagttgtggtactgccagacttggatgaagacggtgttcgagaccttgtggttctggccattggggaattgcagccagatctgtgctttctgctggtgtctggccggaccggaaatccagtgggtcgacctgtgaagtacaacatcgttggagttgggaatctgattggtcctcaggtttacatcaccacaaatggggctgtctacatcctgtttggctttggaaatatacaagctgtcgcactgcgggacatttttgttcaggcccaaaatcgagacagctcaccaccttctctgcagatagaagagccagaatgggaaaagcgaagatccatcaacctgtctgagctcattgatgtttacagtgatggtgttgaactactccagatggtgaaggcaccagattccaactgcagcaaccttctgattacaaccagacaaagccttgtgctgcttcgggggcaaaatctgacaccttactgggcattgagacttcaaggcctgcgcagccagcctactcctggatatttcactgatgatcagacattagacttccttctgcagatacaggatggagttgggatgaaaaagatgatggttgtggatggtgactctggctccattgtttggagttaccgtgctccgtgtcacatgaaagaaacgccagccacctcagcagttacttcagaccagaagtctgtcttcctcttctgggccgaagggctgtcagctgcatctcccaattccgatatcatcctaggaactgagccgcccagccttcaccacctttacctcctgcatcctgcgttcccctccatccttctggatctggccaacaccaccggcacagtgacggcttcagaggttggaattaacgacctctggaaagatgccttttatgttaccaggacaacagggccaagctccgaaggccatccagcagccctggtggtcagcaagcttagtctacggtgggcactaatggagggccagatggctcagctacaggagtccacccccaaaattggccgtggggagctgcgaagatttctctctaggataaagtttgttgaagctccctacgagatctaatctgatggaatcttcagttgcagaagaagtgaacagagtggataccctctctactctcctgtcactgtaaaatcagttctatggagagaagacttcttcgtcctcatttaccacctccctgatggttgcaaaggcttgggaaggcatgttggagtctttgacggcagcatgatctatttggctggggcatcttacctaccttttcagtccctgcattaatcccctctaggaactctgcgtggatcgtttggaaatgtgaatctcttaagtatttaatttttttggtatgtctaatttatgaagtcttgctgggaaagccagtgaagtctatgactaggaaacattttgttgtacattgtgctgtgtgtgtgtatattttagtgttgtggtgaagttattttccaggtatgtcctaagcttcagggatccagtttcttgtccttctgaaatatatctggtttgtttggtcattttgagacttccagatgccctacctctgatgttgagggccacttatttctctccttattctttcccacctgtaccttggctacttccaaattgtagacagaatgagaaagatttatagtggaagactgagttagccatccaagcattttcatctctcttgttttatatcctatttccttagattttccatccatgtctattaagtgaccacaagaataactatattcctatcacaaggggagcaagaggatgtagtctcagtgacccatctctgaccaagtccacatgttgtgttatatgtggctctgatggttctgccagtcatgatcttttttctgtggcgacatcagaagtgtatgtttgcatgctgtcttcaacttagaggagaactggaagtcaggagcctttgatgtccttatcctgctgtatgtcttctctgcatctttttctatagggcaccctccttagctcccctcactctgttttctcttctattcagggatatgtttctggactttttcttctgctacttgagtccaggatgcaaccattttgtcctgcatctcttctttcctgtagagcctttgaagcattgtattttgggaaaattcttctgtaaatactataacttttataaatggttaagttatttagaattatctccagtgcttacttctcccttcttctgtataaatctgctacttcaattaagttctcctctaaacttttaggtcattgtttatatagcagaaaattcaatgttagcggatggaaaactgcttcttgaataaccttgataggtcatccctgagtgcacctcaggttctctctttacctgggcttgtatcttttttttttttttttttttttttttgagacagagttttgctcttgtcgcccaggctggagtgcagtggcacaatctcggctcactgcaaccttcgcctcctgggttcaagcgattctccagccttagcctcccaagtagctgggactacaggtgcccgctaccatgcctggctaatttttttttttgtatttttagtagagacggggtttcaccatgttggccaggctggtcacgaactcctgacctcagataatccacctgcttctgcctcccaaagtgctgggattacaggcgtgagccaccatgcccggctgggcttgtatcttttagcttgtgttagtaaaaggattctagaaaattatgaagtccagattcaaagggatctctgttaattacccactgacaggcattatgacctaacaggaggttggtagcagtagatccaagcatgcatgttgcctggcctgtagattggccttatcaggtttctgggtgcctctgccttaagatcctgaaggcaaattttgtttcaacagtttggaagtcatctgtgggtccagcttgactttggaggaataagaagatacttctagagtatgggaatgattccagataatttctgggatttgaatctacttgagtttaagggcctgggacctaatttggtttagtatagaatttgaagaattaatttataggcagctgaatacccaaaacttgggtggtggtcctgtggtttggctgagctgtccgggcataacctggttctctgttatgttaaggctttctgggaagccagccactctgcgcaggagtgaaacatgaagttgttttctgaggacctgttttggtgggattgtttgggcagaggactgtgtttatgcagggcaaatcccagaaagataagaggaagctagagaaacttaatgtacctgaattcttcatggtgtatttgcaaactaacttaacatagattcttttgactatggtaagtttgaatctctccttgccaaacaacattataagtttagttttcttcttcctcttgcagccggtacagaaaggtgtaagtggtggctgaaaattgaggaagcttcatctgaccaatgtgggtgctggtttcttgtgaaatgtgtccctaagcctccttctccttgcaggcagccacccacccaggtgtctaagataggacatgctcctttctttctctaatcccatcctgaggttgccggcaaagccaatatgaccactactgagaaatagtaatgacttctacaaatgcaagggtcttaccctcctctttcccttaaacaccctcccttttccttagaccccgtttttgccatcccccaaatgtgtggtatggtgaaactaatcccctgaatgtgaattgctatccttattgccctattaaagaagagccagctggtatattgtcaggaagcactatttaaaatgtgaactgttatagagtaaataaataaatactctacaggaaaaaaaaaaaaaaaa

SEQ ID NO: 885 - DNA, 5860 bp, Homo sapiens
ccgcgcgccgcctcacgctaccctgcaggccgcccgcgtctgccctcgcggcgcgctcccgggcccggccgcggttccccactcgggccggctggctcgcgggttctctcgccccgcccccctcggcgccaccgctgggcgcttgcgcggggcgcgtggccgtggccagggtctccgccgcagcccgagcagccgccgccgcctcagtcagtcagtcagtccccagcaatggcggacggaggtgagcgagaggagctgctctcgccgtcaccggtctctccggctaagcggcagtgttcgtggcccagcccgcaggctcatcaccctcgcggttcgcctggggcagccggcggaggggcagggggcgtcggcagcagctgcctggtcctcggggcccgcccccacctgcagccggattccttactggactgcgccgccaagacggtggcggaaaagtgggcatacgaacgggtggaggagcgcttcgagcggatcccggagcccgtgcagcgccgcatcgtctactggtccttcccgcggaatgagcgggagatctgcatgtactccagcttccagtaccggggcggccccggcgccggcgctgctggcggcgccgcgggggcttcgccggccgaggaggggccgcagccaccccccggggccgccgctccggccggctccgcccccgggggcgtcgcggctggggcatcccccgggctgggcgcaggggccggcgcggccggctgcggtggcgaggggctcccgttccgccggggcatccgtctgctggacagcggctccgtggagaacgtgctgcaagtcggctttcatctgagtggcacagtaactgagctggccactgcctctgaaccagcagtgacttataaagttgcaatcagttttgatcgatgcaaaatcacctcagtgacatgtggctgtgggaacaaggacatattctactgtgcccatgtggtagcactctcactctacaggatccgtaaaccagaccaagtcaaattgcgtcttcctatctccgaaacccttttccagatgaatagggaccagctacaaaagtttattcaatatttaatcacggcacaccacactgaagttcttcctactgcacagaaactggcagatgagattctatcctccaactcagaaatcaaccaagtgaatggtgcccctgaccccacagctggggccagcattgacgatgagaactgttggcatttggatgaagaacaggtgaaagaacaagtgaagctttttctctcccagggcggttactgtggctctggaaagcaactcaactcaatgtttgccaaggttcgagaaatgctgcggatgagagattccaatggagcaaggatgctgacactaataactgagcagtttgtggctgacccacgactcacactctggaggcagcaaggaacaaacatgacagacaagtgcaggcagctctgggatgagctaggggctttatgggtgtgcataattttaaatccacactgcaaactggaggagaaatcctgctggctgcagcagctgcagaagtggagcgacctggatgtctgtcccctggaggatggaaactatggacatgagctgcccaacatcaccaatgcacttccccagagtgccattcacagcccagactccttatccagaccaagacgaacagtattcactagagccattgaggggcgtgaattacattggcaggatagccacctacagcgaataatcagcagtgatgtttatacagctcctgcctgccagcgggaaagtgaaagactactctttaattcccaaggccagccactgtggcttgagcatgtgcctacagcctgtgctcgagttgacgccctgcgttcccatggttatccaaaagaggccctcagactcacagtggccattattaatactctgaggttgcagcagcagcggcaactggaaatctacaagcatcagaagaaagaactgttgcagagaggaaccacaaccatcacaaacctggagggctgggtgggccaccccctggatcccatcgactgcctgtttctcactttgactgaggcctgccgcctgaatgatgatggctatctggagatgtcagatatgaatgaaagcagaccccctgtgtaccagcatgtacctgtggctgcaggctccccaaacagcagtgagtcctacctgtcattggccctggaagttgcactgatgggcctgggtcaacagaggttaatgcctgaaggcctctacgcacaggacaaggtatgccgtaatgaggagcagctcctgagccaactccaagagctgcagctggacgatgagctagtgcaaacactgcaaaaacaatgcatcttactgctggaaggaggtcctttcagcggtctgggagaagtcatccaccgagagagtgttcccatgcatacctttgccaagtatttgttctcagctctgctgcctcatgatccagacctgtcctataaattagccttacgtgccatgaggttacctgttttagaaaactcagcttctgcaggcgacacatcccaccctcaccatatggtgtctgtggtgcccagccgttatcctcgctggttcacgcttggacacttggaatcacagcagtgtgaactggcctccaccatgctgactgctgccaaaggagacactttgagactccgaacaattctggaagcaatacagaagcacattcattcttcctccctcatcttcaaactggcccaagatgcattcaagattgctactcccaccgacagtagtactgacagcaccctgctcaacgttgccctggaacttgggttacaggtgatgcggatgaccttatcaacccttaactggagacgcagggagatggtacgatggttggtgacctgtgctacagaagtgggtgtgcgggccctggtgagcatcttgcagagctggtacacactcttcacccctactgaggctactagtattgtagctgccacagccgtatcccacaccactatcctgcgcctcagtcttgactatccacagcgggaggaactggctagctgtgctcgcacactggctctacagtgtgctatgaaggatccacagagctgtgccctgtcagcccttacactctgtgagaaagaccacattgcctttgaggcagcctaccagattgccattgatgctgctgctggtggtatgacccattcacagctgttcaccatcgcccgctacatggagctccgtggctacccgctacgtgccttcaagctggcctcattggccatgagccatcttaacctggcctacaaccaggatactcacccagccatcaatgatgtgctctgggcttgtgctctcagccactctctgggcaagaatgagctggcagctctcatccccctggtggtgaagagtgtgcactgtgccacagtgctttcagacatcttacgacgctgcacagtgactgcacctggcctggccggcatcccaggccgccgaagctctggaaagctcatgtccactgacaaagctccattgcgccagttgctggatgccaccatcaatgcctatatcaacactacacactcacgcctaacacacatcagccctcgccactatggagagttcattgagtttctaagcaaggctcgggagaccttcctgctgccccaggatggccacctgcagtttgcccagttcatcgacaacctcaaacagatctacaaaggcaagaaaaagttgatgctgctggtgcgagagcgctttggctgagagagcagatagctcactgccagagcagcctgggttcccaggtagtatcaggtcaggccaagggcactgaaacatttgtccaccctgagagaactctgagcacctgtggatgaggccaaaggaccacagggctaaggatggggaaagtccagctctagtcgataatgcctaccttggcaagcttctgactacagcctactgttcatggaggagctgggccctgcagatcgaccagaaaccccacaacatgccacctcatgcccctatatcctgcgtgtcctgagcattggccctgtctcccttggcaaacacagaacactgttccatctcagggattgcttaaccagagaaacagacacatttgtgggactgtaaatactatatgtgttgctaattattgtaaacttgtaactatttataattctgcttctgatttgatgggcacttgaagtagctgtgggtaggaggatatgcttattttctgaggagactcacaaccatttctcaggtttcccttgcagagtgtttgctggtagcagtggaagagtgggggtgccaaggagaaaaatggccagttaggatcaacccaagtctagtctatgcagaatcccccacctacagacagggcatttatagtccagtggtgagtgagggacagaggccaggactggacttagacttttgcctcacaaaactgtgaggacattgaagctcctgcctcacacagcctcttcaggagcctgctgaacacctgagaaacaagtgcagggagaagatgaaggtctgggaagccgctgagttcataatattcatctactgtggtcacctttgtgttagcaagtgtgtggtttcatctataattgtgtgtgtgtatctttatggctaagtacatgtgtgtatgtacatagatacatctgtgcatgcctgtttgtgcacatatatatttatgtgtatgtgtcagttctatggctgtgtacctgtttgaatatgtgcacactggactgtgagtttctacgtgaggatatacacattttgtgtacatgtgaggatgcacatctttgtgcaaatgcactcatgtttgtgcatgtttagtatgtgtatctgcgtacacgagtgcatgtgtataaacatgtttgtatccatgtgtatgcttgttatccatgcatctgtgtctttatatgtgtaactgagcgtatttctacatgtagggatgtctgtgtattcatgtttgaggatctgcatcaatgtgtcctttttgccagatttctctttcccattcctcttaaatctctctcgccagctaaacgtttgttccccatctctgtgcctcctctattcattctctcaccaaacaagcttctaagcaccaatctccctctgccatcagattggctgctttagctccatagttctcttctcgcctcatacttgctttcttcccctgcctttctacctcaagcttcctcgccggcttttgtcacagtctcattgctcgctgacttggaggctagggctggtctgcacttagcctctcccttcctaatttctagccctagtgggcagtcctgtcttagccctggctgacctccatagtgtatcatgttcctgctaccttcctgacccctgtgctcagcctggaattgttataggaggtagcaagggcactcagaaaagtcagttggaaccagtgtcttggtgtttactgtttcatgtcttagttcctgagttgggggtggggtttgatagggaaggggtggtatagctagaatgtgaactaagaacttctccatctgctttactttttctttcttcgacaaactgtcaccttttttactccaaactgaccaagaagttgtatttgccatttgtggctactcaagtcttactgtccagccaagggcccctacgtctcagcccaatgggttggttaaaaaaaagagagaagccactctcatttctgtatcacagttgcccttttttagcaagtgtgtgaattcacagtgcttttctatgaataaatcatggatcacataaaagatcatttttctaaaaaaaaaaaaaaaaaaaaaaaaaa

SEQ ID NO: 886 - DNA, 13061 bp, Homo sapiens
tgcgttcggggctggggctggaggaggcagccacacgcgcgcacacgcacacgttcagaggagggcgagaggcagcggcataggctccatctgcagtgtcaatgcggcgctcccgctgaaggagggaaacgcggcgcgtccagtaggggagactgcattgctgagtcctggccctctgaggggacgactgtgcctgagtgctgctgtgccactgggacccgcctctgccatgaaagccatgccctggaactggacctgccttctctcccacctcctcatggtgggcatgggctcctccactttgctcacccggcagccagccccgctgtcccagaagcagcggtcatttgtcacattccgaggagagcccgccgagggtttcaatcacctggtggtggatgagaggacaggacacatttacttgggggccgtcaatcggatttacaagctctccagcgacctgaaggtcttggtgacgcatgagacagggccggacgaggacaaccccaagtgttacccaccccgcatcgtccagacctgcaatgagcccctgaccaccaccaacaatgtcaacaagatgctcctcatagactacaaggagaacaggctgattgcctgtgggagcctgtaccaaggcatctgcaagctgctgaggctggaggacctcttcaagctgggggagccttatcataagaaggagcactatctgtcaggtgtcaacgagagcggctcagtctttggagtgatcgtctcctacagcaacctggatgacaagctgttcattgccacggcagtggatgggaagcccgagtattttcccaccatctccagccggaaactgaccaagaactctgaggcggatggcatgttcgcgtacgtcttccatgatgagttcgtggcctcgatgattaagatcccttcggacaccttcaccatcatccctgactttgatatctactatgtctatggttttagcagtggcaactttgtctactttttgaccctccaacctgagatggtgtctccaccaggctccaccaccaaggagcaggtgtatacatccaagctcgtgaggctttgcaaggaggacacagccttcaactcctatgtagaggtgcccattggctgtgagcgcagtggggtggagtaccgcctgctgcaggctgcctacctgtccaaagcgggggccgtgcttggcaggacccttggagtccatccagatgatgacctgctcttcaccgtcttctccaagggccagaagcggaaaatgaaatccctggatgagtcggccctgtgcatcttcatcttgaagcagataaatgaccgcattaaggagcggctgcagtcttgttaccggggcgagggcacgctggacctggcctggctcaaggtgaaggacatcccctgcagcagtgcgctcttaaccattgacgataacttctgtggcctggacatgaatgctcccctgggagtgtccgacatggtgcgtggaattcccgtcttcacggaggacagggaccgcatgacgtctgtcatcgcatatgtctacaagaaccactctctggcctttgtgggcaccaaaagtggcaagctgaagaagatccgggtggatggacccaggggcaacgccctccagtatgagacggtgcaggtggtggaccccggcccagtcctccgggatatggccttctccaaggaccacgagcaactctacatcatgtcagagaggcagctcaccagagtccctgtggagtcctgtggtcagtatcagagctgcggcgagtgccttggctcaggcgacccccactgtggctggtgtgtgctgcacaacacttgcacccggaaggagcggtgtgagcggtccaaggagccccgcaggtttgcctcggagatgaagcagtgtgtccggctgacggtccatcccaacaatatctccgtctctcagtacaacgtgctgctggtcctggagacgtacaatgtcccggagctgtcagctggcgtcaactgcacctttgaggacctgtcagagatggatgggctggtcgtgggcaatcagatccagtgctactcccctgcagccaaggaggtgccccggatcatcacagagaatggggaccaccatgtcgtacagcttcagctcaaatcaaaggagaccggcatgaccttcgccagcaccagctttgtcttctacaattgcagcgtccacaattcgtgcctgtcctgcgtggagagtccataccgctgccactggtgtaaataccggcatgtctgcacccatgaccccaagacctgctccttccaggaaggccgagtgaagctgcccgaggactgcccccagctgctgcgagtggacaagatcctggtgcccgtggaggtgatcaagcctatcacgctgaaggccaagaacctcccccagccccagtctgggcagcgtggctacgaatgcatcctcaacattcagggcagcgagcagcgagtgcccgccctgcgcttcaacagctccagcgtacagtgccagaacacctcttattcctatgaagggatggagatcaacaacctgcccgtggagttgacagtcgtgtggaatgggcacttcaacattgacaacccagctcagaataaagttcacctctacaagtgtggagccatgcgtgagagctgcgggctgtgcctcaaggctgacccagacttcgcatgtggctggtgccagggcccaggccagtgcaccctgcgccagcactgccctgcccaggagagccagtggctggagctgtctggtgccaaaagcaagtgcacaaacccccgcatcacagagataatcccggtgacaggcccccgggaagggggcaccaaggtcactatccgaggggagaacctgggcctggaatttcgcgacatcgcctcccatgtcaaggttgctggcgtggagtgcagccctttagtggatggttacatccctgcagaacagatcgtgtgtgagatgggggaggccaagcccagccagcatgcaggcttcgtggagatctgcgtggctgtgtgtcggcctgaattcatggcccggtcctcacagctctattacttcatgacactgactctctcagatctgaagcccagccgggggcccatgtccggagggacccaagtgaccatcacaggcaccaacctgaatgccggaagcaacgtggtggtgatgtttggaaagcagccctgtctcttccacaggcgatctccatcctacattgtctgcaacaccacatcctcagatgaggtgctagagatgaaggtgtcggtgcaggtggacagggccaagatccaccaggacctggtctttcagtatgtggaagaccccaccatcgtgcggattgagccagaatggagcattgtcagtggaaacacacccatcgccgtatgggggacccacctggacctcatacagaacccccagatccgtgccaagcatggagggaaggagcacatcaatatctgtgaggttctgaacgctactgagatgacctgtcaggcgcccgccctcgctctgggtcctgaccaccagtcagacctgaccgagaggcccgaggagtttggcttcatcctggacaacgtccagtccctgctcatcctcaacaagaccaacttcacctactatcccaacccggtgtttgaggcctttggtccctcaggaatcctggagctcaagcctggcacgcccatcatcctaaagggcaagaacctgatcccgcctgtggctgggggcaacgtgaagctgaactacactgtgctggttggggagaagccgtgcaccgtgaccgtgtcagatgtccagctgctctgcgagtcccccaacctcatcggcaggcacaaagtgatggcccgtgtcggtggcatggagtactccccggggatggtgtacattgccccggacagcccgctcagcctgcccgccatcgtcagcatcgcagtggctggcggcctcctcatcattttcatcgtggccgtgctcattgcctataaacgcaagtcccgcgaaagtgacctcacgctgaagcggctgcagatgcagatggacaacctggagtcccgtgtggccctggagtgcaaggaagcctttgccgagctgcagacggacatccatgagctgaccagtgacctggatggagccgggattccgttcctggactatagaacttacaccatgcgggtgctgttcccaggaattgaagaccaccctgtcctccgggaccttgaggtcccgggctaccggcaggagcgtgtggagaaaggcctgaagctcttcgcccagctcatcaacaacaaggtgttcctgctgtccttcatccgcacgcttgagtcccagcgtagcttctccatgcgcgaccgtggcaacgtggcctcactcatcatgaccgtgctgcagagcaagctggagtacgccactgatgtgctgaagcagctgctggccgacctcattgacaagaacctggagagcaagaaccaccctaagctgctgctcaggaggactgagtcagtggctgagaagatgctgaccaattggtttactttcctcctctacaagttcctcaaggagtgtgctggggagcccctcttctccctgttctgtgccatcaagcagcagatggagaagggccccattgacgccatcacgggcgaggcccgctactccttgagcgaggacaagctcatccgccagcagattgactacaaaaccctggtcctgagctgtgtcagcccagacaatgccaacagccccgaggtcccagtaaagatcctcaactgtgacaccatcactcaggtcaaggagaagattctggatgccatcttcaagaatgtgccttgctcccaccggcccaaagctgcagatatggatctggagtggcgacaaggaagtggggcaaggatgatcttgcaggatgaagacatcaccaccaagattgagaatgattggaagcgactgaacacactggcccactaccaggtgccagatggttccgtggtggcattagtgtccaagcaggtgacagcctataacgcagtgaacaactccaccgtctccaggacctcagcaagtaaatatgaaaacatgatccggtacacgggcagccccgacagcctccgctcacggacacctatgatcactcctgacctggagagtggagtcaagatgtggcacctagtgaagaaccacgagcacggagaccagaaggagggggaccgggggagcaagatggtgtctgaaatctacctgacccgactcctggccactaagggcacactgcagaagtttgtggatgacctctttgagaccatcttcagcacggcacaccgtggctctgccctgcccctggccatcaagtacatgtttgacttcctggatgagcaggctgataaacatggcattcatgacccgcacgtccgccatacctggaagagcaattgcctgcccctgaggttttgggtcaacatgatcaagaacccgcagtttgtgtttgacatccataagaacagcatcacagacgcctgcctctctgtggtggctcagaccttcatggactcttgctccacgtcagagcaccggctgggcaaggactcgccctccaacaagctgctgtatgccaaggacatccccagctacaagaattgggtggagaggtattactcagacatagggaagatgccagccatcagcgaccaagacatgaacgcatacctggctgagcagtcccggatgcacatgaatgagttcaacaccatgagtgcactctcagagatcttctcctatgtgggcaaatacagcgaggagatccttggacctctggaccacgatgaccagtgtgggaagcagaaactggcctacaaactagaacaagtcataaccctcatgagcttagacagctgagaaccgtccttccagggccgccctggagggggacacaccaagccgtgcctcagtctagattatcatctttaccaagtgcaagttccgactggcatcagcagcatcccctgagcagcgctgtttctctctctttctctctgcctctttccgtttctccctccttcctggatctcttctcttccagttgctctgccaacacgattggaccaagccactgaccctcagttagtccaagaatggccaggcccatggcaagggagctgaccagaagatgtcagagaggcctctgtctcccaggtgctcctgaccctgtgcatgtcagcagcagggtgcaaataacgaatgaggagccagggacaggggacatttctgtgctgctacttcaccttccactttggcagcccctgctttggtctgagccttggcctagggaagaggcaaggaaggacttcagtattatctttactgggaagacatcacctggctctcccttcccacagttccatctccagtggttcagccagtggtctgatcgctttgcagctgtgagaagaaaggctacacctcctgcatgtggctggagcagggcatgtgtgggcagctgggaggtgctccttgaggctccttctcccccactgggctggtgtccagaggcttcctgtccttttccaggtctccagagggacctgcctgccctgcctgctcccccgccagtagaaagccaggcaggagaaagaatagcaattacattccaccatggagatgctcctgaccttttcatctgaatcctagtagcagaaatgtaacacagggggagaaaaggaaagagagttgcatctaccctggaagcagaatttgttttccatttaccctcaaattcaaatgagtcacaatcatagtcataggtctagtccactaccagagccctgagtgctgtcaagagaaagcatctatctccaccctcctttgtcaaccttcatcaagggtcaacgtgaaatgcagagtgcatctaggagattctacctccagccatctccatggctccatccccatcatccttcctgagaactccatagacggctggggccaacagcctagtccctgttccctctgcagaatccggtgccattgctatgcagatgactttgtcactgggctgtccagacctctttgggaatgatttcatcaacatctcagctgtctctcatcattctccttcctcatctcttcagcagtcatccttgaaagaaacagacttaagcaaagcctcacggagacagcccaaaatgccagccaacctcagcctccagcttgtcagatctgggagggacaaagagtcgagctgatgggcctggctggaattaagaagagggacatacaaatgaccttggccttggcatccatctccccatctgttcttacatctacagatgcacgattttagccaggcaggcaaatgtgtgcctagaaattgatactaggtaagcagaggctatggggagagatggtctaatggagggttctaggaacctttcatcctaaggagaccttaggtgctgtctggtgcagtctcccatcctaagcaggagtctctgttggcacctctgctctggagttgttcaccactatgggagacaaggagaaacatcttaggtgaggttgaggagaaggattcacagtcttgccttcactccccaaacatcagacatcattccttgtcacccactcagaatgagccccccttggggaagaaaccacaccatttccagcaaagtccatggagcatccggtacttttaagaacacttgcccctttggatatgaatatgtgcacatgtgtgtgagcacatgtatgtgtgtgtgtgtgtctgccccaggtgtaggcggaaagctcaaaaggatttcttgtcctttgtaggaggatttttgaagtgttccccttctctttccccttgctcatccattcatcctgcagcttcaggacatttcaacacttacttgctttctatgctgagagctggtgggtggaaggagagggcgcttgtccataggaaatcagggtggtcgcctgccgaggcctggaccttggaacagggcatcatgtgacatcgcagaggacagatggtggaaaagacatgagcaacctaatgggaagaggaaaatgggaaacaatgcattggaagaggaagaaaaaaaataaataaccaaaggttttggcaagtgcagtaccaggtggagaagcttgacttttctatccttgatcattttattccctcccaagaagtcagtcacaggacctggaaggccagaaagggtacatgtgggagacggtctgaggaagtacctcggtcactacaatatttttgcacatataaagggttggggaggaaagagacacaaacgtatttaacacagatttgctggatggaagctgcgtgtgtgaacgtgtgtatgagtgagtgcattttgattttttttttttttttttgcacagttaagagaaaaaatcaaacaagcagaaaaaaaaaagaaaaaagacttatcacggttctgctgaagcttttattttttactggatgatgattattgttattgttactttggcggtacaggactttattttattccatgtttttgttataagaaaaatttcaaacacctcagagaaatagaaaggttaggaagaaagaggagacaaggacagacaaattttctggctgtccccatttctcctgggggaggggtttggggctggtttgactttaattggtgggtgggttgtttctgccgctctgtttgctgcagtccccgtggcctgcttggggactgagaaatttgagccaggtatccagagccacagcccatcttgcttataaaaattatcttctgctgtttgttttccatttcttccgtttggattcttggtgcacgtgtgatatggtatttaaaagcaaagacaagcaacattgtcaaaaagctgtccttgccccccatcccccacccaaatcttttttccaaactcccccagggatcttccttaccccactggcagagcaaacatccaggggctgtccatgtggcttgcgggctcccagagaaaggaattgggccaactttgtcctgtgggatggaggccccttcacggcctccctcgaggcaaagttaatttgtagggtcaccattatgttgagtcatgagcagacagaaggagagaaaaggccatcttccttaccttcccctccaacttatcccgtaccctcccagggaaaatggtaccagactgagccatcaaaatcactgacaaagtttaggtgggaattttttttgcatgttggagagagaagggcttaaggtagcagggaagaagggggctttgtggggtcctaaattttaaggaataagtagaggaagacaagaaacagagtggtaggctggtcatttctcctggccacaagtccccccagatgcagcttttacccattctttgtccttccccataaggagagaccctgacatttcttggtagctgcaaatagtgccactaagtgaaggtggccatcatgccagttacttcctcaggaaaatattttcttgccttcttctttcagtatggttttaaatttgggaacagtggataacccaagtgtcccacaggccaaggtacattccaatggcagcatgatccctgcacccaaagccagcccctaaagcctaccccttgtgcacccgcagcctggtaagtgagcttggctgcttgtgaggagctacaagtgaaagagaagttattttaaataaatcccaaagtttgaggcagactgtccaggactgttcccaggaagaagcaggagttacccacaggaaaagtctctgacctggtcccctcaggcccagctacctgcgcccaccagcagtgaaggttgatgtactggcccagcatctccacctcccccatgcaaccaggtccctggtaccgtgtctcccgttgcatgtctggcttctgcctgtgctcctcctgccacgagcatcctccctgtccctcctcattccaccgtgtctctcctgcacacatagcctctgtcccagggcgatttatccacttgagtacaggagctgctcagacctctcagcccagccctctgtgactgccccagccccatcctaccccacccaaagctgccttcctggctgtaggagctccctcgtctagccaaggccctatgggtccccatccgaggatccacaagcaatgacttcccaaatgacctccactgcaagaagaatccttaccactgtttccagagccgtgaacgatgctgtgatgggcccaggtctcagcaccaccctctgtgacctaaaaagaaaagctcaatttccatctgtcttctttcccaggaccaaggggacacagtaatgtgaagtcaaatacttaaccgagcaaagggccagtattgttatcagtcaaggacaaacctcccacctcacagacagccaagcagtgagggaaagacagacagacataggtaggaaggtgctctgcaggcacaaggcccagagaagcccctctccgggaacttcccctgctccttccaggaacagtgagcccagtgagcagccccagccagctcttcaaggccttcaaggggtctttccatgactgagtcacctccaggagctcacctgacccccagagaagacctaccccaggcagctccgtgccctggcttctccccatgccccaaatccccccccgccatccctcctggtcctcgtctacatcaagggcctcttcccctcttcctgccagctctcaggacaggtgactgggaggccttgaaccctcagcctcttcctttaaaaaaaacaaaacaaaacaaaactgtgggccatttatttgggattttggagttgtttggtttttgtttgtatatcttaatagttcgaaagtaagaagggagccctgctatggatgttaagtccaaattactcggttagtgggagcaaaacctatgacttccaaggggatgaggagaggttcagaggacaggaggagcctcccccattgaaaaaaaaaaatgggtcaggacattccctggatgaggacaatgctaggggtggcatctcacatggctgctgctattcctggtgcttccccacacttttgacagatggagtccttctcctaccgcctcctgccacctcaccctacaggcattctctatgtaggaaacaagagccttattttatagagtggggagctgagacacagcctcaggtaacactgacacagctcccgaatgaggctgggacactctgcaaacctctcctcatggtgctaagggtggcatgctcttgacaggaaacctaaatgaccactcctctcatttggaaagtaatccactgcagtaaaagtttcagacatgcaagagagagtttttttttttttactacaaatttttgctcccccataaaattattttattagagggagtatccaagttttaaaagtatatagaattttttggttgtaagagaaatacatactcattaggatcccgattaaattccttgagtagactggtgcctaccagaaagcaaagcaaagttaaacaaaacgaaacaaaatccttcatatacaaaaagaactttctgtttgtattggcagaggtagtgaggtgattcaggtaggctgaaaatcctgggttgcgggagcctcactttattccattcccacccgctttgatgtctatgcttggctctctgggctgcccctggtactgccgaatcctacacatctcttatcagctttcctcaaactttaaggaggctctgtgagggatgggtcatgggaagacccaagctttccctccgccaggattgcaaaagcaagtagacttggtctatgcagctcttcttccagcaatttctttatttggaattagaacttcctttgttagtatctttgatcttttgactcaagcacattttggaagggctcccttacaaaagtagaatttaaaacagaggatacagttaaagagcaacccaaaggacgcttaagaaaccgagaccacttcaccaaacaggactaaggaacactttcgtgcacagaagtcagccgcaatccaggcacaggacgaagatgggatacacgtgctcatctgtctgtcctcctttcctctccctccccgacgttctagttagcttgttgacttgttaaaccttctgttcttaaaatgaaaagctagcttacctcaaagaatcttgtttccattcggaaaccaacgattttgtgttttagaatggacagccctcccctcaccactccctaccttggcctggtgtccttgagacatacggtctttgcttagtcgtgtgttggctgctttgagcaggaacaaggcctccaggccctgaggtgggaaggaaggattggatgccactgccctcctccccactttagcatgtaggggccagcccatctcttccagcagggtcctgctgagttaccatagcaaccagcaactccagggtaccacaacagacaatggctcagcgagccgacgtgtggggatgatgcaggggttttggcccagccagaggacccagagttgagcttcaaatgctagagaaggggagaaacaggatggaagggtggtttaaggaaccggcaggggtctttgagtcacatagagaagccgttgaaggaggtagggcaggttatctctgttccagtcacccccttccagccccatcccacttctgtttcaaactaaagctcccacctcgaacattgaccctttgttagaacaaagcaaagcatatctttagacaacagtgttaaaatgagcctcaaatgtatgtggatgagatctctaagaagagggtcttctggttttgatttttaaagaagagtatcctagtaaaatattaaaaaaaaattaaaaagtttttaaaaaggaaacctgtgctatttaaattggagcccagttgtaacttggtaaaggcaagcttctgtacctttgttataattaattgtatacctgtgtatgtaaatataaggcattcctattttgcagttcagaacaaaaaaaacttatttgtaatatagaataaagtttattaaaaaataataaaaatgcagtttggga

SEQ ID NO: 887 - DNA, 10133 bp, Homo sapiens
atctgaataattgaggagctgttcagcagcagcggctgcctcctgccttcctttgccgccaccaccacttcccatcccagctagagagacagctccgcgcagtaagtgcggactgccagccaccagccttggcagccagctcgtcgcctccagccccgaccccgacattcatgcccaggagaaggctgcactgggtccctctgggcctttcctaaaagggagatccctgttcactagatgagttccagaaccatccactaaggctttgtagcccccttccatcagctgaccttcactgcatcccctatcgctcaagatgagtggcttcttcacctcgctggacccccggcgggtgcagtggggagctgcctggtatgcaatgcactccaggatcctacgcaccaaaccagtggagtccatgctagagggaactgggaccaccacggcacatggaactaagctagcccaggtactcaccacagtggacctcatctctcttggcgttggcagctgtgtgggcactggcatgtatgtggtctctggcctggtggccaaggaaatggcaggacctggtgtcattgtgtccttcatcattgcagccgtcgcatccatattatcaggcgtctgctatgcagagtttggagttcgagtccccaagaccacaggatctgcctacacctacagctatgtcactgttggggaatttgtggcatttttcattggctggaacctgatcctggagtacctgattggcactgcggccggagccagtgctctgagcagcatgtttgactcactagccaaccacaccatcagccgctggatggcggacagcgtgggaaccctcaatggcctggggaaaggtgaagaatcatacccagaccttctggctctgttgatcgcggtcatcgtgaccatcattgttgctctgggggtgaagaattccataggcttcaacaatgttctcaatgtgctgaacctggcagtatgggtgttcatcatgatcgcaggcctcttcttcatcaatgggaaatactgggcggagggccagttcttgccccacggctggtcaggggtgctgcaaggagcagcaacatgcttctacgctttcattggctttgacatcatcgccaccactggagaggaagccaagaatcccaacacgtccatcccttatgctatcactgcctccctggtcatctgcctgacagcatatgtgtctgtgagcgtgatcttaactctgatggtgccatattataccattgacacggaatccccactcatggagatgtttgtggctcatgggttctatgctgccaaattcgtagtggccattgggtcggttgcaggactgacagtcagcttgctggggtccctcttcccgatgccgagggtcatttatgccatggctggtgacgggctccttttcaggttcctggctcacgtcagctcctacacagagacaccagtggtggcctgcatcgtgtcggggttcctggcagcgctcctcgcactgttggtcagcttgagagacctgatagagatgatgtctatcggcacgctcctggcctacaccttggtctctgtctgtgtcttgctccttcgataccaacctgagagtgacattgatggttttgtcaagttcttgtctgaggagcacaccaagaagaaggagggcattctggctgactgtgagaaggaagcttgttctcctgtgagtgagggggatgagttttctggcccagccaccaacacatgtggggccaagaacttaccatccttgggagacaatgagatgctcatagggaaatcagacaagtcaacctacaacgtcaaccaccccaattacggcaccgtggacatgaccacaggcatagaagctgatgaatccgaaaatatttatctcatcaagttaaagaagctgattgggcctcattattacaccatgagaatccggctgggccttccaggcaaaatggaccggcccacagcagcgacggggcacacggtgaccatctgcgtgctcctgctcttcatcctcatgttcatcttctgctccttcatcatctttggttctgactacatctcagagcagagctggtgggccatccttctggttgttctgatggtgctgctgatcagcaccctggtgtttgtgatcctgcagcagccagagaaccccaagaagctgccctacatggccccttgcctcccctttgtgcctgcctttgccatgctggtgaacatctatctcatgctaaagctctccaccatcacatggatccggtttgcggtctggtgctttgtgggtctgctcatttattttggatatggcatctggaacagcaccctggaaatcagcgctcgagaagaggccctgcaccaaagcacgtaccaacgctacgacgtggatgaccccttctcagtggaggagggtttctcctacgccacagagggcgagagccaggaggactggggcgggcccactgaagacaaaggcttctattaccaacagatgtcagatgcgaaggcaaacggccggacaagtagcaaagcgaagagcaaaagcaaacacaaacagaactcagaggccctgattgcaaatgatgagttagattactctccagagtaggagaaacacacaagtgggtagaaatggtgatgactgattttcagtaacttaacctgtgggctagaaggtgaaaacttttttggctctcatttcacaaatccagccttccccaaattcaatccctagtcatagcctgtcatttgctacttttgctcttcaggatagttctgttgaagggcttaacctgggtcccctaactggtcgccttgttaaataaaataaataaataaacaagaggctatatgaaattccatcttaggtgcaaccaccagagctgatggtaccaaatgtttcctaggcctttgctttgctggttgaagcccaagcaggggctctgggcagaaggcagaatttcagtcacctgagacatggggacaaagctctgttcttggcatgtcaggctgagtgctgctccccgaggtcagggtgggtagatgggcattggcacttcctgagcaagcatcattttatcctgcaatctcacccaaaattaattcatggaaaagacacatgcttctttttattcaccaacattctcacagcttccaaactataattttaggatccagcaaagttcagggactctggaccattttcccaatggtttcagattcaccataaagcagtcaggcagacccagtgatatggtaagaagcaccatcaaagctctatgtaaatgcccagaagaaaattaaataaccatatcttgcggtaaaagccagaagggcattggcagaaattaactctctgtcatggcctctcttatatcagactgcagctcctggtgatatgatgaaagcgggcaaaggtggagcatgatttcatggcactgatatgccttgaaaaagtaggttgtttgttttataatcagataaaaatttttacaaggagaagtgagccagccactgagatcacattgcaaattctctttcatatttctaaaattataaattctaaagtttttgagataggcaaccacttgattggtgtgtgctactctgaaaacaaaataggctgaagtatagcgacttaggtagttgcattccatgagatcacatttcacttctgaaccttattccttggggctagctcactttcagaggtgtatttttttttcctgttatttcccagagtagtttcactgaagcccagagaaatatctacctggtaagatgtaaatttgggccataaaaggggctattaaaagaattttctcagaaatagaatagatgagagaatttgcaaaggaaaaaaacacacatgggctacaatataaattctactcttgggttacaagaattcctgtggctgcactgagatacgtacaaatgtatgtgaaggcacaatttgaatcaagctatcatagaattaaccaagctattaaaattaatcaagctattaataaaatctctgtgaggatttcctgaaagagggacaaaagaagaaattccttgtcctttctctcctggatgtatcagtatgccaaacgttttccagaacatattcgctagcactcaagtctgttctttctgaaaggctgaggctcatgccatcttggcatgctttaggattatggcaaggaggtaaaagtccattttttcattcaactaacactggttgagaatagacccaatgctaagtgacaggaatgaatagaagcatggcacttgcccttgggggctacagtccatggatgagcagcactggagcctggtaaatgcagataaaacaacaaacttgacaagtctccaggctgatgcactgggttttaacatacatataaagatgaattgaaactagtttttaaaaaatatgctttaaataaattacatatcgtaatcatagccaatgtataccattaaactaaaataactgcaattttctagatattttttattcttctgtagtcattgtttagaactctggtttcctgaggtcattttgtcattttaatatcatgcttgacaatgctatgttttctcttccctagagttaaccataaagatacagtgcctactctgtgaaatacagcattaggaattaattataaactaattatcagtcatcttttgaaaacaaagttttgaattggctataggactcaacaaatctgcctggtgtaaatagaatctgttaagcttgatacatatctagatagatgaggaggggttgtattcattaagcatgagaatagagaaataggagtgcaaaatggcaaaatcttaacgtgggtgaaagagcttccttttactagtgaggtttaagtattaaagtaacaatagcctggtggcagatgaatgcaatttctataggatgggaatggaaaatgtatgctttggttaacaccattgctgttgacttcatgcagattctattaagcactctcatttcaggagccatttttcccacatagtatattagtatattttaagcttagctccctttatttttctaaagttgataaatcacctccctagcaaccttagttttaaaaaaaaaatcactaagatagaaaaagtattttcaggtacatagacatgtttgtcctcaggtttacctgcttctgtgaacagtcccagattttacaatgcagttttcaaataccatcaatcactacaatgacaatattactattttcttaacaggtttctaaacgatgtatgtgtgggatcacattaaaagtaagatcaccttataattatcttagaaactttgccccttgaagggagtccaaggaagacctacattttattgaattctgaatagcaaaagctctccgagtgagatttcattgtgtggatttgtggtttggagccaattacttgattttcttcagattttattctacttatttattggtactctgcttcatttcaaaaggatttgaggcagctactaaaatatatataatacaaaacaaaaattaagtgaggaactcagagcaaacaaaaatagaaacagaaaggataagacaaaactagacgtatatttagtacataaatgcagaaccctgacatgctttactaaatttgccaatgagtgacaccatgaaaaataatagaattagtggtaatgacaagaagaagtacttctgcatgataagaacaaatctttccccatgcaggtagaggtttgaaatagcatagatcattaaaatccacaggtaagcttcaaacctagattttgctagctacatgtgcctggcatatagtgtgtattcaagaaatacctgatgattgacagaatgaatgaattggaggaaaatgaaatatttattcaacaattacttgtggagtgcctattatgtactatggcagatattgatatcgtaagtcagataaaaatccagctcttaagaagtagaggaaatagagcttggtgtggtggcatgtgcctatgatcccagatagttgagagactgagggaggaggatcacttgagcccaggagttcaaggctgcagtgagctatgatcacaccactgtactccagcctgggtaacagaagaataccctgtctcttaaaaaggaaaatcaaataggggaaatgggatatataaataaagaacaatagtgaatgtgtcaggtgagatgacggacttgtaatgtgctgtggggggtcaaatatgaagaaggccttcttcctctggaaaggtcataaagaatgtcacacttgtgttggaacttgtgaagtgggtagaattttatcaagtagaaatgagagaaaggcatgccaagcaaaggatcggcatgaataaggtctactagtttgtggtcctctggctaagaatttgtgctgtgcctccattaagagaaagcaaggagctagtttgcctggagcacatgatttatgcatgacttatacatgcaacaataagaaataatgctaggaaggcaggtgagggatcactcacagagagacttgaatgtcacactgagctgactggctttcctcgggtgagagagtgggaaataattggggaactgacgaaagtgtgaatccaggaaggctgaactttaagaaagctgagacggtggcttccttacctatgcaaggaactaacaagccacatatacactccaaattgatttaacaaattaaagagaaaaatagctgtactttgagtcctgtgtctgcattcatcattaacctaagaaaatacagccatttaatacgtggacaagcaacacaatttaacagccactttaaagttttcaacaataggtttcaacaactaaacctaacaactttttatatctatctaatctaaacagtaaaatctcagctccaggttttactgagcttgagtgctacttttttttttttagacagagtctcattctgtcacccaggctggagtgcagtggcatgatcttggctcactgcaaccttcacctcccgggttcaagctattctcctgcctcagcctcccaagcagctgggattataggcgtgtgccagttctacttcttagtaacaaactagtagctaatcaaatgcctacataatggtcatgataaatctgtttaaataaatggcgggcggaagggagttgttgaatttaacaatccatccttcttcagaatctataggtcagccagaatataaatctagtaattattgaaaaacaaaacacaaactccttcaaagaaatctctctcctctattctgctgaaaagggttggtaaacctgacatcctttcttttattggaagacaaatccaacatttgttagacatccaacatttgttggaagtctaccttacaagaaaccacctcttatctgcaacataaacagaagctacatcaggttgaaaatccacatagaagactggagaaaattgccgtcccctttcgcactaggttttaccaggggcccaagatgtcagaggaaagtccgcggagggccaaacacaggtttacctaattatgaatctcagattagaatgtcttattgtgtggaaaagtcagaactcaggaaatgtgtctgaagccagagcgggggtctgcttacggagtctacgcagcgggtaggggtccactattggagtataaacctcaggtcagtgagtagtgcagaggtgtccctaacttccaatggagggaaagagaggagagcaaaggaaacacatccagaagtcgccacgagggctgtgtgccagcgctccattttcatgctgtttggaacaagacgtgtcaaggaagatgtttctatccaaagtcttcatggagcctctgcttcccctgtacctgtgtagctccctgaaactgaggacccacgtgtctgcaaagacctctggagatcctaagagagagaggcaccagcaggtaaccagtggtggcctggccacgaaagagtatttgaaattcaacagtgagcaagtgcagaaacagcatcccaaaccgcaggccccaccacacgcaggaaccagaaagctgaagtttcaccaaggagtttacttagtatttctcgctgggaatggggatgggtagcaaaaagcccctttcatgtacataatggttggtcctatgtcctacttttattttctctaagagttttagaagaaaggctgttttaatttttttttctccttaagagcaacttcctttttaaaatgctttcctcttcttgtcctgcttgagtaatgcaggcatcattctgaaatcattctgaaacagctaggcagtcgccttttgccaaaattacttctctaagaaaatagagtgttcttttttttaggacttagaacccacaaggggtgagtggaagttttgtagcccatcaaaggtgaatatgtgttctgcagtatcaactaaaacagtgtacaaaatcattaaactgggccgggcgcagtggctcatgcctgtaatcccagcactttgggaggccgaggcgggtggatcacctgaggccaggagttcaagaccagcctgaccaacatggagaaaccccatctctactaaaaatacaaaattagccaggtgtggtgttgcatgcctgtaatcccagctattagggaggctgaggcaggagaatcgcttgaacccgggaggcagaggttgcagtgagtcgagatcacaccattgcactccagcctgggcaataagagcaaaactccgtctcaaaaataataataataataatttaactgtgttctgcacacacagaattacaaaatccctataggactttcacagatagctttgggcttaaggtcttcggacaacaggtagttctaatttcttactctttgggacatttagtacatgttggtacacataaggaaagaaaatggcttatattagagctaggaaacaggggcagcctggatttttatggtaggaactcactctgtgcttttttttttttctgttaagttttcttgacactgacttcggtaacattggctaaagggaattgtgagtcatgtgaatttcacctgcagtgcagactttaaaggactgtgttcattctgatttggggatgaagagaatgttccatgcacatctattgattggtcttggcagttgctgatacgcttgtctcattcacactcccaaaggcgaggatttaccctagaaatcataaacccccactttccaaagcaaagatgctgttaatgttatgatggtgcataaatacctcaactgtctgggctgagagagggggctgcaggtttttaagagagcagctatagtcctcattccatgtagtcacatcatctgatgacaggactccacattctagcttttctcactgtggaaaagaaacgttactgtttaattaatatccaaagttataaatacagcttgtaaattttactaacttgtttctttttcgtttcgtccttgagaagtacaacttgcatttacagatggtaattcctagtgttgttctctgctatctttttttggtatgaaattgctgtatttgttaaagtttgttcgttttgtggtttttaattcccattggtgtgctgtacaatgtagtgtatcatgaagaaagaaataatatgcagatgtattatgaaatgtgttttattttcaaatgtgtggtgttgacaatatattgatttatcaagatactaagggaaaattctaaatttaacaaaatgtgtatattttaataaatgcataaagctttattgtgtgcctttaaatttaaaaatgggtttataaagaaagtcagaaacaaaagtgtcttactataaaatatccatagtaatgtaaagcttttacacgagactaccaaaaaaaaagaaagaaaagaaaaaggagccttcccatattttgttaaccttaaccagtatctgaagtctgttactttttttccattcttaaatggagatgaataagtgaatttcgccttaagtgtttcaattgtcctttgtagaaaagccagataaatgagttcactttgaattgcattattgtggaaaattcattttcagaataaaacattttaaaaagtacagctaatcgactaataaaatttaaatttg

SEQ ID NO: 888 - DNA, 6485 bp, Homo sapiens
ctcgcccaagatggcgatggaggggcgggtgaggcggcagcggccctggcccccgcgccggccccagctcgggcccgggcccccgaggccgcgcccccgcccgcggcgccgcgcctccccgggccactgacgcccggcgcgctctccccccgcggcggcggccgaagcacggggaggcggcggcggcggcggcggcccgagcccagccccatggcgcggggggacgccggccgcggccgtgggctcctcgcgttgaccttctgcctgttggccgcgcgcggggagctgctgttgccccaggagacgactgtggagctgagctgtggagtggggccactgcaagtgatcctgggcccagagcaggctgcagtgctaaactgtagcctgggggctgctgccgctggaccccccaccagggtgacctggagcaaggatggggacaccctgctggagcacgaccacttacacctgctgcccaatggttccctgtggctgtcccagccactagcacccaatggcagtgacgagtcagtccctgaggctgtgggggtcattgaaggcaactattcgtgcctagcccacggccccctcggagtgctggccagccagactgctgtcgtcaagcttgccacactcgcagacttctctctgcacccggagtctcagacggtggaggagaacgggacagctcgctttgagtgccacattgaagggctgccagctcccatcattacttgggagaaggaccaggtgacattgcctgaggagcctcggctcatcgtgcttcccaacggcgtccttcagatcctggatgttcaggagagtgatgcaggcccctaccgctgcgtggccaccaactcagctcgccagcacttcagccaggaggccctactcagtgtggcccacagagggtccctggcgtccaccagggggcaggacgtggtcattgtggcagccccagagaacaccacagtggtgtctggccagagtgtggtgatggaatgtgtggcctcagctgaccccaccccttttgtgtcctgggtccgacaagacgggaagcccatctccacagatgtcatcgtcctgggccgcaccaacctactaattgccaacgcgcagccctggcactccggcgtctatgtctgccgcgccaacaagccccgcacgcgcgacttcgccactgcagccgctgagctccgtgtgctggcggctcccgccatcactcaggcgcccgaggcgctgtcgcggacgcgggcgagcacagcgcgcttcgtgtgccgcgcgtcgggggagccgcggccagcgctgcgctggctgcacaacggggcgccgctgcggcccaacgggcgcgtcaaggtccagggcggcggtggcagcctggtcatcacacagatcggcctgcaggacgccggctactaccagtgcgtggctgagaacagcgcgggaatggcgtgcgctgccgcgtcgctggccgtggtggtgcgcgaggggctgcccagcgcccccacgcgggtcactgctacgccactgagcagctccgctgtgttggtggcctgggagcggcccgagatgcacagcgagcagatcatcggcttctctctccactaccagaaggcacggggcatggacaatgtggaataccagtttgcagtgaacaacgacaccacagaactacaggttcgggacctggaacccaacacagattatgagttctacgtggtggcctactcccagctgggagccagccgcacctccaccccagcactggtgcacacactggatgatgtccccagtgcagcaccccagctctccctgtccagccccaacccttcggacatcagggtggcgtggctgcccctgccccccagcctgagcaatgggcaggtggtgaagtacaagatagaatacggtttgggaaaggaagatcagattttctctactgaggtgcgaggaaatgagacacagcttatgctgaactcgcttcagccaaacaaggtgtatcgagtacggatttcggctggtacagcagccggcttcggggccccctcccagtggatgcatcacaggacgcccagtatgcacaaccagagccatgtcccttttgcccctgcagagttgaaggtgcaggcaaagatggagtccctggtcgtgtcatggcagccaccccctcaccccacccagatctctggctacaaactatattggcgggaggtgggggctgaggaggaggccaatggcgatcgcctgccagggggccgtggagaccaggcttgggatgtggggcctgtccggctcaagaagaaagtgaagcagtatgagctgacccagctagtccctggccggctgtacgaggtgaagctcgtggctttcaacaaacatgaggatggctatgcagcagtgtggaagggcaagacggagaaggcgccggcaccagacatgcctatccagaggggaccacccctgcctccagcccacgtccatgcggaatcaaacagctccacatccatctggcttcggtggaaaaagccagatttcaccacagtcaagattgtcaactacactgtgcgcttcagcccctgggggctcaggaatgcctccctggtcacctattacaccagttctggagaagacatcctcattggcggcttgaagccattcaccaaatacgagtttgcagtgcagtctcacggcgtggacatggatgggcctttcggctctgtggtggagcgctccaccctgcctgaccggccctccacacccccatccgacctgcgactgagccccctgacaccgtccacggttcggctgcactggtgcccccccacagagcccaacggggagatcgtggagtatctgatcctgtacagcagcaaccacacgcagcctgagcaccagtggaccttgctcaccacgcagggaaacatcttcagtgctgaggtccatggcctggagagcgacactcggtacttcttcaagatgggggcgcgcacagaggtgggacctgggcctttctcccgcctgcaggatgtgatcacgctccaggagaagctgtcagactcgctggacatgcactcagtcacgggcatcatcgtgggtgtctgcctgggcctcctctgcctcctggcctgcatgtgtgctggcctgcgccgcagcccccacagggaatccctcccaggcctgtcctccaccgccacccccgggaatcccgcgctgtactccagagctcggcttggcccccccagccccccagctgcccatgaattggagtcccttgtgcacccccatccccaggactggtccccgccaccctcagacgtggaggacagggctgaagtgcacagccttatgggtggcggtgtttctgaaggccggagtcactccaaaagaaagatctcctgggctcaaccaagcgggctgagctgggctggttcctgggcaggctgtgagctgccccaggcaggcccccggccggctctgacccgggccctgctgccccctgctggaactgggcagacgctgttgctgcaggctctggtgtacgacgccataaagggcaatgggaggaagaagtcacccccagcctgcaggaaccaggtggaggctgaagtcattgtccactctgactttagtgcatctaacgggaaccctgacctccatctccaagacctggagcctgaggaccccctgcctccagaggctcctgatctcatctcgggtgttggggatccagggcagggggcagcctggctggacagggagttgggagggtgtgagctggcagcccccgggccagacagacttacctgcttgccagaggcagccagtgcttcctgctcctacccggacctccagccaggcgaggtgctagaggagacccctggagatagctgccagctcaaatccccctgccctctaggagccagcccaggcctgcccagatccccggtctcctcctctgcctagctcttcccagaggatgtggtttggggcaggcaggtatggatcacataggatgcgatacctgtggccgtgtatgtccacatgtgtgcctgtagatacatcatcaagccctttggagcttcctaagttgctttggctgaggggagaggaaaacatggattattcactccccccatactctttgtgatacacatgtgacatgtgaaagacatacgagacatagctacatgtgatgtgcacatgtgtgaagtgcatgtatgcgtactggttgttgagctgggaaaccgtggcccaggcagtggtcactacagcctgattggtcctccaggtcagaacggtgccccacagtggtcagtccccagccctgtgggcccccacctccatcgcccagccttttattacacactctgagagtgtctccaatgcctgtctgacaaagacagtcccagcccattctcctgtctggctgggttgggtgcaagcaggctctgaatgcctggcatttcagctgcatcacctcccagctccttattgcccaaatagagagggtggccctggctcccctccgagcaactctgcatttaattttgtaatctgggaagtgcctggttttgaaaatccgctttctctcactcttcccctccttccttgcccctggctgctctagtgttctgtctcccagtcacctcgctctcccagcaccagtgcccttctcctgctcccagatactctttcctttcctctctcctgttttccttcctctgctatctctcacacctctcccagactatgtcatcttgttctcctgcctgggttcaaactctgcatccttctctaacaacgtgactacctcatgtctgcttcaaggcccccgtgcccttcctgtatccgcggctgccgcgcactcgcctgccatcctcctgcctcctcttcactcagtgcttctgcttgccctgccccaggcagcccacccacgcccagtgcgggtgtggagaagatcttctggcttccctgcatcttgcctttgggattgggatccaagggttctccatggatggatccaagtcatagaggggaatgtttgagacagggaagggggctgtgatccagaggctcagaataaaaagatgccctcccttctatgcaggggggcaagtttactggatggagatgatttgggcctctcttccagaagaagctaaaggaagagaaggggagtgagagttcagggaggcccttcccaccctgtgaggcttgacttgatctggattggggatgacaggaatctcaccctctggggtgctggcaaggaggtctttgcacaggaaaaggggtagctcatttcagtttgttttttctttaaattgaatcctcaagtcattttctgttcacctgccgcacagggacaagcttgacttctattttctgtgtagtgaaaacaatgtcatttatttggtttttcacctcagccctctcataggagcatagaatgttagggtctttactccctaatgatgtctgattggcacatcaagagttaactctgccttctgggccaaattcgaaataaccagtccatttttccttttttttttttttttttttaaatggtggaatgtctctcagcacagttgcggcttcctcaaaccctgaaagcatctgtgtttattatactcgggtgtcactcactgttgatgtctgcacctacgtttccacctcctccccctccttcagccagcctatgataacactaaagattattaatgttggttttgtatctcgttaaagacagaattgtcacttgtagtatttctgtagcattcagcgctgctgtggctaacaccactgtgtatgtttcatcattgctctgaaggtcaaaagcctcattttattttgctggtttgattttttttttttaaagaagaaaaaaaaactgccctgaattaaatggctgttttaacagtaggctcttagcattataccacatagtcatttttcatgttcttgtttaacaggcactgaggttctggtttaaattaaatagctgcaaatgagacaatttataacccattaggttgggtggaaaattgtttctcaaaagcaaataagtaataaatctggtatctgcctataactcacagttgataagaaagtggccatttctcactagcactatatatgatttgggctctgggtaatttggaagtgttaggtttgtgtctttgtagcagtatttttattagaaaagaatctattggccttttacagggtattaatccctttgtcacctaccattgatgccttaagttttctgagtctcaattaaaaatcttccttttcttgatgcatgacaagtgtaatcagtacttgctcatttatttgtctgtatttagtttatgctgtactatttaattatccttccagcgttttttttttctccttacaaatatgatactctttagtgttaagctaaggcattgattcatgtatctgtccttataatgaattaataaactattttccag

SEQ ID NO: 889 - DNA, 8705 bp, Homo sapiens
ggccgggccgggcagcggacgccgacagggagggcggtcggtcgcggcgagcagcggagacagcgacgctggcggccgcgggcccaggcctcaccttccccgatggcgcaggtaccaggggaagtggacaacatggagggcctgcctgctcctaacaacaaccctgctgcccgctgggagagtccggatcggggctgggagcgggagcagccggctgcgtccaccgcagcggcctcgctctttgagtgctcccggatcaaggccttggcagatgagcgggaagccgtgcagaagaaaaccttcaccaagtgggtgaactcgcacctcgcccgcgtgggctgccacatcggggacctctatgtggacctccgggacggcttcgtgctcacgcggctcctggaagtgctgtctggggagcagctgcccaggcccacgcgcggccgcatgcggatccactcactggagaacgtggacaaggcgctgcagtttctgaaggagcagcgcgtgcacctggagaacgtgggttcgcatgacatcgtggatgggaatcaccggctgacgctggggctggtctggaccatcatcctgcgcttccagattcaagtcatcaaaattgagactgaggacaacagagagacacgctcagccaaggatgctctgctcttgtggtgtcagatgaagacagctggttaccctgaggtaaacatccagaatttcaccaccagctggcgggatggcttggccttcaatgccctcattcaccggcacaggcctgatctcgtggacttcagcaaactcaccaagtccaatgccaactacaacctgcagagagccttccgcacagctgagcagcacctggggctggcgcggctgctggatcctgaagatgtgaacatggaggctccagatgagaagtccatcatcacctacgtggtctctttctaccactatttctccaagatgaaggctctggctgtggaggggaagcgtatcgggaaggtcttggaccaggtattggaggtggggaagatcatagaacgctacgaggagctggcggctgagctgctggcctggatccaccgcaccgtgggcctcatcagcaatcagaaatttgccaactccttaagtggggtgcagcagcaactccaggctttcacggcctattgcacgctggagaagcctgtcaagttccaggagaaggggaacctagaggtgctgctcttcagcatccagagcaaactgcgtgcctgcaaccgtcgcctctttgtgcctcgggagggctgtggcatctgggatattgacaaggcatggggtgagctggagaaggctgagcatgagcgggaggctgccctacgggctgagctgattcggcaggagaagctggaactactggcacagaggtttgaccacaaggtggctatgagggagagctggctgaatgagaaccagcgtctggtctcccaggacaactttgggtatgagctgcccgcagtggaggcagccatgaagaaacacgaagcgatcgaggcagacattgcggcctacgaggagcgggtgcagggtgtggcggagctggcccaggcattggcagccgaaggctactacgatatccggcgggtggcagcccagcgtgacagcgtcctgcgccagtgggccctgctaactgggcttgtgggtgcccggcggacacgacttgagcagaaccttgccctgcagaaggtcttccaggagatggtgtacatggtggactggatggaggagatgcaggctcagctgctgtcccgggagtgtgggcagcacctggtggaggcagacgacctgttgcagaagcatggactgctggagggagacattgccgcccagagcgagcgggtggaggctctcaatgccgctgccctgcgcttctcccagctgcagggctaccagccctgcgacccgcaggtcatctgcaaccgcgtgaaccacgtgcacggctgcctggcggagctgcaggagcaggcagcgcggcgacgcgcggagctggaggcttcgcggagcctgtgggcgctgctgcaggagctggaggaggccgagagctgggcgcgcgacaaggagcgtctcctggaggctgcgggcggcggcggtgcggcgggcgcagcgggcgcagcgggaacagcgggcggcgcgcatgacctgtccagcacagcgcgcctcctggcccagcacaagatcctgcagggcgagctgggcgggcggcgagcgttgctgcagcaggccctgcggtgtggcgaggagctggttgcggccggcggtgccgtcggcccgggagcagacaccgtgcacctggtaggcctggcggagcgcgcggcgagcgcccggcgccgctggcagaggctggaagaggcggcggcgcggcgagagcggcggctgcaggaggcgcgggcgctgcaccagttcggcgctgacctcgacgggctgctggactggcttcgcgacgcttaccgcctggcagccgccggtgacttcggccacgacgaagcttccagccgccgcctggcgcgccagcaccgcgcgctcaccggggaggtggaggcacatcgcgggcccgtgagcggcctgcggcgccagctggcgacactcgggggtgccagtggcgcagggccactggtggtggcgctgcaggtgcgcgtggtggaagcagagcagttgttcgctgaggtgaccgaagtggcggcgctgaggcgccagtggctgcgggacgcgctcgctgtctaccgcatgtttggcgaggtgcacgcgtgtgagctgtggatcggcgagaaggagcaatggctgctctccatgcgtgtgccggattcactcgacgacgtcgaggtggtgcagcaccgattcgagagcctggaccaagagatgaacagcctgatgggccgcgttctggacgtgaaccacacagtccaggagctggtggaaggaggccaccccagttcagatgaggtgcgttcctgccaggaccacctcaacagcaggtggaaccgcatcgtggagctagtggaacagcgcaaagaggaaatgagcgcggtgctgctggtggagaaccacgtgctggaggtggccgaggtgcgcgcccaggtgcgtgagaagcggagagctgtggagagcgcgccccgggccggcggcgccctgcagtggcgtcttagcggcctagaggccgctctgcaggcgctggagccgcgccaggcggcccttctggaggaggcagccctgctggctgagcgcttcccggcgcaggcggcgcggctgcaccagggcgcggaggagctgggcgccgagtggggcgcgctagctagcgcggctcaggcctgcggcgaggcggtggcggcagcagggcgcctgcagcgcttcctacatgacctcgacgctttcctggactggctcgtgcgcgcccaggaggcggcgggcggcagcgaggggcccctgcccaacagcctagaagaggcggacgcgctgctggcgcgccacgctgcgctcaaggaggaggtggaccagcgcgaggaagactatgctcgcatcgtggcggccagcgaggcgctgctggccgccgacggcgcagagctgggcccgggcctggcactagacgagtggctgccacacctcgaacttggctggcataaactgctcggcttgtgggaggcgcgcagggaggcgctggtccaggcgcacatctaccagctcttcctgcgggatctacgccaggcgctcgtggtgctgcgtaaccaggagatggcgctgtctggtgcggagctcccgggcacagtggaatcggtggaggaggccttgaaacagcaccgtgactttctcaccaccatggagctgagccagcaaaagatgcaggtggccgtgcaggctgcagagggcctgctgaggcagggcaacatctacggggagcaggctcaggaggctgtgacccggctgctggagaagaaccaagaaaaccagttacgggcccagcaatggatgcaaaagctacatgaccaacttgagctgcagcacttcctccgagactgccacgagctggatggctggatccatgagaagatgctgatggcgcgggatggcacgcgggaggacaaccacaagctgcataagagatggctccggcaccaggcattcatggccgagctggctcagaataaggagtggctggagaagatcgagcgggagggccagcaactgatgcaggagaagcccgaactggcggcctccgtgcggaagaagctgggcgagatccgccagtgctgggcggagctggagagcaccacccaggccaaggcacggcagctctttgaggccagcaaagcagaccagctggtgcagagctttgctgagctggacaagaagctccttcacatggagagccagctgcaagacgtggaccctggaggagacctggccactgtcaacagtcagctcaagaagctgcagtccatggagtcgcaggtggaggagtggtaccgcgaggtgggagagctgcaggcgcagacggcggcgctgccgctggagccggcgagcaaggagctggtgggtgagcggcagaacgcggtgggcgagcgcctggtgcgcctgctcgagccgttgcaggagcgccgccgcttgctgctggcttccaaggagttgcaccaggtggcgcacgacctggacgacgagctggcatgggttcaggagcggctgccactggccatgcagacagagcgaggcaacggtttgcaggcggtccagcagcacatcaaaaagaaccagggcctgcggcgggagatccaggcgcatgggccgcgcctggaggaggtgctggagcgcgcgggcgcgctggcgtcgctgcgcagcccggaggcagaggcagtgcgccggggcctggagcagctgcagagcgcctgggccggactgcgggaggctgccgagcgacggcagcaggtgctggacgccgccttccaggtggagcagtactacttcgacgtggctgaggtggaggcgtggctgggcgagcaggagctgctcatgatgagtgaggacaagggcaaggacgaacagagcaccctgcagctgctcaagaaacacctgcagctggagcaaggcgtggagaactacgaggaaagcatcgcgcagctgtcgcgccagtgccgggcgctgctggagatggggcacccggacagcgagcagatcagccggcggcagtctcaggtggaccgcctgtacgtggcgctcaaggagctgggtgaggagcgccgggtggctctggaacagcagtactggctgtaccagctcagccgccaggtgagcgagcttgagcactggattgccgagaaggaggtggtggctggctcacccgagctcggccaggactttgagcatgtctcggtgctgcaggagaaattctcagagtttgccagcgagacaggtatggcagggcgggaacggctggcagctgtgaaccagatggtggatgagctgatcgagtgtggccatacagcagcggccaccatggccgagtggaaggacggactgaacgaggcctgggctgagctgctggagctcatgggcacacgggcccagctgctggccgcctctcgggagcttcataagttcttcagtgacgcccgagagcttcagggacagattgaggagaagcggaggcggctgccccgcctgaccaccccgcctgagccgagacccagtgccagttccatgcagcggaccctgagagcctttgagcatgacctgcagctcctcgtgtcccaggtacggcagctgcaggagggggcggcccagctgcggacggtgtatgcgggtgaacatgccgaggccatcgctagccgggagcaggaggtgctgcagggttggaaagagctgctgtcagcctgtgaggatgcccgcctgcatgtcagctccacagccgacgccctgcgcttccacagccaagtccgcgacctgctctcctggatggatggcatcgccagccagattggggcagccgacaagcccagggacgtgtcatcagtggaggtgctcatgaactaccaccagggcctgaagactgagctggaggcgcgggtgcctgagctgaccacctgccaggagctggggcgatctctgctgctcaacaaaagtgccatggctgatgagatccaggcacagctggacaagctgggaaccaggaaggaggaggtgtcggaaaagtgggaccgccattgggagtggctgcagcagatgctggaggtgcaccagtttgcccaggaggcggtggtggctgatgcctggctgacagcccaggagccgctcctgcagagccgggagctgggcagcagcgtggatgaggtggagcagcttatccggcgacatgaggccttccgcaaagcggctgcagcctgggaagagaggttcagctctctgcggcgcctgaccacgatcgagaaaatcaaagcggaacagagcaagcagccgcctaccccactgctggggcgcaagttctttggggaccccacggaactggcggccaaggcggcgcccctgctgcggccagggggctatgaaaggggcttggagcccctggcccgccgagcctcggacacgctctcggccgaggtgcggactcgggtggggtatgtgcgccaggagctcaagcccgagcgcctccagccgcgcattgaccggctgccggagatcccggggagggtggagcccgcggccctgccggccgcaccagaggacgcggcggagacccccgcgacccccgcggcggcggagcaggtgcggccacgaccggagcgccaggagtcagctgatcgcgcggaggagctgcccaggaggcggcggcctgagcggcaagagtcagtcgatcaatccgaggaggctgcgcggaggcggcggccggagcggcaggagtcagcggagcacgaggcggcacacagccttaccctgggccgctatgagcagatggagcggcggcgcgagcggcgtgagcggcgcttggagcggcaggagtccagcgaacaggagatgcccatcagaggagacctggtcaaggggaaggccaccctggctgacattgtggaacagctgcaggagaaagaggcaggcccagggctgcctgctgggccgtcgctgcctcagccacgcgagcttcccccaggtcgcctgcccaacgggcttgagctgcccgagcggacacctcggccggaccggccccgggcgcgggaccggcccaagccgcgacggcggccgcggcccagagagggtggtgagggcgggggaagccggcgctcgcgctccgccccggcccagggcggctccgcccccgcgcctccgccaccgcccactcacacagtgcagcacgagggcttcctactgcgcaagcgcgagctcgacgctaaccgcaagtcgtccaaccggtcgtgggtgagcctgtactgtgtgcttagtaagggggaactgggcttctacaaggactccaagggcccggcatccgggagcacacacggtggggaaccgctgctcagcctgcacaaggccaccagcgaggtggctagtgactacaagaaaaagaagcatgtcttcaagctccagacccaggatggcagtgagtttttgctccaggcaaaagatgaggaggagatgaacggctggctggaggctgtagcttcctcggtggcggaacacgcagagatcgcccgctggggccagacactacccactacttcatccacagatgagggcaaccctaagagggaaggcggagatcgcagggccagcgggcgcaggaagtgacttcccacccccaggacctgacacatctcgtctcccctcttttccgcactgtgggcacaaagacactttttcttccgcaggggcgggagcccctagttccaacactgaggacgcgtgacatggtgggcaccggaaaggaggggacttctcctgcaccccaagaagtggtggggagattgctgcccctatagccatatctcggccccttcccactcaccacccccaccccaggtgctgggggtcccttatttttatgcaataactgagcttgatgggggtgggcagggggccagttgagccaagcccccagccccgatctgcagatcctgccccaagaagctggggtggtgggggcagtaattcctgcccccctctctgccctagggatgggcacgggggcgctggtgaggtcccctggaccatccagggtgctagggggcagggaggggacaccccctccccgcctttacctcacttccaatgctgccttgatctctgtctgggaggggggagtgaaggggccctagccccctgcactccgccgcctcagagccatgcggttaattcctgacttagtttatttttgcaaaacgtcgatctcctcctcccccgccccgcatccgcgaaggcttttaatgggaggggcgtcaaagctcaaaactgttttcctctctcctcccccctccagttgtaaatgccacttcatgaggggaggggcgaggggaagcccacccctgcatgcttctggctggagcacctccctggggagtcgggggattgggttgtgggcagtccccatggccgcctggagaagccgctggggcccgggggtgtggggcggtgtggcgggcgcacactgtatgtacctataataaaccctttggctttgaaaaaaaaaaaaaaaaaaa

SEQ ID NO: 890 - DNA, 5089 bp, Homo sapiens
ctcgggcaacggccgccgccgccacagccacacagccgccgccactgcgtccgtccccggtgagcgccgctgacgcgcggagatgaaattcccggcctcggtgctggcgtccgtgttcctgttcgtggccgagacaacggcggcgctcagcctgagcagcacctaccgctcgggcggggaccgcatgtggcaggcgctgacgttgcttttctcgctactgccttgcgcgctcgtgcagctcacgcttctcttcgtacaccgcgacctcagccgcgaccgcccgctcgtactgctgctgcacctgctgcaacttgggccccttttcaggtgttttgaagtcttctgcatctactttcagtcaggcaacaatgaagagccttatgtcagtatcaccaagaagaggcaaatgccaaaaaatggcctctcagaggagattgagaaggaggtgggccaggcagaaggcaaactaatcacccaccgatcagcgttcagccgggcgtcggtgatccaggctttcttgggctcagccccccagctgaccctacagctgtacataagtgtcatgcagcaggacgtcactgttggaagaagtctcctcatgaccatatccctgttgtccattgtgtatggagccttgcgctgcaacatcctagccatcaaaatcaagtacgatgagtatgaagtcaaagtgaagcctctggcctatgtctgtatcttcctgtggaggagctttgagattgccactcgagttgtagtcctggtcctctttacctccgtcctgaagacctgggtggtggttataatactcatcaacttcttcagtttcttcttgtacccctggatcctcttctggtgcagtggttccccattccctgagaacatagagaaggccctcagtagagtgggcaccaccattgtactatgctttctaactttactctatactggtatcaacatgttctgctggtctgctgtacagctgaaaattgacagccctgacctcatcagcaagtcccataattggtaccagctactggtgtattacatgataagattcatcgagaatgccatcctcctcctcctgtggtatcttttcaagactgacatctatatgtatgtgtgcgcacctctgttggtcctgcagctgctcattgggtactgcacagccattctcttcatgcttgtattctatcagttcttccacccttgcaaaaagctcttttcttccagtgtttctgaaggctttcagaggtggctcaggtgtttttgctgggcctgcaggcagcaaaaaccctgtgagccgataggaaaggaagatctacagtcatccagagatagagatgagacaccttctagcagtaaaacaagtcctgagcctggtcagttcttgaatgctgaagatctctgctctgcttaatgggacccaaggtctcagagcacaggcatattattttctgggtttgatactcgttattcatacaaataatgagccctacacagggaacaaggcaggaagttagctgttaactccttgtgagctgcttctctttatagagctcttgggtatgtagaactgtatgggaagaagccaggaaaacctctgagtgttgaaggggcaacccaaggcatcacagttcacaggtaaccatgttgtgttcttctaggcattactggccttttcactgacaagttacccctgaaatctgagttgtactggttagattcattaggttgaatgaggagaggggcttacctgttctctagttttccagactgctggtttgggtaacctgaagttttatgatccctgaacatagttttcacccaagagctgtcctggtgaccaaaaaagattactagggttttgccatcagcaacatcattcctgtcagagctttcagggagggctgttcaagtttggtttttgaatagacagaggtttcattttcatctcattagggcttttttgtacatagccaactgtagccaccctggcatgctgtctctaattgattcaagggcctagatttggagactttgttccttagcatccatggatgcagaaatgagtgataaatttggccatgaaagccctggaattttaggaaagttgtgattctttgatatgttgatgaaattctggatcaggaggggtgttaaaacatcaaaatgatggcgacttgtataagtagaattcttaccatcttactcctgcctccccattccttgcctgtcaggaccattttagaagagttaccttggttaacttaagggttttttagaaaaccccacagaaatctctcacccagttcaggtgtatagggaattttcattttcattatttcaaggaatagagttttcctcactaccacttgtaattagagattgacttcagaaactttttctaaattataaagacggaatgaccagaaaatttttgtctttcatggaatgcaatttgacttggcataattgtgagttaatttgataaagatctccagttgtatcctctgacaccctttaatgttctatataatttttcctttaatcggagaccctatttgtttcattaaagaggattgggtagcatatcctcaattatcttggaaaaatgcgtagatctagtgccattatttctaccattaaaatcttgaaagcgaaatacttgaaaagaggtgaccataaagatcacaccaatttagaatgaatattaaagtctgagaaatttacaaaagggactctatggactcgattttaccatatggaatagggatccacttctctgttaacctacaaaacgtatttatctggccattgcacttcggataattttcatttttaattcctcttggtgtcaaatttttaagtaatttcatgcacacaggagaaaatgcaatttgataatcagtttccactacattcggaggtcaagaaagcagtatatattctttcacaaggcatccatactgtttaatatttatagagttcatagaaatacatcaataagctcctaaattatagagcctcaattttggtttttctcatttgaaatgtttttgatttatcaatatttgtggtttaactttgtgggggtgtccaggcagtagatcattttttgtctatttttaaccaaataagaataacactcaagactatgttctccatcccaacacatcacttaccacttgcactattcttaataggcctaaaatagtgagcatatataatcaaaataatacttcatacaacatatacttccatgcactcttcatgtaatcacatatgtgcatagatacacaatcgtattacataaaacacccttgaaaatatatgactttgaataaaataaagctaccatgttaatacatcattttttgtttcttcctaattaacaaaagggctctataatgattaggagagctgtaaggccattctttagtcattccaagtgtatatttgtatcacaccagttacttgtgttcattgacaccaaatattttcaagctttttgtgagaaagagattcttgccttgaggctctgcagtggcaaatggtaggggcaatagcgctcccttttcacctgaaatgccttcagctcaggccttgggagtgaggtgtgggagtagccaccagcctcccactgactaggcatgttaggaattagacaaggatggagagactggttttttccagccttggtttggaagcttgtctcaaaaaccattacaaaatcttaaccttcaaatacattctaaatcactttaatttagaagataggtgagcaacttgagtgatcccaaaccaaactaacagtgctggtttgtccgacacccaaagcccacttcacacatttataaggacagagatttggtaactcatttgggtattttgtcagttttaacccttaatatacaggtatcccagctttgggcacatgtatgtccattcactttcaggaaggggtgtcagtactttctttctgtgtggtgaaaacataagccatggtgaactgataatttttgtttttaaattatttatattactgaattggcaaaattacagttcacactgcagagctaggttgtcctattggcataaaacaaaccagcaacttttctcatgtgtttggagttaaaatgtgtttttcagttataatttcaatttttaaatttcttggtgctttgtctaattaattacatcccataacttgtcaggatagttgctccaactgaattgctatcatttggctggatgggggtgaagtatgtcttcaaaatatattgaagtaagttcatcaaacatgtttagacttcctctcattgctggagacagcccagtgtagagattggcacttccctgtccagcactacaacttaattgctctatgcctcagtttccccataatacccttttccaacctacctcacaaggttatcagaaagatcaaattaaataatagatgtgaaaatgctttgaaaatgtttttaagtgctatgcatatttatagagttattatagttattcaaatccataagcaggttatttttatttttttactgtttgaaaagaaataagtagtgtcattcatatgagttcctgagtggatatgcgaatctttggtcttctcgacaggtgccctttctcttaccactagttgcttacaaaaatagcacccaaacacatggcacttggaagaaaaagacccactgaatctgagaaagtactttctggtggcaaatgaatttatcattttagtatagttttcgataaaggatatagcaacatcttttgataattgtgctttacaacttgaatgctgattcaaggcattatttggatgtgagtttaatcttttcagccttgtaaatgggaaaatatatattaaaattgattgtcaaatacagcatttctttggaaaccaccttaaaacattagtgctatggttatgagtgtatgtgccagtacttaccagtcaatgcattgtggatatgagctttcgttgactgcttctctgcagtcgttgatgctaataaatattgtcctgtttcttcatataataaattaatttttcaatttctccttgtaaaaa

SEQ ID NO: 891 - DNA, 9008 bp, Homo sapiens; identical to SEQ ID NO: 35

SEQ ID NO: 892 - DNA, 3272 bp, Homo sapiens
gcgtcaggccctcttccccgggcgtggcctaagcggcccggtccagtcgccctggggctgcttgggggcttttcctgctcgtggagctctgcgctggtcttcatgcgccctagccctctttcggggatactggccgaccccctcttccttttcccctttagtgaaggcctcccccgtcgccgcgcggcttcccggagccgactgcagactccctcagcccggtgttccccgcgtccggacgccgaggtcgcggcttcgcagaaactcgggcccctccatccgccctcagaaaagggagcgatgttgatctcaggaagcacaaagggaccttcctagctctgactgaaccacggagctcaccctggacagtatcactccgtggaggaagactgtgagactgtggctggaagccagattgtagccacacatccgcccctgccctaccccagagccctggagcagcaactggctgcagatcacagacacagtgaggatatgagtgtaggggtgagcacctcagcccctctttccccaacctcgggcacaagcgtgggcatgtctaccttctccatcatggactatgtggtgttcgtcctgctgctggttctctctcttgccattgggctctaccatgcttgtcgtggctggggccggcatactgttggtgagctgctgatggcggaccgcaaaatgggctgccttccggtggcactgtccctgctggccaccttccagtcagccgtggccatcctgggtgtgccgtcagagatctaccgatttgggacccaatattggttcctgggctgctgctactttctggggctgctgatacctgcacacatcttcatccccgttttctaccgcctgcatctcaccagtgcctatgagtacctggagcttcgattcaataaaactgtgcgagtgtgtggaactgtgaccttcatctttcagatggtgatctacatgggagttgtgctctatgctccgtcattggctctcaatgcagtgactggctttgatctgtggctgtccgtgctggccctgggcattgtctgtaccgtctatacagctctgggtgggctgaaggccgtcatctggacagatgtgttccagacactggtcatgttcctcgggcagctggcagttatcatcgtggggtcagccaaggtgggcggcttggggcgtgtgtgggccgtggcttcccagcacggccgcatctctgggtttgagctggatccagacccctttgtgcggcacaccttctggaccttggccttcgggggtgtcttcatgatgctctccttatacggggtgaaccaggctcaggtgcagcggtacctcagttcccgcacggagaaggctgctgtgctctcctgttatgcagtgttccccttccagcaggtgtccctctgcgtgggctgcctcattggcctggtcatgttcgcgtattaccaggagtatcccatgagcattcagcaggctcaggcagccccagaccagttcgtcctgtactttgtgatggatctcctgaagggcctgccaggcctgccagggctcttcattgcctgcctcttcagcggctctctcagcactatatcctctgcttttaattcattggcaactgttacgatggaagacctgattcgaccttggttccctgagttctctgaagcccgggccatcatgctttccagaggccttgcctttggctatgggctgctttgtctaggaatggcctatatttcctcccagatgggacctgtgctgcaggcagcaatcagcatctttggcatggttgggggaccgctgctgggactcttctgccttggaatgttctttccatgtgctaaccctcctggtgctgttgtgggcctgttggctgggctcgtcatggccttctggattggcatcgggagcatcgtgaccagcatgggctccagcatgccaccctctccctctaatgggtccagcttctccctgcccaccaatctaaccgttgccactgtgaccacactgatgcccttgactaccttctccaagcccacagggctgcagcggttctattccttgtcttacttatggtacagtgctcacaactccaccacagtgattgtggtgggcctgattgtcagtctactcactgggagaatgcgaggccggtccctgaaccctgcaaccatttacccagtgttgccaaagctcctgtccctccttccgttgtcctgtcagaagcggctccactgcaggagctacggccaggaccacctcgacactggcctgtttcctgagaagccgaggaatggtgtgctgggggacagcagagacaaggaggccatggccctggatggcacagcctatcaggggagcagctccacctgcatcctccaggagacctccctgtgatgttgactcaggaccccgcctctgtcctcactgtgccaggccatagccagaggccaccctgtagtacagggatgagtcttggtgtgttctgcagggacaggcctggatgatctagctcataccaaaggaccttgttctgagaggttcttgcctgcaggagaagctgtcacatctcaagcatgtgaggcaccgtttttctcgtcgcttgccaatctgttttttaaaggatcaggctcgtagggagcaggatcatgccagaaatagggatggaagtgcatcctctgggaaaaagataatggcttctgattcaacatagccatagtcctttgaagtaagtggctagaaacagcactctggttataattgccccagggcctgattcaggactgactctccaccataaaactggaagctgcttcccctgtagtccccatttcagtaccagttctgccagccacagtgagcccctattattactttcagattgtctgtgacactcaagcccctctcatttttatctgtctacctccattctgaagagggaggttttggtgtccctggtcctctgggaatagaagatccatttgtctttgtgtagagcaagcacgttttccacctcactgtctccatcctccacctctgagatggacacttaagagacggggcaaatgtggatccaagaaaccagggccatgaccgggtccactgtggagcagccatctatctacctgactcctgagccaggctgccgtggtgtcatttctgtcatccgtgctctgtttccttttggagtttcttctccacattatctttgttcctggggaataaaaactaccattggacctagaaaaaaaaaaaaaaaaaaaaaa

SEQ ID NO: 893 - DNA, 6464 bp, Homo sapiens
atctgatcctgggctcccagctggagaggcggaggcagctccagggggctggaagtggaagcgcagcggcagaaggagagggagagagaaagagagagaggctaattaaaaaaggatactccgagggaagagagcaagggcggtgcgccgccaaggaccaactagcggcggagcttcgatcttgcctaggcgcggagagctcccaacctgggctggaaccttgcccagcacaggtggctgctacaccccatgtaaaaagcggaaaataaaatgaagattttccagcgcaagatgcggtactggttgcttccaccttttttggcaattgtttatttctgcaccattgtccaaggtcaagtggctccacccacaaggttaagatataatgtaatatctcatgacagtatacagatttcatggaaggctccaagagggaaatttggtggttacaaacttcttgtgactccaacttcaggtggaaaaactaaccagctgaatctgcagaacactgcaactaaagcaattattcaaggccttatgccagaccagaattacacagttcaaattattgcatacaataaagataaagaaagcaagccagctcaaggccaattcagaattaaagatttagaaaaaagaaaggatccaaagcccagagtcaaagttgtggacagaggaaatgggagtagaccatcttcaccagaagaagtgaaatttgtctgtcaaactccagcaattgctgacattgtaatcctggtcgatggttcatggagtattggaagattcaacttcagactggttcggcatttcttggaaaacctggttacagcattcgatgtgggctcagagaagacacgaattggtcttgcacagtatagtggtgaccccagaatagaatggcacttgaatgcatttagcacaaaagatgaagtgattgaagctgtccgaaacctcccatataaaggaggaaatacactaacaggtcttgctttgaactacatttttgaaaatagcttcaaaccagaagcaggatcaaggactggagtatccaaaattggcattttaatcacagatggaaaatcccaagatgacattattccaccatctagaaatcttcgtgagtctggtgtagaactgtttgccataggggtgaaaaacgcggatgtgaatgagctgcaggagatcgcctctgaaccagacagcactcatgtgtacaatgttgccgaattcgatctgatgcacacagttgtggagagtctgaccaggactctctgctctagagtggaagaacaggacagagaaattaaagcctcagcccatgccatcactgggccgcctacggagttgattacttctgaagtcactgccagaagctttatggttaactggactcatgccccaggaaatgtggaaaaatacagagttgtgtattatcctaccaggggtggaaaaccagacgaggtggtggtagatggaactgtatcttccacagtgttgaaaaacttgatgtctttaactgaatatcagatagcagtctttgcaatctatgcccacactgctagtgaaggcctacggggaactgaaactacacttgctttaccgatggcttctgaccttctactgtacgacgtgactgagaacagcatgcgagtcaaatgggatgcagtgcctggggcctcaggttacctgatcctttatgctcctctaacagagggcctggctggggatgaaaaagagatgaaaattggagagacccacacagatattgaattgagtgggttgttgcccaatacagaatacacagtcacagtttatgccatgtttggagaagaggccagtgatcctgttacgggacaagaaacaacattggctttaagtccaccaagaaacctgagaatctccaatgttggctctaacagtgctcgattaacctgggacccaacttcaagacagatcaatggttatcgaattgtatataacaatgcagatgggactgaaatcaatgaggttgaagtcgatcctattactaccttccctctgaagggcttgacacctctcacagagtatactattgctattttctccatctatgatgaaggacagtcagagcctctgactggagtttttaccaccgaggaagttccagcccagcaatacttagaaattgatgaggtgacgacagacagttttagggtgacctggcatcccctctcagctgatgaagggctacacaaattgatgtggattccagtctatggggggaagactgaggaggttgtcctgaaagaagagcaggactcacatgttattgaaggcctggagcccggtacggagtatgaagtttcactattggccgtacttgatgatggaagcgagagtgaggtggtgactgctgtcgggaccacacttgacagtttttggacagaaccagctacaaccatagtgcctaccacatctgtgacttcagttttccagacgggaatcagaaacctagttgtaggtgatgaaactacttctagcctgcgggtaaaatgggacatttctgacagcgatgtgcagcagtttagggtgacctacatgacagctcaaggggaccctgaggaagaagtcataggaacggttatggtgcctggaagccagaacaacctccttctgaagcctctgcttcctgatactgaatacaaagtcacagtgactcccatctacacggatggcgaaggcgtcagcgtctccgctcctggaaaaaccttaccatcctcggggccccagaacttgcgggtgtccgaggaatggtataaccggttgcgcattacgtgggaccccccatcttccccggtgaaaggctatagaattgtctacaaacctgtcagtgttcctggtccaacactggaaacgtttgtgggagctgacattaacaccatccttatcacaaacctcctcagcggaatggactacaatgtgaagatatttgcctcccaggcctcaggcttcagcgacgccctgacaggcatggtgaaaacattgttcttgggtgttaccaatctccaagccaaacatgttgaaatgaccagcttgtgtgcccactggcaggtacatcgccatgccacagcctatagggttgttatagaatccctccaggataggcaaaagcaagaatccactgtgggtggagggacaaccaggcattgcttctatggacttcagcctgattctgaatataaaatcagtgtttatacaaagctccaggagattgaaggacctagtgtgagcataatggaaaaaacacaatcacttcctacacgaccaccaacttttcctccaaccattccaccagcaaaagaagtatgtaaggcggccaaggctgacctggtatttatggtggatggatcctggagcattggagatgaaaatttcaataagatcatcagctttctatacagcactgttggagccctgaacaagattggcacagatggaacccaagttgcaatggttcagttcactgatgatcccagaacagaatttaaactaaatgcttacaaaaccaaagagactcttcttgatgcaattaaacacatttcatacaaaggaggaaatacaaaaacaggaaaagcaattaagtatgttcgagataccttgttcactgcagagtcaggtacaagaaggggcatcccaaaggttatcgtggttataactgatggaagatcacaagatgatgtgaacaaaatctccagggagatgcaattagatggctatagcatttttgcaattggtgtggccgatgcagattactcggagttggttagcattggcagtaagcccagcgcacgccatgtcttctttgtggatgactttgacgcctttaagaaaatcgaagatgagttaattacttttgtctgcgaaacagcatcagcaacctgtccagtggtacacaaggatggcattgatcttgcaggatttaagatgatggaaatgtttggtttggttgaaaaagatttttcatcagtggaaggggtttctatggagcctggtaccttcaatgtgtttccatgttaccaactccataaagatgccctggtttcccagccaaccaggtacttgcacccagaaggattgccctccgactacacaatcagttttctattccggattcttcctgacactccacaggagccatttgctctttgggagattttaaataaaaattctgacccattggttggggttattttagacaatggtgggaaaactctaacatatttcaactatgaccagagtggggattttcaaactgttactttcgaaggacctgaaattaggaaaattttttatggaagctttcacaagctacacattgttgtcagtgagactttggtcaaagtggttattgactgcaagcaagtgggtgagaaggcaatgaacgcatcagctaatatcacgtcagatggtgtagaagtgctagggaaaatggttcgatcaagaggaccaggtggaaactctgcaccgttccagttacagatgtttgatattgtttgctccacatcatgggccaatacagacaaatgctgtgaacttccaggcctgagagatgatgagtcttgcccagaccttccccattcctgctcctgttctgaaaccaatgaagtggctctgggaccagcgggcccaccaggtggtccaggactccgaggaccaaagggccagcaaggtgaaccgggtccaaagggaccagatggccctcggggtgaaattggtctgccaggacctcagggtccacctggacctcaaggaccaagtggtctgtccattcaaggaatgcccggaatgccaggagaaaaaggagagaaaggagatactggccttccaggtccacagggtatcccaggaggcgttggttcaccaggacgtgatggctcaccaggccagaggggccttccgggaaaggatggatcctcgggacctccaggaccaccagggccaataggcattcctggcacccctggagtcccagggatcacaggaagcatgggaccgcaaggcgccctgggaccacctggtgtccctggagcaaagggggaacgaggagagcggggtgacctgcagtctcaagccatggtgagatcagtggcgcgtcaagtatgcgaacagctcatccagagtcacatggccaggtacactgccatcctcaaccagattcccagccactcctcatccatccggactgtccaagggcctcctggggagcctgggaggccaggctcacctggagcccctggtgaacaaggacccccaggcacaccaggcttccccggaaatgcaggcgtgccagggaccccaggagaacgaggtctaactggtatcaaaggagaaaaaggaaatccaggcgttggaacccaaggtccaagaggcccccctggaccagcaggaccttcaggggagagtcggcctggcagccctgggccccctggctctcctggaccaagaggcccaccaggtcatctgggggttcctggaccccaaggtccttctggccagcctggatattgtgacccctcatcatgttctgcctatggtgtgagagctccccatccagatcagccagagttcacccctgtccaagatgagctggaagccatggaactgtggggccctggagtctgatagcctcaggagaaatttgaagaccaactgcaagaactcttaaggaatcttgtttgagaaaatgttgttatgtggtttgtatgctacttttggggggcagggctcatttcagcagcctaaatctcctccttggataatgttaatattattattattattaacaaaaaatatatatttttaaaaagttcccttaatctatgacatggtagcaatgatttccctttggtgtcttaatggcatgtcagataatttgtttttccagagaagagagctcaaagaggaattgggaaaaataaattgaactctggaatcttctctctcaagtcctaaaatgaacaaacagatatgattgtgtttgagggaaatatgtccctagcaggaaaagaattcaaagaggttcaaagaatatgtcacttactcctacttgctgtaggaataaccttgctgataagaaaaaaagggacaatattggagaaactacctcttgtttaattgatctgtccaactctgagatcacttggtaactggtttcatgtgtatccaaaaatcagcatttggatttaagctttctgaatttggtagtttaagaaacagatttagtttttcagtggttttaactcatgtgaaataatgattttccaccagctctgatgcaaagagatataattttaatgaacgatttatccagcagtgtgttccaggggttgcctctccttatctacggggattactttgtacatgcagataagttttcgcaaacctatttccattttcttttgtaagcaaataaaactttaaaacaa

SEQ ID NO: 894 - DNA, 1954 bp, Homo sapiens
actggacaaaagcgtggtctctggcgcggggatctcagagtttcccgggcactcaccgtgtgtagttggcatctccgcgcgtccggacacccgatcccagcatccctgcctgcaggactgttcgtgttcagctcgcgtcctgcagctgtccgaggtgctccagttggaggctgaggttcccgggctctgtagctgagtgggcggcggcaccggcggagatgcctgggaagaaggcgcgcaagaacgctcaaccgagccccgcgcgggctccagcagagctggaagtcgagtgtgctactcaactcaggagatttggagacaaactgaacttccggcagaaacttctgaatctgatatccaaactcttctgctcaggaacctgactgcatcaaaaacttgcatgaggggactccttcaaaagagttttctcaggaggtgcacgtttcatcaatttgaagaaagactgcattgtaattgagaggaatgtgaaggtgcattcatgggtgcccttggaaacggaagatggaatacatcaaagtgaatttctgttcaagttttcccagattatcattctttgggatgagagaacattataaaaccactttgtttattttaaagcaagaatggaagacccttgaaaataaagaagtaattattgacacatttcttttttacttagagaatcgttctagtgtttttgccgaagattaccgctggcctactgtgaagggagatgacctgtgattagactgggcggctggggagaaacagttcagtgcattgttgttgttgctgtttttggtgttttgcttttcagtgccaactcagcacattgtatatgattcggtttatacatattaccttgttataatgaaaaaactcattctgagaacactgaaatgttatactcagtgttgatttcttcggtcactacacaacgtaaaatcatttgtttcttttgactcaaattgtattgcttctgttcagatgatctttcattcaatgtgttcctgttgggcgttactagaaactatggaaaactggaaaataactttgaaaaaattggataaagtataggagggttacttggggccagtaaatcagtagactgaacattcaatataataaaagaacatggggattttgtataaccagggataataaaaagaaaaaagaagttaatttttaattgatgtttttgaaacttagtagaacaaatattcagaagtaacttgataagatatgaatgtttctaaagaagtttctaaaggttcggaaaatgctccttgtcacattagtgtgcatcctacaaaaagtgatctcttaatgtaaattaagaatattttcataattggaatatacttttcttaaaaaaaaggaacagttagttctcatctagaatgaaagttccatatatgcattggtgaatatatatgtatacacatacttacatacttatatgggtatctgtatagataatttgtattagagtattatatagcttcttagtagggtctcaagtaagtttcattttttttatctgggctatatacagtcctcaaataaataatgtcttgattttatttcagcaggaataattttatttattttgcctatttataattaaagtatttttctttagtttgaaaatgtgtattaaagttacatttttgagttacaagagtcttataactacttgaatttttagttaaaatgtcttaatgtaggttgtagtcactttagatggaaaattacctcacatctgttttcttcagtattacttaagattgtttatttagtggtagagagttttttttttcagcctagaggcagctattttaccatctggtatttatggtctaatttgtatttaaacatatgcacacatataaaagttgatactgtggcagtaaactattaaaagttttcactgttcaaaaaaaaaaaaaaaaaa

SEQ ID NO: 895 - DNA, 2408 bp, Homo sapiens
ggctgcagccgccctccgcgctcgcctgccagctccctcgccgcgcgtccgtcctccgtcctcccgggccagccagccagccagccagccgggccggcggcgggcaccaggccgtcccgatgcccgagccaggccccaggatgaacggcttctcgctgggtgagctgtgctggctcttctgctgcccgccctgcccgagccgcatcgccgccaagctggccttcctgccgcccgagcccacctacacggtgctggcgccggagcagcgcggcgccggcgcgtccgccccggccccggcccaggctaccgccgccgccgccgcggcccagccggcaccgcagcagcccgaggagggcgcgggcgcggggcccggtgcgtgcagcctgcacctcagcgagcgcgccgactggcagtactcgcagcgcgagctggacgccgtcgaggtcttcttctcgcgcacggcccgggacaaccggctcggctgcatgttcgtgcgctgcgcgccctccagccgctacacgctgctcttctcgcacggcaacgccgtggacctgggccagatgtgcagcttctacattggcctcggctcccgcatcaactgcaacatcttctcctacgactactcgggatacggcgtcagctcgggcaagccctccgagaagaacctctacgccgacatcgacgccgcgtggcaggcgctgcgcacccggtatggcgtgagtcccgagaacattatcctctatggtcagagcattgggactgtccccacggtagacttggcctcgaggtatgaatgcgcagcggtaattctccattcccctctgatgtctggtttgcgtgtggcttttccggataccaggaaaacatactgctttgatgctttccccagcattgacaagatatctaaagtcacctctcctgtgttggtcattcatggtacagaggatgaggtcatcgatttctcccatggcctagcgatgtacgagcgctgtccccgagccgtggagcccctttgggttgaaggggctgggcataatgacatagagctttatgcacaatacctagaaagactaaaacagttcatatctcacgaacttcctaattcctgaagacaacaacttgatcttacctcatttactgtgaacagaagagtcctctgttttgcacatgctttaactgggtagctgtaaaggcttgataaccatgaagaagtgcccaacctttagggtgttctaatcaaagagctgatgaaatctcagtcttttgtatctagaggtggttctgctaattcacacaacacgttaaactgaacagtcgtgattcccagcttcattaccttgcaggaatgggaatgagagctgaatgtagggacaattttctagtgctgtataaagtagcctcgcatctgtttctcaaccttatccatcatttctgacattcatgcaggacttgccctgttgccaccaatgttctcggtatttcacatgcagctctctttctgccactggatacatgggttcaatccatttgtgaagctgtgatagtgtaactggaaagctagtgtggtgaaaattcctttattattttttgttaacatgctgatctttcccggacaaatgaactgaagggtaatttactggaactctcgtgtacagcttcatcaactgtaaccatataaatataactggaatattcttaaacaaaaagaaactaggggtttttttaagtgtaaatttattactagccaacagagttttactattttgattgtctggttggtttaacaaagagcctagctgactttccttctgtaaagtcctccttgtaggcttttttaaagtactgtacatatttgcaatcacattgtgcatagattcttaatggtagatatgatttcttttgtcaggctacaacaatgaactgcagattccttgtttgtaatgtaaatgattgaatacattttgttaatatgtttttattcctatgttttgctattaaaaattttataacatttccaagacaaaaattccaagtttatgctttgaagaatttatgtaattaaaatttcactaaactaatctttttagtttaggaattatttgggttttgacactggaagttgcgccaaataagcatcagaaataggagatgcttaacattgctatactacttgtgttggttaggggtttggatttgggggttctttggttttaatttttttttccacatttaaaagccttaaatgtactgtaagcctcagatcgttgtacaactggactgcggttgattgccagtttgtgtactgttgcttggatgcggcacagtggttggtaatggaataaaggatgcatggatcagaaaaaaaaaaaaaaaaaaaaaaaaaaaaaaaaaaaaaaaaaaaaaaaaaa

SEQ ID NO: 896 - DNA, 4926 bp, Homo sapiens; identical to SEQ ID NO: 37

SEQ ID NO: 897 - DNA, 3914 bp, Homo sapiens
agacacgcacactccctcgctcccgctcgctcgctcactccctcgctctctcgctctctcgctctctcgctcacacacacgcgcgcacacgccgccgcggctccccctctcgctcccgctctccctccggctcctgcgggcggccgcggggctccggactcgcccgctgcccgcgccggggctcccgccccacgcagcgtcccgaggcggcaggactagggggagccccgggccgctccccgaggctcctgatggaaagggaaggcccctagtcctggcaggatctgccggccccaacccgcatcctttctgcgcaggaaccatggcgcttccccgactctggagctgtccaggtgctgcctggtgatccgcacgcgacgcggcgacgggggcgcgggcgggcaccccgggggctgtccatgccccggatgcggccgcgccccctccccctccagccgggtacccccgcggctgggcggcgttcagggccgcgggcccgtccgggtgccccgtcgggggcgacatcccggcggccgcgctgaggccaccatgtgacacggcgccgcatcgttgtgcgaccaagcagcggcgccctggtgcctctcgtccatgctcctgggccccagccccgcgcaggccaaggatgaggccgaggcccgaaggtagggggctccgggcgggagtcgcgctgtcccccgcgctactgctgctgctgctgctgccgccgccgccgacgctgctggggcgcctgtgggcagcgggcacaccctcgccgtcggcgcccggagctcggcaggacggcgcgctgggagccggccgcgtcaaacgcggctgggtgtggaaccagttcttcgtggtagaggagtacacgggcacggagcccctgtatgtgggcaagatccactccgactcagacgagggtgacggggccatcaagtacaccatctcaggcgagggtgctgggaccatcttcctgatcgacgagctgacaggcgacattcatgccatggagcgcctggaccgcgagcagaaaaccttctacacgctgcgggcccaggctcgggatcgcgccaccaaccgcctactggagcccgagtcggagttcatcatcaaggtgcaggacatcaatgacagtgagccccgcttcctgcacggcccctatattggcagcgtggccgagctctcacctacaggcacgtcggtgatgcaggtgatggcctcggatgcggatgaccccacgtacggcagcagcgctcggctggtgtacagcgtgctggacggcgagcaccacttcaccgtggaccccaagaccggcgtaatccggacggctgtgcctgaccttgaccgcgagagccaggagcgctacgaggtggtgatccaggccacagacatggcgggtcagctgggtggcctctcgggctccactaccgtcaccatcgtagtcaccgacgtcaatgacaacccgccccgtttcccgcagaagatgtaccagttcagcatccaggagtcagcccccattggaacggctgtgggacgtgtgaaggctgaggactcagacgtgggagagaacacagacatgacttaccaccttaaggacgagagcagcagcggcggcgatgtgttcaaggtcaccacagacagcgacactcaggaggccatcatcgtagtgcagaagcgcctggacttcgaatcccagcccgtgcacaccgtgatcctggaggccctcaacaagttcgtggacccccgcttcgccgacctgggcacgttccgcgaccaggcgatcgtgcgcgtggccgtgaccgacgtggacgagccccccgagttccggccgccctccggcctcctggaggtgcaggaggacgcgcaggtgggctccctggtcggcgtggtgacggcgcgggaccccgacgccgccaaccggcccgtccggtacgccattgaccgcgaatcagatttggaccagatcttcgatatcgatgcggacacaggcgccatcgtgactggcaaggggctggaccgcgagacggccggctggcacaacatcacagtgctggccatggaggcggacaatcatgcacagctatcccgggcatccctaaggatccgaatcctggatgtgaacgacaatcccccagaactggccacaccctacgaggcagctgtatgcgaggatgccaagccaggccagctcatccagaccatcagcgtggtggacagagacgagccccaaggcgggcaccgcttctatttccgcctggtgcctgaagctcccagcaaccctcatttctctctgcttgacatccaagacaacaccgctgcagtgcacacgcagcacgtgggcttcaaccggcaggagcaggacgtgttcttcctgcccatcctggtggtagacagtgggccgcccacactgagcagcacaggcacgctcaccatccgcatctgtggctgcgacagctccggcaccatccagtcctgcaacaccacggcctttgtcatggccgcctccctcagccccggcgccctcatcgccctcttggtctgcgttctcatcctggttgtgctggtgctgctgatcctcaccctcaggcgccaccacaagagccacctgagctcggacgaggatgaagacatgcgggacaacgtcatcaaatacaacgacgaaggcggcggcgagcaggacaccgaagcctacgacatgtcggcgctgcggagcctctacgacttcggcgagctcaagggcggcgacgggggcggcagcgcgggcgggggagcgggcgggggctcgggcgggggcgcgggcagccccccgcaggcccacctgccctccgagcgccactcgctgccgcaggggccgccgagccccgagccagacttctcagtgttcagggacttcatcagccgcaaggtggcactggcggacggggacctgtcggtgccgccctacgacgccttccagacctacgccttcgagggcgcggactcgccggccgcctcgctcagctccctgcacagcggctcgtcgggctccgagcaggacttcgcctatctcagcagctggggtccgcgcttccggcccctggccgcgctctacgccggccaccgcggggacgacgaggcccaggcctcctagcccctcgccctgccgtcggggcgcggctgctcacccgcccagcacacgccggggccccaggacaacgcgtttcccccgcggaccccctttcctgccctcccccaaccctcccttggcggctggacggaggggggacttgctaggagcggactcttccattcctcctcctctaggggtgcagctttggagcccagaggtgcgggattctgaccaacggcattaaaactgaggcgagaccgggcacggtgtggctctggggttagaatgggagatgggggtggcgttgcagagtcgggaaggggcgggtcactcaatcctggcctgggggagaatgctggagggagcacgccgctgagatgcccccaccccaggtttcccccatcagagttaagaggaaagaaggctgttcacttactaagcacctactgtgtgctgggacgctgtacagagaccagctcagtcgtcagagaaaccatgaggtggtgtcctgcacggaatagaaggggaaaggaccccagagaagtggctgtgacccgtccaagggcacctggccagtgaatggcagagcctctggcactgaccagctgcctggcctcgggcaagtcacttcacttctctggtcctcagtttcctcatctgtcaaatggggttaataacagaacctacctcgaagagttgtgaggctaaaaagggttcatatgtgtcaagtggttaggacagtgcctggcacatagtaggtgttcaataaatgctagcctttgttactattcttaaaaaaaaaaaa

SEQ ID NO: 898 - DNA, 3080 bp, Homo sapiens
tgggtgttctccgcggcgccgagtcccgggagcgcggtgggggcagcgggcgcggggcgggcgcggggaccgcgccagcctgtcactaatgtctccctttgtgtctcccccatctcatccttttccccggcgcgccgtgcccgccgaccccacaggaaggcctggacgacggcccggacttcctctcagaagaggaccgcggacttaaagcaataaatgtagatcttcaaagtgatgctgctctgcaggtggacatttctgatgctcttagtgagcgggataaagtaaaattcactgttcacacaaagagttcattgccaaattttaaacaaaacgagttttcagttgttcggcaacatgaggaatttatctggcttcatgattcctttgttgaaaatgaagactatgcaggttatatcattccaccagcaccaccaagacctgattttgatgcttcaagggaaaaactacagaagcttggtgaaggagaagggtcaatgacgaaggaagaattcacaaagatgaaacaggaactggaagctgaatatttggcaatattcaagaagacagttgcgatgcatgaagtgttcctgtgtcgtgtggcagcacatcctattttgagaagagatttaaatttccatgtcttcttggaatataatcaagatttgagtgtgcgaggaaaaaataaaaaagagaaacttgaagacttctttaaaaacatggttaaatcagcagatggagtaatcgtttcaggagtaaaggatgtagatgatttctttgagcacgaacgaacatttcttttggagtatcataaccgagttaaggatgcatctgctaaatctgatagaatgacaagatcccacaaaagtgctgcagatgattacaatagaattggttcttcattatatgctttaggaactcaggattctacagatatatgcaagttttttctcaaagtttcagaactgttcgataaaacaagaaaaatagaagcacgagtgtctgctgatgaagacctcaaactttctgatcttttaaaatattacttaagagaatctcaagctgctaaggatctcctgtatcgaaggtctaggtcactagtggattatgaaaatgctaataaagcactggataaagcaagagcaaaaaataaagatgttctacaggccgaaacttcccaacaattatgttgtcagaaatttgaaaaaatatctgagtctgcaaaacaagaacttatagattttaagacaagaagagttgctgcattcagaaaaaatttagtggaactggcagagttagaactgaagcatgcaaagggtaatctacagttgctgcagaactgcctggcagtgttaaatggagacacataagccacactccgccttcctgttaaaaagggctgccttccttcaaattttatttttgttttcttaatgatgttaagcatttatgctcactggaaacaaacaaaaagcagctgaaaaagtgcatcaactcctctttttctgagaaacatggagcagcgcacgcccaggcgatgccagtctgtgtgccgtgatgccgcactgtgttccccatgacagtggtccatcatcgtgcactcgtcatactcagaagtccaaagttcattcttctttaaagtagcctctataactctgtttattttataaatagtattccttatggctgccactcttatttacctttaaataatttctgaaatttaaccttttcagaatgcattgttgaaacaagataaagattgccttttttgaattttttaaattttgtttttaaaagcatataccaccttagttcattcatgtatcctggtaaagcatcttaatcagacttatttttaattactgaatatttcttagacgttttgggacagattttatgtaatctttataagtatgatttctgaagaaaagcaaatgcattagtatgtttgccttaaacttgtagactaaaccaagtattgtaaaataaacagcgataacagtgatagtttttaactctatggtcattgtatcactctggaaaatgtggagtagctgtaataaatctactcctgtattatgctttacagtgcaggtcttagtttttcttttttctcatttcttttgaaatggcatctcgaacaaagtccaccaatccctttacaaaagaatgaactgctcctctgtgtgtacttcatagaaggtggaatcggacagaggcaggttagtgacagttattcctgaaatacaggagcagagtacagtctgttgtggtttcccggattccgcgcctagctcagccaattaagcatgagacataggccattgagccacttagtagttatgcgagtggatagattggtatgtagagggaaagaggtctgctgtaaagaacaacacttgtttgtctgtggggaaagaaaagcagaatacttgagatgaaagttggcatacaaataggatactatcgccagtagttatattacaaacattatcggcctttctagtgtgaatgaacattagacacattattgtcattcctagtttaaagttaaggttgcgtggttggatttttccactatctttttctaatttttctaccatttggagaccgtaggcatttgggcctgtcaccccttggatgggttcctagtttgtttacattttcctgaaccctcctgagcgcccgttcttggtctaatccccagtcgtgatgattccacacttcctcagccgcatgttgtcttgcctcattcatgagctggtcagcgtttcgtctctttaactgacatgttccccagtgctgtttgaactgttgagtttccgttgctggctgagtgcgttttgtccttcacgtaaccttcgctggtaaaaataagcccatgtgatgtccaccagtggatgaatgctggaccgagagccctagcttctggatccaggtctaggcccttcatctgctgctctgtggcccagggcaggtttgcttgacctctgcctcagttctcgactctaaaggacatactgacctacctcacaggggtgttgtgaggattaataaatgttggtactctgctttgg

SEQ ID NO: 899 - DNA, 3207 bp, Homo sapiens
gggcctctggtagccctggggacgctgtatctgtgggctcttgaatcgcgtcacaaatcagcgaccgaactctggcggtggtggttaagacggcgaaggcggcagcggcggcgacagctctggggtttgcgtctcggggtgtgtcggccgccgctgctgcttgggcctggtatgtacagatggctggttaggattctcggcaccattttccgtttctgcgaccggtcggtgccccctgcccgggccctcctgaagaggcggcgctcagacagcactctgttttctacagtggacactgatgaaataccagccaaaagaccaagattagattgctttattcaccaagtgaaaaacagtctctacaatgctgccagcttatttggattcccattccagctgaccacaaagcccatggtaacttctgcttgtaatggaacacggaatgtggccccttcaggagaggtattttcgaactcttcatcttgtgaactgacaggttctggatcctggaacaacatgctgaaactgggtaataaatctcctaatggaataagtgactatccaaagatcagagtgacagttacccgagatcagccacgcagagtcctgccttcctttggttttactttgaactcagaaggctgtaatagaagaccaggtggccgtcgccatagcaaaggtaatccagagagttctttaatgtggaaacctcaggaacaggctgtaacagagatgatttctgaagagagtggcaagggtctgaggcgtccccattgtactgtggaggagggtgttcaaaaagaggaaagagagaagtaccgaaagttattggaacgacttaaagaaagtggtcatggaaactctgtctgtcctgtaacttcaaattatcacagttctcaaagaagtcagatggacacattaaagaccaaaggctggggggaagagcaaaatcacggagtcaaaacaactcagtttgttccaaaacaatatagacttgttgaaacaaggggacctctatgttcattgagaagtgaaaagaggtgttcaaaggggaaaattactgatacagagacgatggtcggaatcagatttgaaaatgaaagtaggaggggataccaactggagcctgacctatcagaagaagtgtcggcccgactccgcctgggcagtggaagcaatggcttactcaggaggaaagtgtcaataattgagacaaaggaaaagaattgctcaggcaaagagagggacagaagaacggacgatctccttgaacttacagaggacatggaaaaggaaatcagtaatgccctaggccatggcccacaggatgaaatcctaagtagtgctttcaaattgcgaattactcgaggagatattcagacattaaagaactatcactggctcaatgatgaagtcattaatttttacatgaatcttctggtggaaagaaataaaaagcaaggctatccagcacttcatgtattcagtactttcttctatcctaaattaaagtctgggggttaccaagcagtgaaacgatggaccaaaggggtaaatctctttgaacaagaaattattctggtgcctattcatcggaaggtacattggagcctggtggtgattgacctaagaaaaaagtgtcttaaatatctggattctatgggacaaaagggccacaggatctgtgagattctccttcagtatttacaggatgaaagtaagaccaaaagaaatagtgatctgaatcttttagagtggacccatcacagcatgaaaccacacgagattcctcaacagctgaatgggagtgattgtggaatgtttacttgtaaatatgcagattatatttctagggacaaacctatcacatttactcagcaccagatgcctctcttccggaagaagatggtgtgggaaatccttcatcagcagttgctgtgagaaaactttgcctggtccctctagctgctggtggttctttcacagacatttccatatacctcatgcattgtgggttaaaaagtccctgcatcacttctgttctcacaggtactgagctgtcaaaagtgcatgaaggcctctcactgtactctagtcctgacttggggtgcagagggctgcttgcaatcctgtttgtaaggctgtgcctgctcagagctttggactgttcaacccacacaagaacaaacgctaactaatattttttttaagagattcttttccctatgaatgtgggaaatgcaggatttattctgtgaattgtttgtttctgtgtgtttgttcagcgtattcattcactcactcgtttgcaaacataatgggcagtggtcatttactgctgctcttttacagttagctctaaattacttgtttgaactatttatttctgaaaggaatgttactcaagctgccactccctgctgaagagcaggagggaactctcactgggggcggaaggaagtggagctggagcagtaactgccaacatgaagctggagggtttgggattttttttgtttttgtttttttgaggctcaaaaaatgctgggagaaatgaaaatgctgtgggatagggctcctgttgcctttcagaggaagtctgacactacagcgttggcacagtgccgtgaacagtggaactgtgcccaagggactctgattatccaagcatcttccgaagagtgttgtggtcaccttaaagagacttccccttctggaaatgtggtgacttggcttagtcttcaaactggattcatggatttgaagtaactgtaaaccctaaatcttcattttcatcccagatctggttgagtataaacctcagaattgtaggggctggcctgagctgtttatttcaaaagatactattcaatttaaagctatttttcctcagagtttttgttttctatatattaagtctaaattaagttttctactcattaagactaacatctccccactccatccccactgaaatttgtggaagaaaatttagtacttggctctgaggttgccagttatacaataatctattttgcatatgaaagtttgtatttaacttttttgttcattaaaaaccttactgatatggttataacttcagacagtttagagttggtcagaacatattttgcaagatctagtgcctagtgttgcttttctgatgtaataaaaggtggtctggcagaacctaaaaaaaaaaaaaaa

SEQ ID NO: 900 - DNA, 4408 bp, Homo sapiens; identical to SEQ ID NO: 38

SEQ ID NO: 901 - DNA, 4596 bp, Homo sapiens
aaaggaggcggggctgcggcggcgcgcgctcccggaacgcgcgcaccgcagacggcgcggatcgcagggagccggtccgccgccggaacgggagcctgggtgtgcgtgtggagtccggactcgtgggagacgatcgcgatgaacacggtgctgtcgcgggcgaactcactgttcgccttctcgctgagcgtgatggcggcgctcaccttcggctgcttcatcaccaccgccttcaaagacaggagcgtcccggtgcggctgcacgtctcgcggatcatgctaaaaaatgtagaagatttcactggacctagagaaagaagtgatctgggatttatcacatttgatataactgctgatctagagaatatatttgattggaatgttaagcagttgtttctttatttatcagcagaatattcaacaaaaaataatgctctgaaccaagttgtcctatgggacaagattgttttgagaggtgataatccgaagctgctgctgaaagatatgaaaacaaaatattttttctttgacgatggaaatggtctcaagggaaacaggaatgtcactttgaccctgtcttggaacgtcgtaccaaatgctggaattctacctcttgtgacaggatcaggacacgtatctgtcccatttccagatacatatgaaataacgaagagttattaaattattctgaatttgaaacaacatatttttatacttaatgaattgtatctcattaatctcttcccttacatcttcatgtattgttggtttgttttttggttttgggtttttttttttttttttttggtataagaactaacatcaaaaggcctgtttaaagggaaaggttaatgggctacttaatattatgaacaaaacaaaaaaacaaggctgccacagtggaatattatcttacaagaataagaactacataaaacagatttgtaaaaaatacatatttgaagtattccctgtatttccattattctttatggaatataaagtaagcatgaaaggtagttaaaactttcaggtgcctgtagagtcataataactgtattttatgccttgcattcacgcaaattcacattggatgtgatttaaaagtagacattctctttttcctcttttaggatatgtttgattactggaaaattaatatggttatttgttagaagtctggtttataaaaaagccaaaagtgatggaatttattccatttgtcttaggaaggcccataatacttgtttttcttacatgtgactagcaactttctccacttaaagactaaatacctctttatatgatgtaaattattctaattcattttaaaatcttttaggtcagcaaaatgtgtgtcttcagtgctttctctaaaaacgttcctttatagctttgtacttttttttttagcgttgccattgaaagttaaaatgtttgcatggtttaccctctgagttatgtttcttctagtgagcatgcctgctgtcactaagtgaattatttactactttttgtaggtctatattttaataattattgggataataataattgtggtatgctttccatttacaaaccactcatatactttagtgtatgtcatcctcaataatctaatgaggtaagtagtataagtgttagctctttgcagataagaaactgaaacccagaagtttattgaattgcttcattgttacctagccagcaaggagtggaattaaaacttgaactcagatcttctaattttctgagctcatcctttctcttatacctcagattgcagactaatcaaattttacttaaaaccttcctgatatttttgttaccctggacaccctttctattctagaaaaggtttcccattttatatggaagtgactaattttcaagctgccaacaacttatatcgaggtaatattttattctctgaataaattcatttcacttatattaaaagcataaggaaatctacatgtatgtaaaaataacttagaaattcagtacataatacatgattgaatacatgatcgtatttaacatgttttttttttctgcagtggacaaataaacatcctcaaagtagcaactgcaaatcagttacccttagaaaagcaagaccaaacactgtagttacactattagcagtgaccaaaaagggctaatattttctaagaatagtttaaattacagacatttgttatatttaccttatgtgaaatacatcactatttaattacattaattttaacatctgttgtgtggagttgtatagttcatgcaaaagcctgtgggtatgggtttttcaaaccagcagaaaggtcaaaggtacctgaatgctaaactgcctggctcccagctttttcattaaacttttcagggtcttggtttctttatctgtaaaatgacagagttggaccagttaactttaatggccatccttttacaccacacaagttgataaaatttatctgttcagcaaagagattgaacaaaaaagcacgttagtaatatgaagacaggaaaacgaatgaaagtctaacacataactcatattgatttactttatttctgttagattttacactctgaaaatttcacctcatttagtttgtacaaatactagacatggaaacttaaaatgtgcaggtgtcaaagcttaaaaatcaggtgtgtcctctttaaaggcatgtgcgataagcctgcagtcttaaccagacctggtaccagtttaacagttcatgatacttctgtgatgagtggatctgttagtctggtagagattaatgttgaaatttacttgaattacagttatttgacaagcccactttttttggagtttggtgaggaagataagtaaaaatgcccaactagtacaatgtggagaaagttttctgtttgcttgactaagggaaattgctcagaaaaagaatgctccaacatgggaataaggaccttcagtctcaggaactcatttttgggtgcagtttctacatttaaaaaattgacttgtgttcagtttgataaccagttcatttgctttagtctcagtgttttaaagaagtctcataatgttctacaaagacacaaagcttcaggcttatacaaaactgagtatgattagaaatacctgagcccagaaatgattctgagaaaagagaataatttgaagacacttatttaaaagtaattatggttagaaatgaattaatttaaaaatgtgttcacatatccctttctctaacagtttaacctagacaaacatctgtatcagtatttttttattcccctgattgattacatttggtttctttattctgaaaggaaaataacaaaaacttcagaaattcctaagggtgtaataagaaagtgggttttgagtttcctttcctggaattattttacagttctttggtgggtctcgtcagccaattcatagctgggctttaagattatcatcttagagatgatagatgggctttttaaagatttcatcttagagatgaaaagctgggctttttctctaagatgataatcttaaagcccagctattaattgataatgaacatttttcactatttttttttctatctgaagcttagagatctagagctttggatctttcgggtatatgtcaatggaggtattattttataatactttgcattgacatgaagtgggttcatgggggaaaaccatgagctgtgaacattggtagcaaacaagcatatattcatttcaaaactttccttgcttttagcagagagaagcctgtatatgttacatgtgtgactttcagtagtttaaagagatgtttcaaaaaattgttgcatgtttttgatgcaatttgggaaattgtttacttcacaatgtagtcattcataaaaaaattcatgaaaatactgaacatatgtttgaggatttttcttttcctttttaaatttttttattttttctgagacggagatctgctcttacgcccaggctagagtgaagtggcgcgatcttggcttactgcaacctccaccccccaggttcaagcgattctcctgcctcagcctccggagtagctgggattacaggcgcccgccaccacgtccggctaatttttgtattttcagtagagacggggttttgctatgttggccaggctggtctcaaactcctgacctcaagtgatccacctgcctcggcctcccaaagtgttaggataacaggtgtgagccaccgtgcccggctgaagatttttcttaattgcaataaatattcagcattttttctaatgaaaatgaattttgtttaccagtaaaagtatgcattttaaaagactttcagatttatgctttttacgtgaagctgctaaactaaaagtaaatggaagaaaccaagtctagtaggttttttctttttttttgtgggggtgggatgggggaggttagttacacttaaaatatcttctccagagactgtatgctcctatactagactgtaagctctttgagggcagtctgtcagatttatctttgtatcttccccagcgcctagtgtagtgccttgcacataataggcgcccaataaatattgatgaagaatgaa

SEQ ID NO: 902 - DNA, 2888 bp, Homo sapiens
cccgagcctctctccctggccaggccccaggtctcgcagccagggatggagatggggggagggggaacctagagttctttgtagtgcctccctcagactctaacacactcagcctggccccctcctcctattgcaaccccctcccccgctcctcccggccaggccagctcagtcttcccagcccccattccacgtggaccagccagggcgggggtagggaaagaggacaggaagagggggagccagttctgggaggcggggggaaggaggttggtggcgactccctcgctcgccctcactgccggcggtcccaactccaggcaccatgttccccgcgggcccccccagccacagcctcctccggctccccctgctgcagttgctgctactggtggtgcaggccgtggggagggggctgggccgcgccagcccggccgggggccccctggaagatgtggtcatcgagaggtaccacatccccagggcctgtccccgggaagtgcagatgggggattttgtgcgctaccactacaacggcacttttgaagatggcaagaagtttgattcaagctatgatcgcaacaccttggtggccatcgtggtgggtgtggggcgcctcatcactggcatggaccgaggcctcatgggcatgtgtgtcaacgagcggcgacgcctcattgtgcctccccacctgggctatgggagcatcggcctggcggggctcattccaccggatgccaccctctacttcgatgtggttctgctggatgtgtggaacaaggaagacaccgtgcaggtgagcacattgctgcgcccgccccactgcccccgcatggtccaggacggcgactttgtccgctaccactacaatggcaccctgctggacggcacctccttcgacaccagctacagtaagggcggcacttatgacacctacgtcggctctggttggctgatcaagggcatggaccaggggctgctgggcatgtgtcctggagagagaaggaagattatcatccctccattcctggcctatggcgagaaaggctatgggacagtgatccccccacaggcctcgctggtctttcacgtcctcctgattgacgtgcacaacccgaaggacgctgtccagctagagacgctggagctcccccccggctgtgtccgcagagccggggccggggacttcatgcgctaccactacaatggctccttgatggacggcaccctcttcgattccagctactcccgcaaccacacctacaatacctatatcgggcagggttacatcatccccgggatggaccaggggctgcagggtgcctgcatgggggaacgccggagaattaccatccccccgcacctcgcctatggggagaatggaactggagacaagatccctggctctgccgtgctaatcttcaacgtccatgtcattgacttccacaaccctgcggatgtggtggaaatcaggacactgtcccggccatctgagacctgcaatgagaccaccaagcttggggactttgttcgataccattacaactgttctttgctggacggcacccagctgttcacctcgcatgactacggggccccccaggaggcgactctcggggccaacaaggtgatcgaaggcctggacacgggcctgcagggcatgtgtgtgggagagaggcggcagctcatcgtgcccccgcacctggcccacggggagagtggagcccggggagtcccaggcagtgctgtgctgctgtttgaggtggagctggtgtcccgggaggatgggctgcccacaggctacctgtttgtgtggcacaaggaccctcctgccaacctgtttgaagacatggacctcaacaaggatggcgaggtccctccggaggagttctccaccttcatcaaggctcaagtgagtgagggcaaaggacgcctcatgcctgggcaggaccctgagaaaaccataggagacatgttccagaaccaggaccgcaaccaggacggcaagatcacagtcgacgagctcaagctgaagtcagatgaggacgaggagcgggtccacgaggagctctgaggggcagggagcctggccaggcctgagacacagaggcccactgcgagggggacagtggcggtgggactgacctgctgacagtcaccctccctctgctgggatgaggtccaggagccaactaaaacaatggcagaggagacatctctggtgttcccaccaccctagatgaaaatccacagcacagacctctaccgtgtttctcttccatccctaaaccacttccttaaaatgtttggatttgcaaagccaatttggggcctgtggagcctggggttggatagggccatggctggtcccccaccatacctcccctccacatcactgacacagctgagcttgttatccatctccccaaactttctctttctttgtacttcttgtcatccccactcccagccccttttcctctatgtgacagctccctaggacccctctgccttcctccccaatcctgactggctcctagggaaggggaaggctcctggagggcagccctacctctcccatgccctttgccctcctccctcgcctccagtggaggctgagctgaccctgggctgctggaggccagactgggctgtagttagcttttcatccctaaagaaggctcctttccctaaggaaccatagaagagaggaagaaaacaaagggcatgtgtgagggaagctgcttgggtgggtgttagggctatgaaatcttggatttggggctgaggggtgggagggagggcagagctctgcacactcaaaggctaaactggtgtcagtccttttttcctttgttccaaataaaagattaaaccaatggcaaaaa

SEQ ID NO: 903 - DNA, 4620 bp, Homo sapiens
gctcctaggctcccggctcgccgccatcttgtattggggtttcattgttcccgctgggccgggcggtttagtgtaattgccgccggaggaggaggcggagtaacctctggtcagccgagaaaccccactatcctgtagccataaccgcttaaacgatttgggaggtagtgaagggcagggagctggacctggaggcgccgccgcgacagcagcagccatggaggacgagatgcccaagactctatacgtcggtaacctttccagagatgtgacagaagctctaattctgcaactctttagccagattggaccttgtaaaaactgcaaaatgattatggatacagctggaaatgatccctattgttttgtggagtttcatgagcatcgtcatgcagctgcagcattagctgctatgaatggacggaagataatgggtaaggaagtcaaagtgaattgggcaacaacccctagcagtcaaaagaaagatacaagcaatcatttccatgtctttgttggtgatctcagcccagaaattacaactgaagatataaaagctgcttttgcaccatttggaagaatatcagatgcccgagtggtaaaagacatggcaacaggaaagtctaagggatatggctttgtctcctttttcaacaaatgggatgctgaaaacgccattcaacagatgggtggccagtggcttggtggaagacaaatcagaactaactgggcaacccgaaagcctcccgctccaaagagtacatatgagtcaaataccaaacagctatcatatgatgaggttgtaaatcagtctagtccaagcaactgtactgtatactgtggaggtgttacttctgggctaacagaacaactaatgcgtcagactttttcaccatttggacaaataatggaaattcgagtctttccagataaaggatattcatttgttcggttcaattcccatgaaagtgcagcacatgcaattgtttctgttaatggtactaccattgaaggtcatgttgtgaaatgctattggggcaaagaaactcttgatatgataaatcccgtgcaacagcagaatcaaattggatatccccaaccttatggccagtggggccagtggtatggaaatgcacaacaaattggccagtatatgcctaatggttggcaagttcctgcatatggaatgtatggccaggcatggaaccagcaaggatttaatcagacacagtcttctgcaccatggatgggaccaaattatggagtgcaaccgcctcaagggcaaaatggcagcatgttgcccaatcagccttctgggtatcgagtggcagggtatgaaacccagtgaataaggactccagaatctaaagccagtggcttgaggctacagggagtgtagtaaagccgttgtttacttaaagatttatcaaatcagtcagtgcaaatgtcagatacaatgtatttatttaaaagattcatttttaatcatgaaattacttatcatccacattgttttaaaaagaaacaagatgctggatgtctgccaatttttgccttcattaccttttttgataaagtttctcagatccttgtttcaaacacaaatgcagggattgctgccactttttaactattaagaggcagaaaattgcacaatattgaacttttttccactgaagtagtgtgcagttctagtttgcattcctgatatgatttaaaacatgtaatataaagatgttaaaaaaaaaaaccaaaactgtgcagagtctagaagttgtttgtcatcttcagcttgtgcacaattctgttttaggttaaaaaaaggcattgtttgagctgtcccatctccactgttatccctttggggttttttaatataaattattagtttacatcatttttgtatctacatcttttttcacaaatttgtcttgccttattaaagttctgtaaaatatacttaaatggaaaaaatgatgttcatttagattgaaaacttttctcagatggattgataattgcattcatcttgtgttttatatgagaaggtgcctcaagaatttcctgttggatttgtttaaaaggatttttatctttcgtgataaactttgctgtgtaccaggaactataaaaacaaaaacttgttactaaagaaaatatctgaaatgtgataagttcttatgccatgttaatttcatgtgtcaacttcaacatttacatgtattatttcattatgtaaaatgttttagcaatttaatattttgcacagttagcaaactttgtatgtcatttccttcaaggcatcatgcagagttgacatgagatttataaggttttaagttgtttgcatgtgaaaatcaaatacatactttggtagtctttgaatacaaagtcatctgctcttgtttttcaagaattttgagacacaaagttgtatgtaaaggaatatattaatttgccgttttctaggtagatttgctcaaaaagagtgaatcaacttaatatgtacaaatgatagctgtgaaactgtagaatatctttgtgtcaggcttggagttcattgtgacctccaaattttgcctgaaggaccagctgggcaaagcatcttttaaatgttcagaggccaaaagataaacaaaaaaaaaaccttaaaatcctacctctttaaacagccttcagataagagaatcctcagtgcaatcattattttgattcgtttggtacctgttttcctggagttcccgattttattattttggggtggctccaagcattaagaggtttaatctttgatggcattgttctagttttgaaatttctagtatatttcagagtctcttagaagacttgtgtgggaagtttcactttgttttcagtgaagatcacaaacctccttcttcctttactcaagaggaaaggtcccagtatacatatttgaatggttgatggttttcaagaccttcagggagctccctgcattttacctagaaacagaaaaggcccgcaaaatcttaagtttcctggcctgcatttcccgggtaggggcaaatgactccaagctggtctctaagccaatacccttataaaccagagcccaggaaagacagctcgagtgtataattctctggagctcaattctatgcagttgtgctgatatttcattaagtcactgtgtatttttaagtgttgatacattaaaagtcgctttatggaagatgagtaaattttttaaatacttggaaattttatttccttgttaacttctacagatcagggcatgcaaccaaaagcagcttaaatgaaatattttaaaataaaatatcaggaagctatttttagatttcttctggcttatgtttctactttaggaccctcattgttctcttattaaaaaaaattatttcctgtgcatctcatggactgcagggtaaattatttgggcataaataatttaaatagttttctttcattttgactatctccagtaataacagtttttattatccagcatattggcttattgcacaaatcttaaaatgtacattgactactttctgagaagaaagtggtatcagtactcatgatgaaaaggttactactgaacaaattcacatttcaggaacacctctatctttggtttaaatcttactcttagtttttccgtctaaaaatcatactggtattagtatcaggtaaggaaattaaagtttttaaaatggtttcattctctgcaatatgcaaaatttagattttactttctggtactgtaaagaacctgaagtgatttacacttaatgggtgattaatccagtattctttaccctgaatgtttggatattaaagttcctttatgttttctataacctgtgggatcttcttgcagtgattattgtgtgtgagattttttttctttttggtctatccatattgttatattcactcaggtattttttttttaatcttattccagaatcagtggtttatattgggttactgtttaacaccaaatggaattggcattctgcagatttaattaattatgaaaccagggtctcattttccttgctgatacttgttgaaaatgagattcacattctagtctttattttcctcctgttttgtccctgtgcttgtacatcttccttttatttgtgtgttatagttctattccatttgagaaggcagttggtaagaactagattgcatgtacaaagacaggtttactaagtgctgtacagtggtcctgaggttacagttgaattagaaaaacgaaatgtacttacaggaaataagaaagcaaacctttcaaatgagagtgatgatttctttaaaaaaaatcagtttttttctctcaaataatgttctttatttcacgaaatcgtcaatcttaagcatgagcagggataaacaactcctagaaggaactcaattcattcttcctggattttctctgttgttaaatcacaaaaatgatagtccccaatcgtttctttataggaggttattacatttcattacagtcactgcattttgactgttgtgtttagaatttgaatgtacatccaaaatgatgagtttcaatttaagagccttaataaaatgtgtgagtgtgtctcaattgaa

SEQ ID NO: 904 - DNA, 4544 bp, Homo sapiens
agcacaggcacgtcccgggggctccagcttctgctcagagcgcggagagccgggccgggcgggcgcgcgcgcaggactcgggccgctcgaggggtccggccggacggtgtcgggagccggacccgtcggcagaggagcgggcgccgcgatggctgagggcagtgccgtgtctgaccctcagcacgccgcgcgtctgctgcgagcgctcagctctttccgcgaggagtctcgcttctgcgacgcgcacctggtcctcgacggggaggagatcccggtgcagaagaacatcctggcggcggccagcccgtacatcaggacaaagttaaactataatcctccaaaagatgatggatcaacttataagattgaacttgaagggatatcggtaatggttatgagagagatcctggattacatcttcagtgggcagatcaggctaaatgaagatacaatccaagatgttgttcaggcagctgacctgctgctactgacggaccttaaaaccctgtgctgtgagtttttggaaggctgcattgctgctgagaactgtattggtatccgtgactttgcactacattactgcctccatcacgttcattaccttgccacagaatacctggagactcatttccgagacgtcagcagcacggaagaattcttagagctgagtcctcaaaagcttaaagaagtgatttctcttgagaagttaaacgttggcaatgaaagatatgtctttgaagcagtaattcgatggatagcacatgatacagaaataagaaaggtccacatgaaggatgttatgtcagctctgtgggtttcagggttggactccagttatttacgggaacagatgctgaatgaaccattagtacgagaaattgtcaaagagtgtagcaatataccgctcagccagccgcagcaaggggaggcgatgctggccaacttcaaaccccggggctactctgagtgcatcgtgactgttggtggagaagagagagtttcacggaaacccacagcagcgatgcgatgcatgtgccctctctatgaccctaacaggcagctttggatcgaactggcccctttaagcatgccgagaattaaccatggagttctctcagcagaaggatttttgtttgtattcgggggccaagatgaaaataagcagactcttagctcaggagaaaagtatgatccagatgcaaatacatggacagcattgccacctatgaacgaggcaagacataacttcggaattgtggagatagatgggatgctgtacattttgggaggagaggatggtgaaaaggagctgatttccatggagtgttacgatatttattctaaaacctggacaaagcaacctgatttgaccatggtcagaaagatcggctgctatgcagctatgaaaaagaaaatctacgccatgggtggaggctcctacggaaagctttttgagtctgtagagtgttatgatcccaggacccagcagtggactgccatatgtccactaaaagagaggaggtttggagcggtggcctgtggagttgctatggagctgtatgtgtttgggggagtccgaagtcgtgaggacgcccagggtagcgagatggtaacttgcaagtccgagttctaccatgatgagtttaaaaggtggatctatcttaacgaccagaatttatgcatccccgccagttcctcttttgtttatggagctgtacctataggagccagtatttatgttattggagatcttgatacaggtaccaattacgactacgtgcgtgagtttaaaagaagcacaggaacctggcaccacactaaaccactccttccatccgaccttcgccgtacaggatgtgcagccttacgcattgcgaattgcaagcttttccgcctgcagcttcagcaaggcttattccgtattcgtgttcattccccttgaggaggaagcagagcagagtgcgagatcctgacccaagagcaccataacatagctccgaaagggagagcagagatggcagctgaaactcactctgtgctgggctttggtatggtaactctttggtggttttatgatgcttacaaacttgagctttagctcttgtttgggagaacacgtaactgttgaaaaactacctgggaggagtgagttcctccagttaaatgtggctgtagatgttggaggctagggaggctagtaaatatcaaaaggaaaagggagtgggaattgctatcatgtaaaatatcaaagttaaaatactaaggtgcattttccctgaagggaactcatgtctgactgctgtattcaaatacgtagctttggtaacaaacaaaatccgtatatgcaaatcaacatatccaaacatgccaagactgcttttccactgcacttggaaggatatattatgcctaaccctgcccaacaaattaaggtttgtgcctaaaatgttagattggactgtatgccagttagtctccatttattcctagtactctgtcctaagaatctttttaaaactatatcatgatgaattgaaatgaagataaaattgctcttttgtaactttatcttagtaatgtaaagattcagtaaattgatgagtcaggttgcagccctcatgtgaactgaaagaagttgctcgcttctgtgttgacttagatcaagacacgtcacgcatcctttctggggtagtacctgtggagccgggaagggtctcctgcagtgccattctgccttctcaatgagcaaaaccattttctaagtatgaggatattagtgagtaggagattttataaaagaaagacctgagtcagacaaataataaaggtctgctgtggctaaaaaagcaaaaacaaaaaagctatccagacaaaatacatagggatcagaaactttttcatataacctgtctgaaagcacacaaagtcttgtttactactgtttagggtttgaaaacttgtcttagaatgcgaatctgtgttaagaatctagtctttgtaatagaagtttcccagtggcattcactagtgagagttttagacaaattatgttacgagtaaagtttggctggtagaataaactacctcaacttaatttcattctgttcatagtagagcaaattaatcttttcctccttccctcctttcctatctctcattctcacctcaacccactttaccccacttctcattgggggaaaaatgtctttcgttcgtggaacgtatcttgtaagatattttgttttccacttgaattacaccaccctagtgtgaaatcggggacttcaaagtgcttgattccttcctaaattgaattttatgcaatgtcaaatttctaatcaatttaatatacagtacttcatttttaattgttttctaaaaaaaaggttttttttttccttttggaatatggctgtaagaagcagcattttgtcttattaacacatgtataaaggtatcctttggttttaagtcgagaacaggaatttcttctagaaacttcctgtatggaacgtttatatgcaattaacatgcatatgaaaaacatcacttacgttctcccacccatagacataaaaaagggtgacctgtgattttttttcttatacctgctggaagtcagtacaatgcgtcaaaagttgctgaaagatgctgtgcctatggggttctagagagtgttgagtgtggtacattaactctccattttagccagaagatacctgataagagaaggtgtaaggtttttatcttatatgccagaggcaccaggccagatgtgccgcacagtcatgtaattcaatcatgtttaatatgtcagtcaaaaccaaattcagaattgttttgtgtaccagtcagctgttgtctgcacattttcgtagtgacagtgtggagatctttttaatgaaagcaaactatgtggcctctgcaaagaaaggaagatttttctttttacaactagatattagttttagaggaaggaaatagctgaaaaactaaatttgctttggtgaaatgtcctgtacagaacagtaccttggcattcagcagctgtaattggggaacattaaaacagtaactgacatccagttaaagccacgatcgtcagcaattctccttttttaatttctgatatttaaagttttttttccagtctacaccaggcctctccaaggagacagttcattatttaggagtgaatgtgttcctcttgcaatattatcagtacctgcatgacttggtaaattcattttataaaaatagtgttttttttttttaatttcagttcattgactctataactgcagaaattagataatgttttataaaataaatttgccacataatatgggatgcaataaccaacaaagctgctaagtgccaaactgttattttactatatataaatattaaaatattgtgttgaagtatagggatgtatttaattttactatgctccaacattaatcatgactcttttgtaaattacagttatttcagtattgtaaaataaatgttgactcatttcatgcaggtttgtgttttaa

SEQ ID NO: 905 - DNA, 2504 bp, Homo sapiens
agcgcaaggtgacgggcgtggacgcggctgtggggccgggagcggagggttggggtctggcctcccgcgccggggcgaaggggcagccgcagcgcagaggcccgccccgccctcccctcccgtcacgcccagcctcccggcccttgggctgctcgcggcctttttttcccggctgggctcgggctcagctcgactgggctcggcgggcggcggcggcggcgccggcggctggcggaggagggagggcgagggcgggcgcgggccggcgggcgggcggaagagggaggagaggcgcggggagccaggcctcggggcctcggagcaaccacccgagcagacggagtacacggagcagcggccccggccccgccaacgctgccgccgggatgctccagaccttgtatgattacttctggtgggaacgtctgtggctgcctgtgaacttgacctgggccgatctagaagaccgagatggacgtgtctacgccaaagcctcagatctctatatcacgctgcccctggccttgctcttcctcatcgttcgatacttctttgagctgtacgtggctacaccactggctgccctcttgaacataaaggagaaaactcggctgcgggcacctcccaacgccaccttggaacatttctacctgaccagtggcaagcagcccaagcaggtggaagtagagcttttgtcccggcagagcgggctctctggccgccaggtagagcgttggttccgtcgccgccgcaaccaggaccggcccagtctcctcaagaagttccgagaagccagctggagattcacattttacctgattgccttcattgccggcatggccgtcattgtggataaaccctggttctatgacatgaagaaagtttgggagggatatcccatacagagcactatcccttcccagtattggtactacatgattgaactttccttctactggtccctgctcttcagcattgcctctgatgtcaagcgaaaggatttcaaggaacagatcatccaccatgtggccaccatcattctcatcagcttttcctggtttgccaattacatccgagctgggactctaatcatggctctgcatgactcttccgattacctgctggagtcagccaagatgtttaactacgcgggatggaagaacacctgcaacaacatcttcatcgtcttcgccattgtttttatcatcacccgactggtcatcctgcccttctggatcctgcattgcaccctggtgtacccactggagctctatcctgccttctttggctattacttcttcaattccatgatgggagttctacagctgctgcatatcttctgggcctacctcattttgcgcatggcccacaagttcataactggaaagctggtagaagatgaacgcagtgaccgggaagaaacagagagctcagagggggaggaggctgcagctgggggaggagcaaagagccggcccctagccaatggccaccccatcctcaataacaaccatcgtaagaatgactgaaccattattccagctgcctcccagattaatgcataaagccaaggaactaccccgctccctgcgctatagggtcactttaagctctggggaaaaaggagaaagtgagaggagagttctctgcatcctccctccttgcttgtcacccagttgcctttaaaccaaattctaaccagcctatccccaggtagggggacgttggttatattctgttagagggggacggtcgtattttcctccctacccgccaagtcatcctttctactgcttttgaggccctccctcagctctctgtgggtaggggttacaattcacattccttattctgagaatttggccccagctgtttgcctttgactccctgacctccagagccagggttgtgccttattgtcccatctgtgggcctcattctgccaaagctggaccaaggctaacctttctaagctccctaacttgggccagaaaccaaagctgagcttttaactttctccctctatgacacaaatgaattgagggtaggaggagggtgcacataacccttaccctacctctgccaaaaagtgggggctgtactggggactgctcggatgatctttcttagtgctacttctttcagctgtccctgtagcgacaggtctaagatctgactgcctcctcctttctctggcctcttcccccttccctcttctcttcagctaggctagctggtttggagtagaatggcaactaattctaatttttatttattaaatatttggggttttggttttaaagccagaattacggctagcacctagcatttcagcagagggaccattttagaccaaaatgtactgttaatgggttttttttaaaaattaaaagattaaataaaaaatattaaataaaacatggcaataagtgtcagactattaggaattgagaagggggatcaactaaataaacgaagagagtctttcttatgccttccttgca

SEQ ID NO: 906 - DNA, 1391 bp, Homo sapiens
acacaccctgacccgcatcgccctgggtctctcgagcctgctgcctgctcccccgccccaccagccatggtggtttctggagcgcccccagccctgggtgggggctgtctcggcaccttcacctccctgctgctgctggcgtcgacagccatcctcaatgcggccaggatacctgttcccccagcctgtgggaagccccagcagctgaaccgggttgtgggcggcgaggacagcactgacagcgagtggccctggatcgtgagcatccagaagaatgggacccaccactgcgcaggttctctgctcaccagccgctgggtgatcactgctgcccactgtttcaaggacaacctgaacaaaccatacctgttctctgtgctgctgggggcctggcagctggggaaccctggctctcggtcccagaaggtgggtgttgcctgggtggagccccaccctgtgtattcctggaaggaaggtgcctgtgcagacattgccctggtgcgtctcgagcgctccatacagttctcagagcgggtcctgcccatctgcctacctgatgcctctatccacctccctccaaacacccactgctggatctcaggctgggggagcatccaagatggagttcccttgccccaccctcagaccctgcagaagctgaaggttcctatcatcgactcggaagtctgcagccatctgtactggcggggagcaggacagggacccatcactgaggacatgctgtgtgccggctacttggagggggagcgggatgcttgtctgggcgactccgggggccccctcatgtgccaggtggacggcgcctggctgctggccggcatcatcagctggggcgagggctgtgccgagcgcaacaggcccggggtctacatcagcctctctgcgcaccgctcctgggtggagaagatcgtgcaaggggtgcagctccgcgggcgcgctcaggggggtggggccctcagggcaccgagccagggctctggggccgccgcgcgctcctagggcgcagcgggacgcggggctcggatctgaaaggcggccagatccacatctggatctggatctgcggcggcctcgggcggtttcccccgccgtaaataggctcatctacctctacctctgggggcccggacggctgctgcggaaaggaaaccccctccccgacccgcccgacggcctcaggccccgcctccaaggcatcaggccccgcccaacggcctcatgtccccgcccccacgacttccggccccgccccgggccccagcgcttttgtgtatataaatgttaatgatttttataggtatttgtaaccctgcccacatatcttatttattcctccaatttcaataaattatttattctccagtgaaaaa

SEQ ID NO: 907 - DNA, 3471 bp, Homo sapiens
gcccgggcagagactggctgaggcggggagcagctgcttttggggcgggggtgtcacgtgaggcttctcgctgctgagggaggaggcgaaaagctgcggttaaggagagtccggtttaaccgtcaccgggaagcgcgctcgttcgggatcgccgagggggctgagtactgtcaagatgataagcatggaataaagcttcagaagggtctttaccaatctttctcctaccaacttttacatacatgaaatcaggttaaaatgaactttacagaaatacttcacaagggaataaagtagaggaaaaagggataacatgtaacatggagtcaaggaaaaagagtgtgaagtagttttgctctctctatcttgcaaataggagtccttaaagacaactgggagaaggggtttgagatagtgaattcctaagaagaaaataatggattgcatattagttgttctctaagtggactcaacagtgtgcaagcttgttggaaaagccaaaagaagatggcaactccttatgtcccagttcctatgcccataggaaactctgcttccagttttacaacaaacagaaatcaaagaagttcttcttttggcagtgtctcaacaagctcaaattcttctaagggccagttagaagactcaaatatgggtaattttaaacagacaagtgttcctgatcaaatggataatacttcatctgtctgtagcagtcccctcattaggactaaatttacaggtacagcttcttccattgagtattctactagaccaagagacactgaagaacaaaatccggaaacagtgaattgggaagatagaccatctacacctactatactgggttatgaagtgatggaagaaagagctaaatttactgtatataaaatactagtaaagaaaaccccagaagaaagctgggtagttttcagaagatacactgacttctctaggcttaatgacaaattaaaagagatgtttccaggttttcgactagcacttcctccaaaacgctggtttaaagataattacaatgctgactttttagaagacagacaattaggattacaagcgtttcttcaaaatttagtagctcacaaggacattgctaactgccttgcagtgagagaatttctttgtttggatgatccaccgggtccatttgatagcctagaagaaagcagggcattctgtgaaactttagaagagacaaactaccgcttacagaaagaactacttgaaaaacaaaaggagatggaatcactaaagaaactgctcagtgagaagcaacttcatatagacactttagagaacagaatcagaacattgtctttagaacctgaagaatcactggatgtgtcagaaacagaaggtgaacagatcctaaaggtggagtcctctgcacttgaggttgatcaagatgtcctggatgaagaatctagagctgataataaaccatgcttaagttttagtgaacctgaaaatgctgtatcagagatagaagtagcagaagtggcatatgatgctgaagaagactaatgtatcacaagcagttccctccatttagactattcaaaaatttagaagagtggcaaatactattttaaaagaagaaccaagaactgtaaaacatatagaaaagagcaagaatgcacatgtataaagtttacataaagaagtttttttaagttattgagataggaaatatattcactgctgcttttaattgtattttatccaattacatttaatacactaaaaaaaatcttgttggaattctgttatcaaggcccacattcttaaatactgtgcataaattattatggtgttttgcctatatattgctccaaactactgtgtatatatgtatgtgtgttaaatcaccaattatattaatcaaatggaaattaattgcatgttactatctgggtgatatattcttctttatatctctgacatgacatattttcattaatagtttaaatcagtgaccatcataataaagataaaatttagttgagtttttaatgtttacatgtttacatctctaaataaaatttgcttatttgaaatgttaatgctctttagaaaaatgactttctagtaccaaaggaaaactacttgaaagagctgtaatcatatagctaaagtgataagatagccttgattttaaaagctgattcattaatatcaaaatactttaataagtgtcacagttattaatatgttacatttgtttagtttccacgtaatctttatctctacctagatttagtgagtttgcctctttcagaatactacctccttttgttaaggcatattctttcgaaaatatagattctaaataaataggggcttatacaaaaaagaaaataaaaagccatatatactgcaaagttcctaactggcttgactcctgacattgcatttttatttctatttgtgtgaagatgttgttatactgtattatggctgattttctttttaatatatttagccaagtgatgcactttatgataattaaactcttttgtgccaagtttaattggtggatttttttagtaagtagagttaggagaaagaattatgtagtgcctttactatttcactttctacaaaagtctcctagggtctttgagtcagctttatgaaaaaatgtttgtttatttcagctttgtgtacagtcattaaaagtgccttgtttcatttttataggatgaagttatttattttctattttcactgttttgcatattgctgttaataagcattgtaatcatgctggcattttgcaatcccagtcggtatgctttctaaaaactgagggaaacttactggggaaatagaataacaatctccatttttttctttactatctaaaagtttatcggtatcttgatgtatatatatattaaggtgtggctgtttaaaattctaatgacatatatcaacacattcaatggctgttgttaacctttgaagtaaaaaggagatcactttttaccaaataaccaaaaatttttagtctgtcaaagtgcacaggtatgttctcagaacatttttcacaatgtgtatcagaaatatgtttgctatccttagagacagaaatgaatataataaattgatctgcttatttattaaaattattattctagacttacaaaaggcttaaaaagaacaatcatttaatcagtaccattctgtatcttatataacagatctttgccaaattctagatattatagtgttgcctgtctgttctaaagcgaaccagccactttttcaatctggctttttggaagattgtatttaaagttcttcaaggatgaagaaaaaaatctgttaattaggtaaaccactattatttatatttataatttacttttttttacttttataatgcattttactcccagtattatgttcatttaataaattattttttcactacaaaaaaaaaaaaaaaaa

SEQ ID NO: 908 - DNA, 9336 bp, Homo sapiens
gcggccgcgggagctgcggggagcgcgggggcggcccggagcgtgccggggtccccgcgcctcgctcgccggccgcgctccgaagatggtggcggcgccgtgcgcccggaggctggcccggcgctcgcactcggcgctgctcgcggcgctcacggtgctgctgctgcagacgctggtcgtgtggaatttcagcagcctcgactccggggccggggagcgccgcgggggcgcagcggtcggcggcggggagcagccgcccccggccccggccccgcgccgggagcgccgggacctgcccgccgagccggctgcagcccgaggaggaggaggaggcggcggcggaggaggaggaggacgggggccccaggcgcgggcgcggggaggcggccccggagaaccgcggggacagcagccggccagccggggggcactgcccgcccgggctctggatccacacccaagtccgctcatcaccctggagactcaggatggctacttttctcatcggccgaaagagaaagtgcgaacagacagcaacaacgagaactctgtccccaaagactttgagaatgtcgacaacagcaacttcgcacccaggactcaaaagcagaagcaccagcctgagttggcgaagaagccaccgagtagacagaaggagcttttgaaaaggaagctggaacagcaggagaaaggaaaaggacatacattccctgggaaaggccccggtgaggtgctgcctcccggggacagagccgcagccaacagcagccacgggaaggatgtgtccagaccgcctcatgccaggaaaactgggggcagctcccccgagaccaagtatgaccagccccctaagtgtgacatctcaggcaaggaggccatctctgccctgtcccgtgctaagtccaagcactgccgccaggagattggggagacttactgccgccacaagttagggctgctgatgcctgagaaggtgactcggttctgccccctcgagggtaaagccaacaagaacgtgcagtgggacgaggactccgtggagtacatgccagccaacccggtcagaatcgcctttgtcctggtggtccacggccgtgcctctcggcagttgcagcgcatgttcaaggccatctaccacaaagaccacttctactacatccacgtggacaagcgctctaattacctgcatcggcaagtgctccaggtctccaggcagtacagcaatgtccgcgtcaccccctggagaatggccaccatctggggaggagccagcctcctgtccacctacctgcagagcatgcgggacctcctggagatgaccgactggccctgggacttcttcatcaacctgagtgcggccgactaccccatcaggacaaatgaccagttggtggcgtttctctcccgataccgagatatgaatttcttgaagtcacacggccgggacaatgcaaggttcattcggaagcagggcctggatcggctcttcctggagtgcgacgctcacatgtggcgcctgggagatcggcggatcccagagggcattgccgtggatggcggttcggactggttcctgctgaaccggaggtttgtagaatatgtgaccttctccacagacgatctggtgaccaagatgaaacagttctactcctacaccctgcttcctgctgagtccttcttccatacggtcctggagaacagcccccactgcgacaccatggtggacaacaacctgcgcatcaccaactggaatcgcaagctgggctgcaagtgccagtacaagcacatcgtggactggtgcggctgctcccccaatgacttcaagccgcaggacttccaccgcttccagcagacagcccggcctaccttctttgcccgcaagtttgaagccgtggtgaatcaggaaatcattgggcagctggactattacctgtacgggaactaccctgcaggtaccccgggcctgcgctcctactgggagaatgtctacgatgagcctgacggcatccacagcctgagcgacgtgacactcaccttgtaccactcctttgcccgcctgggtcttcgacgggccgagacgtccctgcacacggatggggagaacagctgccgatactacccaatgggccacccagcatctgtgcacctctacttccttgctgaccgcttccagggctttctgatcaagcatcatgctaccaatctggctgtgagcaaactagagactctggagacctgggtgatgccgaaaaaagtcttcaagatcgcaagcccacccagtgactttgggaggcttcagttttccgaggtcggcactgactgggatgccaaggagaggctattccgcaactttgggggtcttctggggcccatggatgagccggtgggtatgcagaagtgggggaagggacctaatgtgaccgtgaccgtcatttgggtggatcccgtcaatgtcatcgcagccacctacgacatcctcattgagtccactgccgaattcacacactacaagccccctttgaacttgcccctgaggcctggggtctggacagtgaaaattctccaccactgggtgccagttgcagagaccaaattcctcgttgcgcctctgaccttctcgaacaggcagcccatcaaacctgaggaggcactgaagctgcacaatgggcccctccgcaatgcctacatggagcagagcttccagagcctaaaccccgtcctcagcctgcccatcaaccccgcccaggtggaacaggcacggaggaacgcagcctccacgggcacagcgctggagggatggctggactcgttggtgggcgggatgtggactgccatggacatctgtgccacgggccccacagcctgcccggtcatgcagacctgcagccagacggcctggagctccttcagccctgaccccaagtcggagctgggggcagtcaaacctgatggccggctcaggtagcactgggcacgaggagtgggccacagcaggatctcaacgggaaagcagccagaggggttgtggggcctgaaccccggcctcccaccctgggggaggccctctgtgaatgggtctctcctggccatagaatgatggaaagggaaggtcagcaggtcaaagcaggatcagccaacaacctgcctttggcaagctgcgggtgggatggctcagtccctgcactgtgactgtctcacctcttctggttgatcctcaagtcctacaggttccttgtcttccccttccagtgacccacccctgaccccagacgtgtgattttcagacttttctttcgagcagcagaacttcgtttacggagcacagtcataagtggaggttcagggtgctgacgaaatccaagctgctctggttgaagctgacaagtgcgaggttccctcccaaagctcagccctctgggcggtccccttgcccagggtatctcctacggtacctcttcagaacccaagggctctgcaaatgccagtttgacaagcactgcccagaccaaccatgggttcaaactccagccctgccctttggttcatttttctgcttctcttggctgggggactctggtgccagccttgaaagtcatggtcgtgggccctttcccatggaggctgcagccttaggagagctctgagcctctcagcagccctccttgggttgaactattctccttagtaactaggtaagtgggaaagccttttgatgtggcatggccaaggtccagccacaagtgcaactgccacctgtccaggggtctgggcctccttccctcaaggctgccacacaaagtagcagaaataggatgatgtttgtgagcaccagactcaagaccatgaccttctttgatccttgaaaatgggaactttgacagccatgaccatgaaactcacaaggcaacgcgatgaaactcacaaagcaatgcttggagcaaaactcctgagctagacagcacagcagcacccatcccctgccagagcccttccgttctgaggtcagacacacaaaaccttcgtcaattgcacaccggtgctgttgggagtgaccaaaccacatgaaccagacttttcccgtccaggaaatagcatttcagatttggtttttaatttcatgcccttcggccacaggctcaacgggacatgcaacataaaaatgggaaggttatttaaacaacaaaaaacagtatgatttaagtgttgagttaccagaaacccaaaaggtttccttgccacgagccccctggagtgtcatccctgttcaccaggagagctcttcgcaggaggcctcccttgctcctgtaatcccacctcccctgaatgatgggattcccttggaaaaaggtctcacccctggtagccatctgcccttcccatggagagccagtcctgacacttctctccagcgtgggtttgaaggggctgcccttcgctttgtgtgacttgtcctaatcctagccagatgtgttgccccatcccaagcctcgcaaggcagggtgtcctgttggcaatggaggacgtagagaagggacactttagatatttattatttacatgttttagtcgatgactaattagtaggtgctgtttttgcagcttgtcaattatgttaccttactaactgaagctgcctttattcacaaaaggccccttttcccatcttttcccaccccctggtgtctctctctctctcggtttctctttctctgcgtctaccccccatcctcctcatcctcagagtaaagcaggggcatcgaacaccacgcaaagaaagctccaacccgcatcttccactggctttgagtggggtgccttggggaccgttggagccttgtttttttccttatgcagagtgtcagcctcactctccctcggattccaagagtattggaattcctgagcctcccatcctccccctactcaccccccgtcacaggcacaaggaggtgacaggcagaaaacgtggagggtgagtggggaatgtgctagctgcagagagtttgtggggaatgtgctagctgcagagagtttgggccattcctgcttgctccgtggttgccttcccatggcccatctaattatgggcattcatgcgaccttaacagagggaaacaggctcctttgagagagatccatcttaggaggagggtcgtcagatccaggcagcagagtccgggagatagccattctcaacagcgattccagggatctcagggtacttttctcagaaagcccctatgatctcttttacagactctatggtggccacgcgctgggtgccacatcctctttctgcccccggcctctgcctctggccagggtttccctggggctgccgaagccactttgggagcttccctttcaccctccttgctgggccaccagtgctttgtgttcgcagcgttatttgcagtggctttggggactcagcagtggcaagtccctgtgcataatgtgaacctgcagacttcaagatggggcccctcctgcacccactaacatgtctgcctttttttgtttttatcctggaacaagtggagaaatggcagagctggctgactctggggacccttccctttttcccatggcttcatttcttcctcaccacaactaattcggggagctgagaagtcacacagggtattcctctcccttctctgatgttattaattaatagaccagagaataaggttgcagatattacatttgttgtgtttttgtgttttgtttttttttttaaggaaaatcccaaacaaagcccagcatgatttgagaaaagaggatgttttcccagggaaaataatttttttaacctgcctgagaatgatttatttatttgttggaggccattggtcagacagcctggagcttgggctgtggaagatttcaaaagcatagggctgtggtctctggaaacctattacagcctgcagctgtgagctgagccagtgacgaggtccctggaaactcaggaaggctgacaggtgggccttggggtattggtttgtggagaaggaagcattctttaggctgcggcactccttatagtttcccacccaccgagtgacattcaggcagaaattgagctcaggagacagccagccttcccacatcccacttcacttcccggtccacacgtaaagcagtgtgtctccaaggaggcagtgagcaattcccaaggtccccgtgttgtgagaagcgcgctgctttctccctttgcaggggaaaaaaaaggctttcctggtgagatcatgagtccttccggcttcatttctcattgtgggtttaacttctaaaacgcaaatggagtttagagaggatgagcagaaccacaggacctgcccccatctctcactcactgcaattgcttctactctgggcacaagtagggtgtctgaagaccatgtttccctctggttctctagtttgcagataacacagaagacactggctagaaccttaagctttctgccaaaaagatgcagagagcagggcagtagctactggcagtggggtgtgaataaagagtcctttcacaaccaagttcactgaggatttggagcaccagcttcccagcagtatcgaggggtggagaggtgtacattcaggtggaggggtacatctaggggtggagaggtgtacattctagaaacagctgttaacacactccactttaaagacagcaagctagacctgcaggatcaaagccacacactgtggtaggggttacaaatgtttatggggcccagaatactagcatagatgcgtgaaatggttggtgtgaggcaaaagggcatggtgggggcaaggatggggactgtggtcttactggcatgcacgtgacctacccagaatgagcagctgctactcagccccaacctgtcattgtttgtaaaaatgtaagcacagtgtagtggaatcttccaatttggaagggaagccggaaatccagatttaatggaaaaaatctgatttttcaacgtcgggttgtttgtttgtttgtttttgttttttttaacagatagtgggcaaagaaaaattccactgttccacgtgtacactgccagcaacctctgctctctggagaggtggtttaaagtgagattatgcattgccctggtagaagaggaaaaaagccagcatcaggtcagggcaaaaataacagcccatgttgaactcggaatggggacctcttgctaagtcattccactcctcaagagaccattccacagaggggggatggatcattcagctctcctggtcccaagattgtgctgaagggaagaaggaatagaatctggagatctggactgctgccccttagatatgcagaggtccacatctgcctggggctacagcttgtgggactccatcaaaccaggccgaaatggcaaagacagtctaggaggaggaggaggtagggtgtgaaacagccaggctctctccaaatcccaagtgttgacacagccatcttgtcccatccctggaagcctctttggaaaccacatagagctgtgctggctcacgggatgtcctgtttgcttctgcctcagttaccttactttgcccatgggtctaccacaggcgctacctcattgtgtctgctgagaagtttacctgggaggggggaacaaagttgtccaaatctgcttgagctgaatgtatgatctatgcaaattctctctctcctctctctcttcctctctggctctcttagaagtttttttgttttgttttgttttgttttgtgtttaccttgcaaacaagatactgtataggaccctcttaagatggaggagggctttcttgcgccacctgtgtctacccctcacgttgtctttggctctggtcttaccaggcgtatgcagggagaaagtgacctctcttccctctccacttggctgggaatattccaactgcctctgcctacagataccaccagaaagcgggttctgcaccttgtcatccccctccctaacgtcatctactccatccctcatgttcctccaacttgcttctcccatccctccttcaaaaacaaaacaaaacaaaacaaaagccttaggtttctcctttttgaaatgtggccttaacattatttttgggaagctgaccatccatcctttccctcccatctccaccaacatcagagaagacagcatcgtgaagcttctgtggcagcctcctaaggaaggggctgccaatctgtagttggcagatgctataggaattgcttacaaatgtcgtctttaagaaaaatgttcttatatttttcctatgggcaaaatgaaggcttgggtgctcatctaaagctcagccaactcctgaagcactctctcagagcatactgctgctgtaatgggctggcttaattatcggcagagtgcttgaaaaggctttgcagacctcccctgcccccaagactgggtgactttatatgtacttcattcaagggtaaatcaggagacgttctccatttatctcttcgtccttcctgcctggaaagtgatagcactaaatattcccagcagatgggtagtgttctcaaaggaatcaccctttccctaccttcagactctattctttacccttccattgctccagtgctgatggaggccaaagacaaccccagggttttcataggaaattcactggaattgtgcgcaattgtctttgtagtccttttgccttttttttttttaaatattatgttgtcaatagcatttgtttgggtatttgttttagaggcctcactctaagttattaccgtccccttcattgttttcaaagacatgtggtgatatagtttttaaaaataactattttgttatagatcataatatgcataaaactgtacagaaatattttgtaatgtgttgattttaaaaaaaatctgtaaataaagttttaaaaaaagaattcaaatggcacacgctgaaatatgtagatattttgctatttatttaaaggagtattttaagagatattgaactatctgaaattgaccagtaatcaaagttccaatcatctgaatgcttttccttgaggtagaatgtgagtctcagaaatgactgcattacctgcccttttttgcaccttttctgtctttttattttgcagaacaacaacaacaacaaaattgtgccttagctgtatttttttgtctaggggagtttgtttctgtctgacaaagcaacattttttgcagaaaacagtggatgtattaaatactgtatcataccaaaaacactgcaggtgtatatagatgctttctgtcatactgtgttttcagatgcagaattttaaaattaaaaaaacactgcctttatggaa

SEQ ID NO: 909 - DNA, 2213 bp, Homo sapiens
cccaggcgccgggcgctgcctctacagctgtgtgtaggcctgggggcgagggtcttcggaacgtagcgctggctgcggccccgcccgcctacccacccgcccgtccggcagccggctcccgccgcctccgcgctctgtctggggccagccacctggcgggccgctccggtgcgcctgcccgcgcttttcactgacaggcgctgttccccacagccagcgccgcccgccacgtcccagctctcggccaacggagctgcgcggcgggtgacctttccgagcccagcgcgatgacggctccttgctcccagccggcgcagcttcctggacgccgccagctcgggctggtgccgttcccgccgccgccgccgcggacgccgctgctgtggctgctgctgctgctgctggccgccgtggcgccggcgcgcggctgggagagcggagacctggagttgtttgacttagtggaggaggtgcagctcaacttctaccagttcctcggggtgcagcaggatgcatcatctgcagacatcagaaaagcatatcgtaagctttcactaactttacatccagacaagaataaagatgaaaatgcagaaactcagtttagacaattggtggccatttatgaagttttaaaggatgatgaacgaaggcagaggtatgatgatattctgatcaatggacttccagattggcgacagcctgtattctactacaggcgggtgagaaaaatgagcaatgctgagctggcattactcttgttcattattctcacagtgggtcattatgctgtggtttggtcaatctacctggaaaaacaactggatgaactactaagtagaaaaaagagagaaaagaaaaaaaagactggcagcaagagtgtggatgtatcaaaactcggtgcttcagaaaaaaatgaaagattgctgatgaaaccacagtggcatgatttgcttccatgcaaactggggatttggttttgccttacactaaaagcattacctcacctcatccaggatgctgggcagttttatgctaaatataaagaaacaagattgaaggaaaaggaagatgcactgactagaactgaacttgaaacacttcaaaaacagaagaaagttaaaaaaccaaaacctgaatttcctgtatacacacctttagaaactacatatattcagtcttatgatcatggaacttccatagaagaaattgaggaacaaatggatgattggttggaaaacaggaaccgaacacagaaaaaacaggcacctgaatggacagaagaggacctcagccaactgacaagaagtatggttaagttcccaggagggactccaggtcgatgggaaaagattgcccacgaattgggtcgatctgtgacagatgtgacaaccaaagccaagcaactgaaggattcagtgacctgctccccaggaatggttagactctccgaactcaaatcgacagttcagaattccaggcccatcaaaacggccaccaccttgcccgatgacatgatcacccagcgagaggacgcagagggggtggcagcggaggaggagcaggagggagactccggtgagcaggagaccggggccactgatgcccggcctcggaggcggaagccagccaggctgctggaggctacagcgaagccggagccagaggagaagtccagagccaagcggcagaaggactttgacatagcagaacaaaacgagtccagcgacgaggagagcctgagaaaagagagagctcggtctgcagaggagccgtggactcaaaatcaacagaaacttctggaactggcgttgcagcagtacccaaggggatcctctgaccgctgggacaaaatagccagatgtgtcccgtccaagagcaaggaagactgtatcgctaggtacaagttgctggttgaactggtccaaaagaaaaaacaagctaaaagctgaatattctgggagatgatgttcaccttcattttccaaaatgaatatcttaaaaatcttatgcagaaatttgcattttgtacctcaatatttctacgtcatgtgccttagtaaaaaaaaataataaataaataaaagatgaaaaaaaaaaaaaaaaaaaaaaaaaaaaaaaaaaaaaaaaaaaaaaaaaaaaaaaaaaaaaaaaaaaaaaaaaaaaaaaaaaaaaaaaaaaaaaaaaaaaaaaaaaaaaaaaaaaaaaaaaaa

SEQ ID NO: 910 - DNA, 12998 bp, Homo sapiens
gacgcggggggaggggggtgcggcgagcggccccgctctctccccaccgctccgctcgcaccccagtgtaatgagggtcaccccctccccccagctggcccgggagggggcgcggggcacggttgatgccggcccaggatggatcagacctgtgaactacccagaagaaattgtctgctgcccttttccaatccagtgaatttagatgcccctgaagacaaggacagccctttcggtaatggtcaatccaatttttctgagccacttaatgggtgtactatgcagttatcgactgtcagtggaacatcccaaaatgcttatggacaagattctccatcttgttacattccactgcggagactacaggatttggcctccatgatcaatgtagagtatttaaatgggtctgctgatggatcagaatcctttcaagaccctgaaaaaagtgattcaagagctcagacgccaattgtttgcacttccttgagtcctggtggtcctacagcacttgctatgaaacaggaaccctcttgtaataactcccctgaactccaggtaaaagtaacaaagactatcaagaatggctttctgcactttgagaattttacttgtgtggacgatgcagatgtagattctgaaatggacccagaacagccagtcacagaggatgagagtatagaggagatctttgaggaaactcagaccaatgccacctgcaattatgagactaaatcagagaatggtgtaaaagtggccatgggaagtgaacaagacagcacaccagagagtagacacggtgcagtcaaatcgccattcttgccattagctcctcagactgaaacacagaaaaataagcaaagaaatgaagtggacggcagcaatgaaaaagcagcccttctcccagcccccttttcactaggagacacaaacattacaatagaagagcaattaaactcaataaatttatcttttcaggatgatccagattccagtaccagtacattaggaaacatgctagaattacctggaacttcatcatcatctacttcacaggaattgccattttgtcaacctaagaaaaagtctacgccactgaagtatgaagttggagatctcatctgggcaaaattcaagagacgcccatggtggccctgcaggatttgttctgatccgttgattaacacacattcaaaaatgaaagtttccaaccggaggccctatcggcagtactacgtggaggcttttggagatccttctgagagagcctgggtggctggaaaagcaatcgtcatgtttgaaggcagacatcaattcgaagagctacctgtccttaggagaagagggaaacagaaagaaaaaggatataggcataaggttcctcagaaaattttgagtaaatgggaagccagtgttggacttgcagaacagtatgatgttcccaaggggtcaaagaaccgaaaatgtattcctggttcaatcaagttggacagtgaagaagatatgccatttgaagactgcacaaatgatcctgagtcagaacatgacctgttgcttaatggctgtttgaaatcactggcttttgattctgaacattctgcagatgagaaggaaaagccttgcgctaaatctcgagccagaaagagctctgataatccaaaaaggactagtgtgaaaaagggccacatacaatttgaagcacataaagatgaacggaggggaaagattccagagaaccttggcctaaactttatctctggggatatatctgatacgcaggcctctaatgaactttccaggatagcaaatagcctcacagggtccaacactgccccaggaagttttctgttttcttcctgtggaaaaaacactgcaaagaaagaatttgagacttcaaatggtgactctttattgggcttgcctgagggtgctttgatctcaaagtgttctcgagagaagaataaaccccaacgaagcctggtgtgtggttcaaaagtgaagctctgctatattggagcaggtgatgaggaaaagcgaagtgattccattagtatctgtaccacttctgatgatggaagcagtgacctggatcccatagaacacagctcagagtctgataacagtgtccttgaaattccagatgctttcgatagaacagagaacatgttatctatgcagaaaaatgaaaagataaagtattctaggtttgctgccacaaacactagggtaaaagcaaaacagaagcctctcattagtaactcacatacagaccacttaatgggttgtactaagagtgcagagcctggaaccgagacgtctcaggttaatctctctgatctgaaggcatctactcttgttcacaaaccccagtcagattttacaaatgatgctctctctccaaaattcaacctgtcatcaagcatatccagtgagaactcgttaataaagggtggggcagcaaatcaagctctattacattcgaaaagcaaacagcccaagttccgaagtataaagtgcaaacacaaagaaaatccagttatggcagaacccccagttataaatgaggagtgcagtttgaaatgctgctcttctgataccaaaggctctcctttggccagcatttctaaaagtgggaaagtggatggtctaaaactactgaacaatatgcatgagaaaaccagggattcaagtgacatagaaacagcagtggtgaaacatgttttatccgagttgaaggaactctcttacagatccttaggtgaggatgtcagtgactctggaacatcaaagccatcaaaaccattacttttctcttctgcttctagtcagaatcacatacctattgaaccagactacaaattcagtacattgctaatgatgttgaaagatatgcatgatagtaagacgaaggagcagcggttgatgactgctcaaaacctggtctcttaccggagtcctggtcgtggggactgttctactaatagtcctgtaggagtctctaaggttttggtttcaggaggctccacacacaattcagagaaaaagggagatggcactcagaactccgccaatcctagccctagtgggggtgactctgcattatctggcgagttgtctgcttccctacctggcttactgtccgacaagagagacctccctgcttctggtaaaagtcgttcagactgtgttactaggcgcaactgtggacgatcaaagccttcatccaaattgcgagatgctttttcagcccaaatggtaaagaacacagtgaaccgtaaagccttaaagaccgagcgcaaaagaaaactgaatcagcttccaagtgtgactcttgatgctgtactgcagggagaccgagaacgtggaggttcattgagaggtggggcagaagatcctagtaaagaggatccccttcagataatgggccacttaacaagtgaagatggtgaccatttttctgatgtgcatttcgatagcaaggttaagcaatctgatcctggtaaaatttctgaaaaaggactctcttttgaaaacggaaaaggcccagagctggactctgtaatgaacagtgagaatgatgaactcaatggtgtaaatcaagtggtgcctaaaaagcggtggcagcgtttaaaccaaaggcgcactaaacctcgtaagcgcatgaacagatttaaagagaaagaaaactctgagtgtgcctttagggtcttacttcctagtgaccctgtgcaggaggggcgggatgagtttccagagcatagaactccttcagcaagcatacttgaggaaccactgacagagcaaaatcatgctgactgcttagattcagctgggccacggttaaatgtttgtgataaatccagtgccagcattggtgacatggaaaaggagccaggaattcccagtttgacaccacaggctgagctccctgaaccagctgtgcggtcagagaagaaacgccttaggaagccaagcaagtggcttttggaatatacagaagaatatgatcagatatttgctcctaagaaaaaacaaaagaaggtacaggagcaggtgcacaaggtaagttcccgctgtgaagaggaaagccttctagcccgaggtcgatctagtgctcagaacaagcaggtggacgagaattctttgatttcaaccaaagaagagcctccagttcttgaaagggaggctccgtttttggagggccccttggctcagtcagaacttggaggtggacatgctgagttgccgcagctgaccttgtctgtgcctgtggctccggaagtctctccacggcctgcccttgagtctgaggaattgctagttaaaacgccaggaaattatgaaagtaaacgtcaaagaaaaccaactaagaaacttcttgaatccaatgatttagaccctggatttatgcccaagaagggggaccttggcctttctaaaaagtgctatgaagctggtcacctggagaatggcataactgaatcttgtgccacatcttattcaaaagattttggtggaggcactaccaagatatttgacaagccaaggaagcgaaaacgacagaggcatgctgcagccaagatgcagtgtaaaaaagtgaaaaatgatgactcgtcaaaagagattccaggctcagagggagaactaatgcctcacaggacggccacaagccccaaggagactgttgaggaaggtgtagaacacgatcccgggatgcctgcctctaaaaaaatgcagggtgaacgcggtggaggagctgcactcaaggagaatgtctgtcagaattgtgaaaaattgggtgagctgctgttatgtgaggctcagtgctgtggggctttccacctggagtgccttggattgactgagatgccaagaggaaaatttatctgcaatgaatgtcgcacaggaatccatacctgttttgtatgtaagcagagtggggaagatgttaaaaggtgccttctacccttgtgtggaaagttttaccatgaagagtgtgtccagaagtacccacccactgttatgcagaacaagggcttccggtgctccctccacatctgtataacctgtcatgctgctaatccagccaatgtttctgcatctaaaggtcggttgatgcgctgtgtccgctgtcctgtggcataccacgccaatgacttttgcctggctgctgggtcaaagatccttgcatctaatagtatcatctgccctaatcactttacccctaggcggggctgccgaaatcatgagcatgttaatgttagctggtgctttgtgtgctcagaaggaggcagccttctgtgctgtgattcttgccctgctgcttttcatcgtgaatgcctgaacattgatatccctgaaggaaactggtattgcaatgactgtaaagcaggcaaaaagccacactacagggagattgtctgggtaaaagttggacgatacaggtggtggccagctgagatctgccatcctcgagctgttccttccaacattgataagatgagacatgatgtgggagagttcccagtcctcttttttggatctaatgactatttgtggactcaccaggcccgagtcttcccttacatggagggtgacgtgagcagcaaggataagatgggcaaaggagtggatgggacatataaaaaagctcttcaggaagctgcagcaaggtttgaggaattaaaggcccaaaaagagctaagacagctgcaggaagaccgaaagaatgacaagaagccaccaccttataaacatataaaggtaaaccgtcctattggcagggtacagatcttcactgcagacttatctgaaataccccgttgcaactgtaaagctactgatgagaacccctgtgggatagactctgaatgcatcaaccgcatgctgctctatgagtgccaccccacagtgtgtcctgccggagggcgctgtcaaaaccagtgcttttccaagcgccaatatccagaggttgaaattttccgcacattacagcggggttggggtctacggacaaaaacagatattaaaaagggtgaatttgtgaatgagtatgtgggtgagcttatagatgaagaagaatgcagagctcgaattcgctatgctcaagaacatgatatcactaatttctatatgctcaccctagacaaagaccgaatcattgatgctggtcccaaaggaaactatgctcggttcatgaatcattgctgccagcccaactgtgaaacacagaagtggtctgtgaatggagatacccgtgtaggcctttttgcactaagtgacattaaagcaggcactgaacttaccttcaactacaacctagaatgtcttgggaatggaaagactgtttgcaaatgtggagccccgaactgcagtggcttcttgggtgtaaggccaaagaatcaacccattgccacggaagaaaagtcaaagaaattcaagaagaagcaacagggaaagcgcaggacccagggtgaaatcacaaaggagcgagaagatgagtgttttagttgtggggatgctggccagctcgtctcctgcaagaaaccaggctgcccaaaagtttaccacgcagactgtctcaatctgaccaagcgaccagcagggaaatgggaatgtccgtggcatcagtgtgacatctgcgggaaggaagcagcctccttctgtgagatgtgccccagctccttttgtaagcagcatcgagaagggatgcttttcatttccaaactggatgggcgtctgtcttgtactgagcatgacccctgtgggcccaatcctctggaacctggggagatccgtgagtatgtgcctcccccagtaccgctgcctccagggccaagcactcacctggcagagcaatcaacaggaatggctgctcaggcacccaaaatgtcagataaacctcctgctgacaccaaccagatgctgtcgctctccaaaaaagctctggcagggacttgtcagaggccattgctacctgaaagacctcttgagagaactgactccaggccccagcctttagataaggtcagagacctcgctgggtcagggaccaaatcccaatccttggtttccagccagaggccactggacaggccaccagcagtggcaggaccaagaccccagctaagcgacaaaccctctccagtgaccagcccaagctcctcaccctcagtcaggtcccaaccactggaaagacctctggggacggctgacccaaggctggataaatccataggtgctgccagcccaaggccccagtcactggagaaaacctcagttcccactggcctgagacttccgccgccagacagactgctcattactagcagtcccaaaccccagacttcagacaggcctactgacaaaccccatgcctctttgtcccagagactcccacctcctgagaaagtactatcagctgtggtccagacccttgtagctaaagaaaaagcactgaggcctgtggaccagaatactcagtcaaaaaatagagctgctttggtgatggatctcatagacctaactcctcgccagaaggagcgggcagcttcacctcatcaggtcacaccacaggctgatgagaagatgccagtgttggagtcaagttcatggcctgccagcaaaggtctggggcatatgccgagagctgttgagaaaggctgtgtgtcagatcctcttcagacatctgggaaagcagcagccccttcagaggacccctggcaagctgttaaatcactcacccaggccagacttctttctcagcctcctgccaaggcctttttatatgagccaacaactcaggcctcaggaagagcttctgcaggggctgagcagaccccagggcctcttagccaatccccgggcctggtgaagcaggcgaagcagatggtcggaggccagcaactacctgcacttgccgccaagagtgggcaatcttttaggtctctcgggaaggccccagcctccctccccactgaagaaaagaagttggtaaccacagagcaaagtccctgggccctgggaaaagcctcatcacgggcagggctctggcccatagtggctggacagacactggcacagtcttgctggtctgctgggagcacacagacattggcacagacttgctggtctcttggaagagggcaagaccccaaaccagagcaaaatacacttccagctcttaaccaggctccttccagtcacaagtgtgcagaatcagaacagaagtagtaccaatcaatgtcacatgaacaaacaagctgcccccagggtaccatttggggaggggaaatcttttctttctttcccccttaaaaaaaaacacatctgccccgaacactttcccactgttattctttcctcatatcccaacactcagaactcttgtgacattagccagtgggggcttatggttgtgtgaaccatgtatgaaaatccagtgggccccaaccaaggagacagacagacttgggtctctttcccccaacttttccacatggtcatcgtgaaataaaaagtccactctggagtcaagtatggaattcaattccgctggtcaggttggaaggtataggggctctcaaagcgatttccccaaccagacagagccccattgagggcacctaggaacccttgggaggaaatggtgttctttcaaatcagtggcgatttcctgagcattcacgtgttctaggccgggtgctagtcactgatgagagatacaggcctcatccctgtgagcctggattccaaggctttcaggaacctttgaccaggaagtaacaggaagttctgaggggccctggggctttagactcattttgaaatgtcctttgtggcaccagaagtggttgtgttgaggaagtgtctcttggctgcggtgtgcatgggtgcgtgtgcatgcgcgcacactcacagaggtctcctctatagatgcaagggtgctgcattgaggccagcaaggctgttggctgtggggtcgccgctgctgcttttgtctgggctgtgcagagtctcaagatcagtccttggaggagcaggtggtcaggggcagtcgggctctgtgcgaatgtagatttccagcagtggaagaaggcatttggcaagcttctctttctttgcttttgtttctacctatttttctctttgtacatgaatccaccccatccctatttccctaaaacactcaggtgctttcagatttcagagcctcgggcagtggacatagggaatctctggcaagctctgagctagacacaccagcttcaggaagagtaccagatcctgatgggaaatttcttttccccattccttttccctcctgagtggagggagtcctcttcttcgcctccctgagaattgctgtgctctgtattgagagcacctgcctgctgacttagctcaaaggcaagccagaacccttccctgaagactggcaagaggtggtgtttagagcaacgtccaggctaagagatgactcctattaactgctgattatctgttactgctgccctgagctggggcccaagggctgggaaatctgttggtgctaccctgccctaccattcacccagctcacagactgccaacaggaagtgctgtttggctagtttcctcccacttgtctacccctcctttgtccttagaccaacatgtttacctctctgctttgccaacttagccagcaggccatccccggccctaacgtctcctggccattatctcttagttatggctttcacgctctcaataggattctgtatttggtcccaatttcctcaagttcttattgaggttactcccatcaattccacggagggaacagtagttattatagaagcatttgcgctttatctaaagattaaaaatagaatctgcttttatttcccaaagtctgtctctgaggttgagacacttgaactcaggcagagggacgaggctgggcagggctgtcctgagtttaggggcctatccctgcatttcactgagacctcggaatctcctctgtgaattccacctgcctagttctcccctttcatcctctctctcttcccacatcatcaaagaggaaaagctctttgttcaaaaggaagagaaaacgtaaagcatcttattttcttttaaaagaattttaaaccatgaaaaagatatttttaaagaaattcaccgagaacattaaagttcattatattaagtatttatcatgtgtgagaataataaatatataactgcagctagtaggtccctttccctaatcttttaggtcatatgagtagggtttgcttggtgccagtcctgtgcccttttctctccagtcatctgtagttgtgatcagaaaaaggtatctgcactgcactgtcagagtctcctttcactatgttgtgtgttaaattaccgtagctctttgtttcatgaaataaactgtgaatttggggggggcggggggagggcgtgcaggccatgtaaaaattttccgtggagaagtttgattctaaagtagcttctctaaagtaggctttggtaggtaatcaacttgacagcagtctagatgtctcacaggacaggagggagtgagggaaaggggccatgattggctgctttgtggttttattttggttctttccattctccgccattcattggaggcttcgttccagacctgcctgggaaaacagcttctgagccattttggggagcagttcttcatctgaatggatggacatctgggcttccttcaagggccattgaatgggaactagaaaaccactggaaactagaaatttgagctattgggcccaccagtagcagcatgtgatactagatggttaaaatcatgaaagcagtcactatccaattagaagcagagtcacaacaactgttgggaaatgtgactcttggaggaaggtggggagggagtggccttgccagccctgtgggacgtcccctgaagtttgtaataagaccccttttccaaagggatgtgaattggagtgaaaaggaaatctttcatcttagaaaacttctggtccttaacgcagggtggtatttgggtatgtgcttggaaattgagatctcaagagtgtttgccttggagccagctccccaggaggccttttccagggacaaggcaaaagttgaaattctccatgggtagctagaaagccaatacatctagccctgctaagtcagaaaaagattatgaaaaatgttgaaatttacattcaaagcctcatttgcttatcttgctggagccaacccagtctaatagcaaaatagctgtcattgatacagaaacatcctcatttttaaatgtctgctttaccctgttactgagtttgagatgacttaaatcactgtgttgaccctcttctgaaccaaatctttagcattgatgaaaatagttattttattctttacatccttcaccccacactatggtcagggcatgaaacaccctgttgatcccttcccaggctcggcactgtctgctcactggagccggactcccaggttgtaattctaatgttgcctcatgagaacagaatggcagaaagtttagtcctgacagattcccccatagggagtaatgaggacagcatgaaacttggataggttttacccttagtccctataaggtggattttactaaggttttttaaatgatactgtcatcctcttggggtttatcagccaggttagaggagcccagtgtcctaacctctctcagatcatggcagagaaggagctgcctccagcccctttcttgctgagtttcatttgagcagttccatgtgtagacattccaagtcactgcttggtagttgctgtgggagcctgtcattggctatggccagttagttctcagctgagcttcctagggccagtgcaacagggccagaggctgctatagtgtaaattgaaataagaatagatcattgttttgtacacacacacaataaaatgtaatgatggtgctaatttcacggtataaataagcactgccaagggttgagggactggcagctcaagaaacccgggttcctgtttgggaggagattttatgtagaaaagtttgaggctttgttaaaagtggggagaaggaagatcctcagtgaagcctgcacccaaccctggagtggcccagtgcaatccagaggtggaagagatcctatatccaggtgaaggtggccattgagtttctcagggctggggccaccttgtccatagcctccgtccacgctgcctggagcaggttgttagagagctctggttgttgggtcttcctcagctcccttctgcccctctctacctcttccactcatggaagcccctctactgcttatgaagattaagggtagtattttctaaggaagtggaaagaattaaactagaaatccacaacctcggaagaagtgtttcgagtttaacatgcgctgtttctgcttatgtggttccttctctagagctgctttcccatggctttcaaaacatcaggttattgtggggcttcaggtgtaaggtcctggaagttcagcaaagtttcgtggacaagacatgggcacagagagtagaagcagaaataaatggttctatgttttcaacttccagggttggggcaggccagagcaaggcggtctcatcgaggtgggtgctacctgtgtgtgtgtagatgagtgtgctgaaggtggggagggcagcacacagcagctcatggcagagccgcctcctaggtcttggcaaagaggcaagctgacgatagacatctacctatattgttaagaaaggggtcggggggatcagccaaggtccatcattgcttttttgccgcgcccccccccccccgcccccatagattgtcagctgtaagtgaaactcctagtgaaaaagaggggagccctgtgttaggagtccccataaacatgtactgtaattctttgtatatagaaaaaaaatttactgtaaagtaaagtttaactttactcataaaaaaaaaaaaaaaa

SEQ ID NO: 911 - DNA, 5803 bp, Homo sapiens
acccaaggccggccctttcctgtggagtcatctcaccgccgtgcgcacccactcgtaactcgcacccgggtcctggctgcaccgcatcccctcctgcaccccctggatggcccttcagccaacgggggcctgggcgatggtcgaccacggagctgcgcaaggaaaagtcccgggatgcggcccgcagccggcgcagccaggagaccgaggtgctgtaccagctggctcacacgctgcccttcgcccgcggcgtcagcgcccacctggacaaggcctctatcatgcgcctcaccatcagctacctgcgcatgcaccgcctctgcgccgcagctggagctcattggacacagcatctttgatttcatccacccctgtgaccaagaggagcttcaggacgccctgaccccccagcagaccctgtccaggaggaaggtggaggcccccacggagcggtgcttctccttgcgcatgaagagtacactcaccagccgcgggcgcaccctcaacctcaaggcggccacctggaaggtgctgaactgctctggacatatgagggcctacaagccacctgcgcagacttctccagctgggagccctgactcagagcccccgctgcagtgcctggtgctcatctgcgaagccatcccccacccaggcagcctggagcccccactgggccgaggggccttcctcagccgccacagcctggacatgaagttcacctactgtgacgacaggattgcagaagtggctggctatagtcccgatgacctgatcggctgttccgcctacgagtacatccacgcgctggactccgatgcggtcagcaagagcatccacaccttgctgagcaagggccaggcagtaacagggcagtatcgcttcctggcccggagtggtggctacctgtggacccagacccaggccacagtggtgtcagggggacggggcccccagtcggagagtatcgtctgtgtccattttttaatcagccaggtggaagagaccggagtggtgctgtccctggagcaaacggagcaacactctcgcagacccattcagcggggcgccccctctcagaaggacacccctaaccctggggacagccttgacacccctggcccccggatccttgccttcctgcacccgccttccctgagcgaggctgccctggccgctgacccccgccgtttctgcagccctgacctccgtcgcctcctgggacccatcctggatggggcttcagtagcagccactcccagcaccccgctggccacacggcacccccaaagtcctctttcggctgatctcccagatgaactacctgtgggcaccgagaatgtgcacagactcttcacctccgggaaagacactgaggcagtggagacagatttagatatagctcaggatgctgatgctctggatttggagatgctggccccctacatctccatggatgatgacttccagctcaacgccagcgagcagctacccagggcctaccacagacctctgggggctgtcccccggccccgtgctcggagcttccatggcctgtcacctccagcccttgagccctccctgctaccccgctgggggagtgacccccggctgagctgctccagcccttccagaggggacccctcagcatcctctcccatggctggggctcggaagaggaccctggcccagagctcagaggacgaggacgagggagtggagctgctgggagtgagacctcccaaaaggtcccccagcccagaacacgaaaactttctgctctttcctctcagcctgagtttccttctgacaggaggaccagccccagggagcctgcaggaccccagcaccccactcctgaacctgaatgagcccctgggcctgggcccctcactgctctctccgtactcagacgaggacactacccagcccgggggccccttccagccaagggcaggctcagcccaggctgactgagccggctcctctccccatctgccttctcctcccccagaaaggacctcaaccacactccacgccggcagccaacgcacaggatgggggcgccaggagaggggcccctctctcctctatgtaccccctgcccacctcgggcctacctcagccctcacccctctgcctgctcccaatctgggggctctctggggtggtctcagctcagtgacctctgggaggtggtccctggccccctcctccttctctcaggatttctcttggggttctcaatacttggttacctcattatccctttctctgcctctcttggctttattttggggaatcaggggtgaggagggttgggggggtcatatctgtgtttccaggttctggggagaacaatgatccacgggtcaacgtgatcacatttccttctatccttcttgtattattatttttatttttgtcaatttcatgatatggtttttaatcatgatgaattgcctggggtctgtaagaatgtgggactctgatcttccccctcttcaggtgtcagtgcggagaggctctgggccagacctcacccccagtgacttccgattgaggccaaagaccccaagctgcccgccagctctgactgccccttgcgctctgggcttcctgccgcccccagctttgcctggacactgacttcattcatggtcctcctacttcaggggcagcctcccagttcctctgcttccaaactatgcaacctccaacctgctccagttccagactgtataacctctgacctgcactggttctagaccacacaacctccaatgtggtctgctttagatcaccttcttcttcttccttcttcctcttcctcttcctcctgctcctcttcctcttcttcttcttttttttttttgacagagtcttgctctgtcacccaggctggagtgcagtggcgcgatttcagcttactgcagcctccgcgccctgggttcaagtgattctcctgcctcaacttcccaaatagccgggactacgggcatgtgccacattgcccggctaatttttgtatttttagtagagatggggtttcaccacgttgtccagtctggtctcgaactcctgacctcaagtgctccacctgcctcagccttccaaagtgctgggattacaggcgtgagccactgcacccggctagaactcactttctccaaatccctctgcttcgaatttcaccgtcttcagctctttctagttctgggcctcaccagcctctcattctgcctgttttcaaaccttacgatccccaaaaattgtctggttctgggcctctaactccctctggctctatagtctatgactaccagattcttttggttctagaattcactaacttcctctggttctagacctcttcctataaattaatccctcttgttttagatctcacaccctccaacgccctccggttccagatcttatattcagtgatttcctctggttctggaccccacaactccaagcttcctattggttccagttctcctgatcggtaatacatttggttccaaatccagacctcttaatctctctctttttttttttttttttttgagacagagtcccactctgtcacccaggctggagtacagtggctcaatctcggctcactgcagcctccacctcctgggttcaagcaattcttgggcctcagcctcccaaatagctgggattacaggcatgtgccaccacgcccagctaagttttatatttttagtagagacagtgtttcaccatgttggccaggctggtcttgaactcccgacctcaactgatccacccgcctcagcctcccaaagtgctgaaattacaggagtgagcctggccagacttcttaatttctaaatcacttttgttttagaccttatgaggctcagcttattcttctgcagttctctataaccaagactcattttctctcatcaaaaacaagtacagagagtttgatgtgtttatctcttttttcttcctcttcttttttttttttttcttttttgagatggagtctctctctgttgcccaggctggagtataatggtgccatctaggctcactgcaacctccgcctcctgattcaagtgattctcctgcctcagcctcctaaattggtgggattacaggagcccaccaccacatccggctacctttgtgtattttttagtagagacggggttttgccaagttggaggggctggtcttgaactcttgacctcagatgatccacccgcctcagcctcccaaagtgctgggattacaggcataagccaccgtgcccgaccctgtccttatcttataataaccagttcttctagaaccagacgatgctctagttctcctagattctgaacctcatgacctgtaccactcactagttccagactacacaacttctagaaggtgccacctccagggtcctgattcaagatctggtgatctgctgtttctctggttctagaactgacttacaagtgccttctgattctagacctcattccgtaagttcccttggctctagacttcatcatttccagctcctcctcactcaagatctgactccaaattaccctgggtctagaattcagccttcaaatatcttctgattttagactttgccttatacatttctctggttttagatcttaccaccctcaactccttctgattctagatcttatggttcccaaatctctctggttctagaactcagattttaggcttttgtttttccttttttttgttaaaaaaaaaaaaatagagacggggtttcaccatgttgcccaggctggtcgcgaactactgagctcaagcaattctccctccttggcctcaccaaagtgctgggactacaggcatgagccactgagcccagccaggctttttctaattctatgctttattctataaattcctctgcttctaagcctcacagcttccaactgcctttgatttcagatccaaattcctctgattctataattcagcctccaaatgcttctgattctggaatctagacttttccctaaagattcctctggttctgaatcttataacctcaactccctaattccagaccccagcctcctaaatctattctgggcttcccaccccactgaacttacccaattccttctttcagtcttaagttttcccattctaaacccctaccctctaggctgtgctgctcctggacttcatgcctctccattctcattgcctacaatctctgtgccccagaaccccctccacttcccaccccagccctccagacatgcacttaccttgactttaccccacatgtttggggcacctggggctccctcaccccttgggtggtttgcaatctgaagacttctccagccacacaggcacatgcacaggcacggtgctgtctgcatattgccaggtggggagagaagccaggacccctcagctgtctgccaccatctatgtgcctcccttaccccccagctttctttctacagatggtgctactcttggtctcccacaggaaaaggcctccccccttcttagccccatttaccccgtttgtggaaggcactgctcgctctgttttgtcagagagtggcctatccagattggtgctatgggggggtctgacccctccctcctccctctggaggtgatgtgggccctcaatggagggaattgtgctgggctagggaaaggggagggactagactggccacactggctctgaaactcaccaatctctatacaccataaagacctcaccttggtaggcaccagaaaaaaaaaaaaaaaa

SEQ ID NO: 912 - DNA, 8995 bp, Homo sapiens
gcagtggcgacgccgagccggcgccctcagtctcctcctccaccgcctcccggttccgcagtcacttcctgcagctgtttccctgtgggtcgggttggactgacttttgacagtcagccttcggctgcggagggggctcggcggcggccggcggagaaagttgctccgagaagaggctgggtcgagctgggccgagccgggcgcgcagggcgggcgtcgcgggcgtcccgggcggacgcggcgcggagactgccggcgcgtcccgggggttccgatttgaagaccttgcttctcatcacccactggattatgccccaggcttccctacccaatgatcctcttgcaacacgccgtgcttcctccacctaagcagccctcaccctcgcctcctatgtcagtggccaccaggtctacaggaaccttgcagcttccaccacagaagccttttgggcaggaggcttccttgcctcttgcaggggaagaagagttatcgaagggaggggagcaagactgtgccctggaggagctatgtaagcccctgtactgcaaactctgcaatgtcaccttgaactctgcacagcaagcccaggctcattatcagggtaaaaatcatggtaagaaactccgaaattactatgcagcaaatagctgtcctcctcctgctagaatgagcaatgtggtcgagcctgcagctactccagttgttccagtccctccgcagatgggctcctttaagccaggaggccgagtgatcctggccacggagaatgattactgtaagctctgtgatgcctccttcagttccccagctgtggctcaggctcactatcaagggaagaatcatgccaagaggctgcggctggcggaagctcagagtaactcattctcggaatcctcagagctgggtcaacggcgggccaggaaagaagggaatgagtttaagatgatgcctaacaggagaaatatgtatacagtacagaataattcagcaggtccttacttcaatccccgctctcggcagagaattccacgtgatctggccatgtgtgttactccaagtggccagttttactgctcaatgtgtaatgttggagctggcgaagagatggaattccggcagcatttagagagcaagcaacataagagcaaggtgtctgaacagcggtacaggaatgagatggagaatctgggatatgtatagtgattatcatattaagatagagcagcttttcctgcctgttgtttgccttttgtcaacttgccctgctttgtggtctttttgatatgagtacattcctctgcttaatgttaatacatgtaacccacagtggtaccatgagatgtcaaaacctgggggcccgggggcggggcggggggaggtgggtgtgaagaacgtgcttcttaggtcataacgcttttgcagggtcaatggtgttgagccgctcatagcatgtgacctacctaccccatcagaaataactttttatcttgctcaagttctggtcaactagtagcctgacggcttagaactttgactatttaaaagtttcattttcttttgcaattttagttttatgtactgttaaagaattgtactgaattctttttagatcacagtaaaaataggttggcagagatttcagtttcccagggcttaaccagaaccgccacctcaatgcattgtcagtagaatacattattagaaactgttaaggtctttcccgggacatttttttctgccattttcttttgcaattgtagttttatgtactgttaaagaattgtattgaattctttttagatcaaagtaaaaataggtcagcagagatttcagtttcccagggcttaaccagaaccgccacctcaatgcattgtcagtaggatacattattagaaactgttagggtctttcccaggacatttttttttctgtatcatgtctccccatcattgaagcgcaaattttcttgaattcaaatactcccaatgagcttgtatacttccaaacagctaaacttgatttccagttgtggatttcacacatataattgccgccttcttccctcctcttttttcccccctagttgaatcagcttgtctaacaagcccattttcatgccccagctgtgctgtgggttttccaagcctcatatttgaatattcaatgagtttaagatggatatgatttcaaaaaatagggccgggcgcggtggctcacgcctgtaatcccagcactttgggaggccgaagcaggcggatcacgaggtcaggaggtcgagatcatcctggctaacacagtgaaaccccatctctactaaaaatacaaaacattagccgggcgtggtggtgggtgcctgtagtcccagctactctggaggctgaggcaggagaatggcgtgaacccgggaggcggagcttgcagtgagccgagatcgcgccactgcactccagcctgggtgacagagcgagactccgtctcaaaaaaaaaaaaaaaaaaaaaaaaaaaatatatatatatatagatatattttccagcagtttttaggaaacaaaggtgtgtttgattttccaatttagagttacttcattgatagtaacatgcgcttatatcatgatctaaaccataagttcagattgcttgatattttgttttgccagacttttttgataatctgattcttacggtttacttacattttcctctgtcttgccagtctggtggccatcctgaaaaatatcaccacctgctgttttatacacagaggaattttttaaaaagcaaataaagtttcactatcttcgtttccagtagaaatatacacgaactatggttttattctttgtaattcggctttcttgaagatactaacaagtatatgatagatcactttggcatctgataattatatcagtattattatttttgtttttttgcgtttaaaataagaagttgtatgaacccaggaggtggaggttgcagtcagccaagaatcgtgccactgcactccagtctgggcgacagagcaatactccgtctccaaaaaaaaaaaaaaagaagctataatatatatctagattaactaatggagtgctctgtgaatattcattaactacattttatctatttactatattttatatgggtaagaccagtggtcatccgtatttcttttgaaagcccacttgatcaggaagtttatattttaagcagtatgtttgcacaatggtcagttcacatttgattgcttgtattactaattagaggtaaaacttctattttttcttgataattctgtaggcaaaaaaaattggggaaggcaaattacaatcattcttcttctgtaatactttgggacaatttttaaacaactcagacccatgtttaaaaacgagttttgtgtgattaacccttgtatagtatccagttactgtcttctcttgaagtggtggttctttgagaagtagaattattttgtaacttttcttctcccagaaacagaagaatcaaatactattctgttaggattctatctagacctgtgactcttagtataataacccttttattattattattattattattttttcagtaatctataaagtagagttgcttagttttgagcaatttagggcttttcttattggccagtaggttattcattttgctgctaaatataattttttggttaattttaacattatagtgctggccgcttggttctatgattacctaaaaatctagtttttttcctccataggtagatgtgtgtgtatgcatacccccacacacacacgtacatatatgttgtcatagagaggtatttcaacccttatttcaaataacagtagaagatacgaacatgaatttatattttgtaaaaatgtcattcatccactttgttttccattggaaatagttttataagaagggttccccttgctctctccacttaacaatttcattatatacgtagaaaaagcagccgacttaagggcttgatgttttttcaggccttgtggattcaggtttccagtttcccagtgcccttaatggatgttatgaatgcataagcacattttcttttaaagaaagaagttagatttatagtgttatttcttacttgctatatttctttgcactaaaaaagagctatgtgtttgttttataggacactttagtaccgtattgcctacaataactcagtttgctccttaaattccaaactctgggaagttgataaataacttccatgatcacttgtaaaagttacatgcacatctgaaaaaaaatcacaaatctctatgacagtaggttatgttttgagcttgttaccttgcagtattcttctctgttccataggtgaaaacaaagggtgacagaggttatcaggcaggaaatgcctaaatagatacatctctgcatggtacaatttctcatattcatgtattccataaacagtgttttttctctgtttaagcagactgttgtttcttctgagtcagtgatatgtgatcttcgttggtttcattttgtgaagctcagtctgtctctgtaacatactttaggatttgcaccttgtgctccccaggaattatgttagtgtccttttctatgctgtcttcaaggatggacagaggcctaaaccacaacaacaacaaaaattagaaaaaaaaatacttagatttcggtaatcatccataggaactcatagcatcagtctcttttctctgtgaataatatctttgtgtaagttgtcataaaaaatcaacgttagaagatgacaattagaattcttcttaggtattgagggtaagaagttgtaaagaaagaaaattcgtgtttcaactaaaagattggattgcatatacctttgaagtggttttgtaaaaaaagttcagttactaaactgagtgtgccctgtaatccttttgagtgcactgaagatgctttgaaaatactttgttggtcttcacattgtgcatcatgtcctgcaacttgtaaatatgtgcatgttgtttatgtttgtctgcctgtctcttattgcactaaattctgcaaggtgaataatttttttataccatttatttggaaaaagttcctcctccaactcttcttcactgaccttttaattagttggtaaacttagaaaaccaggtaggatttttgaagccctgagtttaaaagaagaatcgtggctatttgacatcatccttacattcccctgacttaaaaagctaacaagaagcacgagatcttccacctcattttagaaagcttttctacagaactatatgcttgcttatagctacctatctacagtttgaacagggagaaagggagatatgtatgtctggttacatcttccttcactcttgaattggctgggacagcaagcaacaacagtttgaggtccagtgacctacgtaaaatgagtgtcgtttgtgtcaggggacacatgtaactgtgcaacatggtattttctacagggagggctaggaagggtggttttggaacctaacctactttgtgtcttcattgtcagaactaaggttggaaatgccctttaaagaacttggtgaggcatatgctaggacaatagagctgctttagaaagaaattgagacatgttttgtcaggacagataaaagtttaatgcaggcttttgaacagatgttttaaaacaaatttgaccttaccaactatttttttcttctagccaaatcattgtacaggagtttcatatatgataaaaagtgttttgttattgtttttgctttcttggcaggggagaacccctaccattgtgagcagttactgtcactctggctgaatggacaaatagctgtgtaaatagcttctcataaaacgcttctactgatagctgtttgactttttcttcccgttatgaatgggaggaacatttgtaaacttcctttctgggtagctaccaaaaaacgtactggcttatggtcccatgtgaccttgtctccgttaagcccagaatctgagtgcctttagcaagtgttagcatttcacagagagaagagagacagaattattgctattaatcaccattcataaataggagcttggaataacaaaggtctgtgtgaattctgttctacgtcttttttttcccttttttaaataaatgtcaatttgatatcaagtaaaactattgtcattattgatcagaaaccatacattctgaaaatgaatccagttttcccaagctggcagaagtcagagatcatttttcaccttgatctgtgttgcgtttgtacttagtgaatggcagtgtggttgattggaagagcttgacactgatgtttggaaaaattctttattctagtggtcattttcaaacttgtcttctgtagagaggggaaaaattatgtatttgcagctaaagcgaagagactggcacaataattattaattgtgttagttcatttctatattaaatgaagcatcttcacaaatcaggtttgaagccattaaaagcaaaattttccctagtttaattaatttaaaattctaaattgcctgactacttagaatcttagaaacgccctgctagactgattttattatagaaatgttaacatgttcctcaacattttctcaagaaaattttcagacatatatcaaagttgaaaaaactttgcagtataaccactgctagattctgccatcaacatttgactatacttgtattgccatgtatctgttcatattctctatccctcttttcatccatcgatccatcagattttttttttaaagaacattccaaagtaaattttaggcaatacactgccctaaattcttagcatgggtgtcattaattaaggtttagtattcgtttaaatatctattttgaaagtggtgtatgaagttgataatctgagccaattaacatacttttttttttttcctcctgtggacttttgtcttccagtttctctttttgtgtgtacttagggtgagggaggacaattcctttcaaacacaagtttattttagaattggtcatttttaagtgcttgtcataaattttaaagtttcaatataatttttcttttccccacttctgataatgtatttttgccaaactatgcagcttcttcaaaaaactgtaaattactgattggggtttatgaaatcagcgaatacctcatttcaatctgttgctgcttttctccctcttgtcacttctcctttcactactttcagctgctctaccagaaggtagaggggagtaaagggtcaaacccctatataattagctgttttaaacaactctaggagagcagattaagtagcttagtaagttgaaactattaatttttctaaagaatttgatttgaattccttgagaattgtaattatccacacttcctccagctataattagcagaattaaaaatgattgtactgtacaatgagttgttgaaattgtaagccttagtaaccatctttagctttattgtagtcatgtttagaaaaaattatttttacatatgcctttatttttatgcccactttttgtggataagattctttagataaaatctaaagaattttaagtgactttctccaggtcatgaagattcaatgggtagaattgaatcagaattgaaatgttccagattcatattcttgtgtgtgtttgataaaattcatggcttccaaagtaactgaacacttcctttgggcccttggagggaaaatccatatttttactaattacacttttttttttagacatctggcagttctttgaacttaaacatattctcatggccatagttccaaattaagcccgacgcagttgctaaaaatcttgctgcactgttgaatactaataatgcaacatttattggatgtttttgcattttgatgaccttcatgattcatttataagtctttgtaagtgcttaagtgaccccctcactagtgaaaataataaatgttctatatcatttattattatttgtgtattctctacatgatatatttttttaaggaagagtaactccacatgtcagaatgagtgatattatcctagggcaaagcgcaaatagggcagtttgtttctactctgcaaatatggcatgtataggaacaaaactcttttggagtggctggtcattgttctgccctcttttggtacctgagtacctttctggggttttgtaaatcgtgtgtcatttgtaagaatttcacgttaactctgcgttacttggtgttcacctgtggtatccttgactgaccataatgatttagtttgggtatgatgtgtctgctttgaaatgccttactggagtatgtcagatcctgctttaaagcattccatatatctgctgggacaataagttgcttctccttggaaatatgctctagattcagaagcaaaaccgattttgctttcaccattaaggttgcattttaatgcagttattgttttaaattagagaataaaatgtaaaaccaagggaggctttagaaccctttattgaatggcatggcaaacttttaaaactgcttttgctatttcactagaactatctttgataaaggatatagctaaaaaatgtcagcccaaactgtgtgtaattagggttgtttattaaaattttctctaaatgtcatacagaggcttaagatctgtgtatgctgttgggtcggagtgccagtcactgctttggaagtctgtgttctggggctgcagaatgacaaacgtgtcatgggattaaaaccaatcaactgtgaattgtgaaattgaaactactctttcggttttattttctttagcatattgagtatagaaatctgaaacttatttaaaatttatactgcttttgttgatggctcattttggctgtgtatcctcacttatgtactgatttctgataaaggcttgacattattataacacgcattttgtgttccagtttaataaaacggtttctgagtcttgtctgaaaa

SEQ ID NO: 913 - DNA, 2929 bp, Homo sapiens
atttccgggtcactgtagatgcgatggcgccgattccaaagactgtggggcggatcaagctagactgctctctacggcccagctgcccactggaggtcgctgctgcacccaaactttgcaaggaattcggtccagaggattacggcgaagaggacatagtggattttcttcgacggcttgtggagagtgatccccagggcctgcaccggatccatgtggatgggagcagcgggcggctgcagctgtggcaccatgattacctcctgggccacttggatgatgaagggaaatcaactggacagagtgacaggggcaagggggctgagggactgggcacctactgtggtctccgcaagtccttcctgtatcctccccaagagtctgagccctgccctcaaagcccctctgcctctgccaccttccccagtgtctcagacagcctgcttcaggtggccatgccccagaagctcctggtgacagaagaggaagccaatcgcctggctgaggagctggtggctgaggaggagcgcatgaaacagaaagcagagaaaaagcgactcaagaagaagcgtcaaaaggaacggaagcgacaggagcgtttggagcagtactgtggggagcccaaggccagcactacctcagatggagatgagagccccccatccagccctggaaacccagttcagggacagtgtggtgaagaagaggactcactggatctatctagcacttttgtgtctctggctttgcgcaaggttggggattggcccctcagtgcccgcagagagaagggactgaaccaggagccccaaggcaggggtctggccctccagaagatgggtcaagaggaagagagccctccaagagaggagaggccccagcagagtccaaaggtacaggcatctccgggactgctggcagctgccttacaacagagccaggaactggcaaagttgggtaccagctttgctcaaaatggtttctaccatgaggccgtggtcctcttcacccaggccttgaagctcaacccccaggaccaccggttatttggaaatcgttccttctgccatgagcggttgggtcagccagcgtgggccctggctgatgcccaggtggcccttaccctacggcctggctggccccggggcctcttccgcctgggcaaggccttgatgggactacagcgcttcagagaggcagctgctgtgtttcaggaaactctgagaggtgggtcccagcctgacgcagcccgagagctccgctcttgccttctccacctcacactgcagggtcagcgaggaggaatctgtgcaccacctctgtcacctggggccctccagccacttccccatgctgagctggcaccctcaggcctaccttccctcaggtgccctcgaagcactgctttgaggtcccctggcctgtctccactcttgcattatccttcatgtcaccgaagccaccccaaccagcccctctcccagactcagagtagaaggccccatcctctcaagccccaggacccttcaaagggctgggacatcctgggacttgggctccagcatctgtctcaggccagatgagggggcaccggtccctcatagggcagggccatgtatatatcccttggtgggggacatagtgtggtgacagttcactgcatattttgagaccttattctctagatccatagttaatgatgccctggcagtcattcctcttgccatggggaagcttctgatgagagaaaggagccccacatccactgaaacatcctttggttctcaagcttcttctggaggcagtaaggaaaaataaaacccaccaaggctcaagaagggaactatagaaaagttcaggtttttaggctatagcagagacagtgagaaagcatctgggcctttctcttcctcttggtccaggggacctcattcaccaactagagcttggtgtacaggaacggggtcacagtgctgagggggcttgagtcccacctttcagcttgatggatgctcacctcttctcagccccagctcgtgccctgtttttctagccatagcccccagattactcacagctcctcatgccatttcctgtccagattgctatgtatgactctgacctctcttgtccagtggtctggtgctcacctcctctcactgctagaatattcaccaagggtttgcatttgggaagtcccttaccagctcctgcttagagctggtagggccatacatgtccacactcccaactggtggctctcccgctgaatggggcctcagcaggtgcccaagctgctacaaccttggccactctgtttctccaccccagcactgggcatggtaattagcctttccccatgttaatttattcagttttttcaagggtcaactgaattccccacttcctgggtaagaagcatgatctccttttaatttcacgtctaagatcctggcagcttcccctagctggttcctctgtagtcctgctgggactgtcagctcatttaaatgtgggtctgcagaaggctttaggtctcccccaacccccttacctttcacagaggaacctttcatcaggataaatgattattgctgccctgtgggtcttgctcaatactgttcatacctggagagagaaggtattgaaacatctcctttatgtgtgactttcccaaatttttaaaaattgtttatggtttaggccccttaaatactgtgtagcaggatgaagtctaccattaccagctgggtcaccttggatgggtctgtcaacatctaagcctcagttccctcacctgtaaaaatgagggtagtccctacctcataagggatattgtgaggatggaaagcgaaagtgtgagaaaatacctcccaagtgcctggtacatagtgggtgctaaataaaccactttttgtctgcaactgtc

SEQ ID NO: 914 - DNA, 3068 bp, Homo sapiens
ggccgaggcggcggcggcggcgagcccgggggcgaggcgcggacgggaacaggaaaagcctccggcagcccctgcgggcggcggcgcagccacggccgcgctccgaggtgaagccgcgcgcggagaggaagcgggtgttttcccctctgcctttcggcccccgcccttcctttcagtttctgcccgctcgctcggaagttggcggttgacaaaaatggcaggagccggggcccgggccggttgccgcagcgccgcggggaccttctgagttggcccggtggcagggagactcgtgcaggggcgtccgatgcgcggggcccggggcctcgggagagctcagctgctgcgggccccagacgaggcgacagggatggacttgcgtagacagccagcgccgggccgccgggcgcgcggtctgggagggcgtgccgccgcggcgccgggccgcgctctgtgaaccggcgaggcgggaaggggccgccgtggtgctcggcacgcccgggcgtgtggcgggcgggcgagagcttgagcgcgatccgggcggccgctgtgcgcaatcagtgcaggctcccgcccgactctgactcggcgcggccgcgacagtgccggccacaccctctgccccgctgccgccggcgccgcttcccaagagctggaggcaggagatgcgcccggggcggccgcgcgtcccagagagccagccccggccgccgtcgcggggaagtgccgcctggtggggtcacggcgcctgaagcccacgtgcgccgccgagcccgaggtggcctcgagcgcggcggctgacagcacagcccgcctgagctgcctcccgcgctcctccccgaggaaaggattttgatttcaaagaaaggaaggaaggaaggacaactcccagcttccccgtcccgccctccccgctccgagggccgcgccaggccatgcccaagaaggcggcggcggcggcgaaccagcagaagggactttcctggcagcccggcgacgaggagcgcggacagtgagtttgctctgccccggttcatggttcctgcaagccctctaggaggccgaaagctgcagcccctccccttgccccgaagagccttccgcgttctctcgccctcgggcccaccccgcgccgcccgggctcccgccgccgcagcccagtgccctctgcccgcggcggtggatggcatgatggtgcggggaaggcaccgcggccttggccagctgagtcgcgacggccgccggggcggcggcagtggccgcggcagcggcggtggtagcgggctccccagcggcatgccagtgccccccgggcgcgatggctagcggcagcgccgggaagcccactggcgaggcggcttctccggctcctgcgagcgccatcggcggggccagctcgcagccgcggaagaggctggtatccgtctgcgaccactgcaagggcaagatgcagctggtggctgacctgctgctgctgtcgagcgaggcgcggcccgtgctcttcgagggccccgcctcctctggtgccggcgccgagtccttcgagcagtgccgggacaccatcatcgcgcgcaccaaggggctctccatcctcacccacgacgtgcagagccagctcaacatgggccgcttcggggaggcgggggacagcctggtggagctgggcgacctggtggtgtcgctgaccgagtgctcggcccacgcggcctatctggccgctgtggccacgccgggcgcccagcccgcgcagccgggcctggtggaccgctaccgcgtgacgcgatgccgccacgaggtggagcagggttgcgccgtgctgcgcgccacgccgctggccgacatgacgccgcagctgctgctggaggtgtcgcagggcctgtcgcgcaacctcaagttcctgacggacgcgtgcgccctggccagtgacaagtcacgggaccgcttttcgcgggagcagttcaagctgggcgtcaagtgcatgagcaccagcgcgtcggcgctgctggcctgcgtgcgcgaggtgaaggtggcgcccagtgagctggcgcgcagccgctgtgcgctcttcagcgggcccctggtgcaggcagtgagcgccctggtaggcttcgccaccgagccgcagttcctgggtcgcgcggcagctgtgagcgccgagggcaaggcggtgcagaccgccatcctgggcggcgccatgagcgtggtgtcggcctgcgtgctcctgacccagtgcctcagggatctggcgcagcaccccgacgggggcgccaagatgtcggaccacagggagaggctgaggaactcggcctgcgccgtgtctgaaggctgcaccctgctatctcaggctttaagggagaggtcttcgcccaggactttaccgccagtgaattccaattctgtgaattagcaccccacccccataccccttcttccacccccagactaaaggaagatacttactctctgcccctctccatttataccaaagaaatcataggtgaaaccccctaccctccccaacgttaaatgctcgagaggaatcttccacaaggcagggccatgcacgcaacctgcacacgcacttggagggcccaggtgtctctccaccagcccccatgcagtagggactggaagatatgtcatctgctggttgtgttatcactcccaccccctaccccagcccgtcttccggaatttctcaactaaatttcattattgggcaggaaggaggtcatgggttcatttcatttttgttttttgtgtttttaattaaaagaaaggttacctcagttttcactccttagacatggatgtagctacctttttttgtatgtcttttttttttttaagcaatcgtgttgaattaggagtatacttggtgtggaaagagtatgaatttgccatgtgatttgcaaatggggggaagctactgtgagcgtgtgtttttttaatttacactatagagtgatttttttttcccccaacgtcaagtttttaccttgcatgtactggagtatttatttcatctattaaaatgttatgtttctcagaaaaaaaaaaaaaaaaaa

SEQ ID NO: 915 - DNA, 3085 bp, Homo sapiens
acgtgacgccggctgaggagattggaggggcggctgcgcgaggctgcagactggtgcagcgcactgtgctggcggctgggcctcctccacctcctcgtctttctcccgggaaccttgacgacgccttccgcttggccctgccttctgccgcatccccgccgccgcggcgccttgaggagcaggagaagacgcagccgggccgccgccgttagaggggttcccggccgccgctcgccccgtcggccgccaccgcctccggggtcagccctctctctgggtctccgctttctcctgccgccagcgcccgctcatcgccgcgatggggctcctggactcggagccgggtagtgtcctaaacgtagtgtccacggcactcaacgacacggtagagttctaccgctggacctggtccatcgcagataagcgtgtggaaaattggcctctgatgcagtctccttggcctacactaagtataagcactctttatctcctgtttgtgtggctgggtccaaaatggatgaaggaccgagaaccttttcagatgcgtctagtgctcattatctataattttgggatggttttgcttaacctctttatcttcagagagttattcatgggatcatataatgcgggatatagctatatttgccagagtgtggattattctaataatgttcatgaagtcaggatagctgctgctctgtggtggtactttgtatctaaaggagttgagtatttggacacagtgttttttattctgagaaagaaaaacaaccaagtttctttccttcatgtgtatcatcactgtacgatgtttaccttgtggtggattggaattaagtgggttgcaggaggacaagcattttttggagcccagttgaattcctttatccatgtgattatgtactcatactatgggttaactgcatttggcccatggattcagaaatatctttggtggaaacgatacctgactatgttgcaactgattcaattccatgtgaccattgggcacacggcactgtctctttacactgactgccccttccccaaatggatgcactgggctctaattgcctatgcaatcagcttcatatttctctttcttaacttctacattcggacatacaaagagcctaagaaaccaaaagctggaaaaacagccatgaatggtatttcagcaaatggtgtgagcaaatcagaaaaacaactcatgatagaaaatggaaaaaagcagaaaaatggaaaagcaaaaggagattaaattgaactgggccttaactgttgttgacagtgaggaaaaactcccatatcatataaaatttcagggaaaacagaagcaaaggagagcttgggggtggggagaaaagacaaatgtgctctatgtcctagtaactcttagactgagtaaagtgttaataccatacccagatgttttatttatgaagtttttattttaaacattttttttaaaaattagccttgatattctccagaccaaagcaatcattaagtgactttggggattctccccctgttcacatccagttgtctaaaggatgagatttttcatgtatcttatagtcactcattcttcggtctgaattttagacgatcacagaaacggtctttatgaattattttgataaattactaattatcttatctactgactgaaatcagtggtgttacattttcttgtccaaagctgaaaatgtgtatacacttaaacttgcacatttgaattcatttgctgaccggaatggtcaaatctctccacctctagtcagagtataattttggttgtaattaaatttttaaaatctgctgatctctgtagaatcttagaggcttgatgatgatggtgttggtgaaaataagaaagaattgcagtaaagtcttgtctggtgacccagagatcaccatgacttgaggcacaaatcactgtggggaaacaattttttgtgatgaaaaggcagcatttgaatactcctgttagtagcagaaatatattatgaaaattaagattattgtctgattgaaacatgaaacaactcatgtctttattagtaacatcataagatagttacatttatgtgctgttagaatatgttgatttttatcaggctttccttgttttgatttatggctgttcctgatttttcatatgtggaaatatacctacctcttccgttggaaagaacatttaaaattaaataaattttaattaaaaaatcaaggagtcttctaatgtaaattttaatgttaactttcaaatccactagtattttttttgcttttatgacaaatagcatacaccaaacatttctgtgaaactatccttctctttcaatgtgtttaattttggagtaacgttttccttgtgactaagttgcaagatcttatttattaactaggtatgaagtataaacccattttggtgcaatattcttgactccttggtgctaaagattgttaaattcaatgcttgatgttacaaggtgttgttaaaacacaaaatgaataaaagtgagagtagtcagaactataacattcaatttgctatttacaaatgaagtatttcatgtaatataagtgaacaactggaaataaagtaggaaagaatttgtatcatgttttactacataggttaattttttaagggatgttgcaaagggattactagagaaagacaaaatgtgaccaaaaaaaagcatgaatatttcttaagtatctcaacaacatgtcaaagctgcatgtgtaggatgtatgctgtttgtacaaactatttcagaatattttgtaagctataacatatttattgtgcattaaaattaaatactttttccccaaaggcatgcagtcatgagaattacagaaaatttgcaacatataaagtagtttgatctaagaggattcaacacctttgttttgttgctcagtgtgtaatgactgagatttgtaaatctttgtgaacattctgtactggttcccaagagctattcattccctgctacctgatttcagcacaataaatatacttctgctgtgggaaaaataaaaaaaaaaaaaaaaaaaaaaaaaa

SEQ ID NO: 916 - DNA, 3759 bp, Homo sapiens
agagcgctgccgccgccgctttcgcccgggagccgggggccgggcgccatcatgctgagccggctcggggcgctgctgcaggaagccgtgggggcgcgcgagcccagcattgacctgctgcaggccttcgtggagcactggaagggcatcacgcactactacatcgagagcacagatgaaagcacccccgccaagaagacagacattccctggcggctgaagcagatgctggatatcctggtgtatgaagagcagcagcaggcggccgcgggtgaggcagggccctgcctggagtacctgctgcagcacaagatcctggagactctctgcacgctgggcaaggccgagtaccccccaggcatgcggcagcaggtgttccagttcttcagcaaggttctggcgcaggtgcagcaccccctgctgcattacctcagcgtccacaggcctgtgcagaaactcctccgacttggtgggactgcttccggatccgttacagaaaaggaggaggtgcagttcaccaccgtcctctgctccaagatccagcaggacccagagctgctcgcctacatcctggaaggtaaaaagattgtaggtaggaagaaagcatgcggagaacccactgccctgcctaaggacacaaccagccacggggacaaggactgctcccacgatggtgctcctgccaggccccagctggacggggagtcctgtggggcccaggccttgaacagccacatgcctgctgagaccgaggagctggacggtgggaccacagagagcaacctgattacctccctgcttgggctgtgccagagcaagaagagtcgggtggccttgaaggcccaggagaacctgctgctcctggtgagcatggcctccccagcagctgccacctacctggtacagagcagcgcctgctgccctgcgatcgtccggcacctttgccagttgtaccggtccatgcctgtcttcctggaccccgcagacattgccaccttagagggcatcagctggaggttacccagtgccccgtctgatgaggcttccttccctggcaaggaggccttggctgccttcttgggctggtttgattactgcgaccacctcatcacagaggcacacacggtggttgcggacgccttggcgaaggctgtggctgagaacttcttcgtggagaccctgcagccccagctcctgcacgtgtccgagcagagcatcttgacctccaccgccctcctcacagccatgctgcgccagcttcgctcccctgcgctgctgcgggaggccgtggctttcctcctgggcacagaccggcagcctgaagcccccggggacaacccccacaccctgtatgctcatctcatcgggcattgtgaccacctctctgatgagatcagcatcaccacactccggctgtttgaggagctgctgcagaagccccacgaggggatcatccacagcctggtcctgcgcaaccttgagggccgcccttacgtggcctggggctcaccagagcctgagagctatgaggacaccctagacctggaggaagacccctacttcaccgacagcttcctggattccggctttcaaactcccgcaaagcctcgcctagctcctgctaccagttacgatggcaaaacagcagtgaccgagatcgtcaacagtttcctgtgcctggtccccgaggaagccaagacctctgccttcctggaggagacaggctatgacacatacgtccacgatgcttatggcctgttccaggagtgcagctcccgcgtcgcctcctggggctggcctctgacccccacacctttggacccccatgagcccgagcgacctttcttcgagggccacttcctccgagtgctgtttgaccgcatgtcccggattctggatcagccatacagcctgaacctgcaggtgacctcggtcctgtcccggcttgccctcttcccccacccccatattcatgagtacctgctggatccgtacatcagcctggcccccggctgcaggagcctattctccgtgttggtgagggtgatcggggacttgatgcagagaatccagagggtaccccagttcccaggcaagctgctcctggtgcgcaagcagttgacgggccaggctcctggggagcagctggaccaccagaccctcctccagggcgtggtggtgctggaggagttctgcaaggagctggctgccattgccttcgtcaagtttcccccacatgatcctcgccagaacgtctccccagccccggaagggcaggtctgagccagcaccagggcggtgggagactcctgtccacacctctgccccagagctgcctcctgcctggcactgccgccacactcccctcctgggatggggcttctgctcccgggctcactcaaggagactgcggcatgttgaccacaccagactgggtttcagggaatgggcatgccaggtgccaaggagccaaacagatggctttccaggcagcaaggtccttggggccttcttggaggagcttgggtgacagccaggtgagcacccagaccccagaccctcatgtgctgtgtgcctggccccttctgtactggccatttgtggccagggccaagcctgtgactcaactccaggggcaagatggggagtgagctgatggctccgagactggtcaggagcccaggccagtgagatggggcctggagccttgtctgtgtcacattaggtaccatgggagctgctgagacctgacattttgtcccctgcctacatggcttggcccatggagaaggagcagtgaatgggatcgtcggggaagcccctcttcctgctctgctcccctggaaactgttgcaaaactcccagccgcctcatggcaaatgcccaaagcatgttccgcacccaggcgggggcccctgctaatgagaaccttggtgcagctgcagccaggaggggagcgggcccaggagccaggctcaggtccagctggttcctctctggcgccttctgaacccgtctcagcaggtccacagcacctgggcagaggtcagagaccaggggaggccgggccttgccctcccttctgcccagggcccagtgttcttgatagaagacccttctggggagccagggagctcaggggacagataagggaaggacgccccctgactccaggcccctgagcctggcgggaagtggctgcggcccaggcagccagtcctggtggtgttctccctgcatgccctccgtggctgggctgccaccccacccggcccgaatctgtcttgacctgcaggaatacacgggcggcgccaggcattacctcacagcgggactacacagttgctggctttgctcctgggcaaggaggagcaggccagagcctcttttgcttccttttcttgcccatgccgcttctagaagccaggcacaggttgccaagaggtgacacgaaacaggaggaaactcagtgacctctgcctctcccacattcctccccgcgggggaggacctcgccgctctgaagagcaccgtgcacatgtgggtgcacaaacgtgggtgttggtgtggacggggcgcagatctccgtggatgaactgcgtctggactcttagattcataaaatattcgagggtttgggagtcacagaccctcccctctcctcagtgcactttggcatttgcacggtgtcttccccggacagcacagcaataaatggtgtgattgcgtggaaaaaaaaaaaaaaaaaaaaaaaaaaaa

SEQ ID NO: 917 - DNA, 3134 bp, Homo sapiens
agtcggagccgggcttgcccgggcatgtgggagctgccggctttccggacgccacgtgcagaccggaagagacacgcggggcttcaggctgctgccccattggaagattactccccaggcttcccttgccccaagcagtgagctgactggaatggtaccccgggaggcccctgagtctgctcagtgcctgtgcccttccctcaccatcccaaatgccaaggatgtgcttcggaagaggcacaagagaaggagccgacagcaccagcggttcatggcccggaaggccttgctgcaggagcaggggctgctgagcatgcctccagaaccagggtcctccccactgcccacccctttcggggcagcgacagcaactgaagctgccagcagtgggaagcagtgtctgagggctggatctggcagtgccccatgcagcagaaggcctgctcccgggaaagcctcagggcccttgcccagcaagtgtgtggctatcgactgtgagatggtgggcacgggaccccgagggcgggtaagcgagctggcccgctgttccattgtgagctaccatggcaatgtcctctatgacaagtacatcaggcctgagatgcccatcgctgactaccgtacccgctggagtggcatcactcggcagcacatgcgcaaggctgtccccttccaggtggcccagaaagagatccttaagctcctgaagggcaaggtggtggtggggcacgcgctgcacaacgacttccaggcgctcaagtatgtccaccctcggagccagacccgggatacgacctatgtcccaaacttcctcagcgagcccggcctccacacccgggcccgggtctctctaaaggacctggccctgcagctgctgcacaagaagatccaggtgggccagcacgggcactcatcagtagaagatgccacgacagccatggagctctaccggctggtggaggtgcagtgggaacagcaggaggcccgcagcctctggacctgccccgaggacagagaacctgacagcagcacagacatggaacagtacatggaggaccagtactggcccgatgacctggcccacggcagcagaggaggagccagggaggcacaggacagaaggaattgagaagggggcggggctccctggctgggcttccggtgtggccggtaggaagtgggggccaggagagcagcgggcactccttcctgggcagggtggggcaggatgcagtgagccagccccagggccagaggagtaggggtcatctgttaccttgacaccctctgcacacagcatagccctctctctctccagggctgttggttctttctcctgactcctgtggttttgctaatggcactttacagactccatggagatgtcaggtggaccatcttctagggcccagcaggagtagggaatgtgccaacagactgcccaggttgccgtggccttccccaccccccagatctcctgagtcatcatgctgtgctaatgaaagggatcatatcatcctctctggggatggtgggtgggggtgtcaatatcctggagctcccttaccccaactcaatgacttgggggtaaagttctcttccttttgttgcctacctcttcctccactcatttgggttcagaataaacatgccctgaagttaaagaggagttaagtcctaaaggaggcatttcttccccacctccctgacctggaactctggctacagccattgtaggaactccgtgcctggcctgtcagctccctgctaggctacagtggaatagcagagcccacaggcttctcgtggggagttggctccttaacatttcttggcaacagaaagccccaggcacagctcagggaggagggaaggcaggtaagctttggacgagaactggcatatttattttgacccaaatcagggatttccccagtccacccagtactgggctcttaagcaaaagtctgagaaacaagacagtggtttgaattctggggcctttgtgtaggattgtgcctgacctttatttatttattaacagcagggccactcgtctagggcagtggagtctgcgtgtctcctggggctggggcagggcattggcagttacgcagtggccctgaacctggtctggtgcccccgaacctggtctgatgccccctcagctctttgacaatcactgtggctgttgggttttctcctatttctaaaaatgttctcttctttcctaagtgacagttttgaagtattggataaccaagagctcaggtcacacagaccttggagccccatctttgcttgcagcttagctttgagatactaagcaagcgagggacttcactcttgaggctgttttttcctcatctgtaaagtggggatagtggtacggcctacctcatagggttgtaatgagcactaaatgtgaagtgcttggcacagtgcctggcacatggtgagccacagctactgtgagtttctgtttatcccccttttttttttttaagcccattgtttattctttgagaatttgttgtaacttcttcaggataacacctgagtccacaggctgagcagctgtggcccagacagaactgctccggcttggctgttccagcaggtggggcgctggcctcggtgagggcacagcagcaaggttcacggatatccgtgtgtcttgtctgtggccaccaggcacaggtttggcttccggtcagtgtcccgacactgtgcgggaggtgacaacagagcaaagcagcgcaggggtcagggaggtacagacactgctgaaatcacactaccccaccctcagctgaagccccacgttccacaaacttggggtcatagattgtccagtcactggctccctccctgtcagcacagcacagaggaaggggctaactgaatcttttaccacttctggcctggctccagaactttgttctagattccttaaaagtcggtagctgatgtcaaactcaattgagcagtagctttgatcccttggtctgggggtcgaaggaagatggtgctgttatcagcggggaaatgtactatttaagatcagctttgttgtaaaaccatttgttctagaataaaactcaattggaaacgtgaaaaaaaaaaaaaaaaaa

SEQ ID NO: 918 - DNA, 5101 bp, Homo sapiens
cggaacccggtcgaaagggtcctctctggcgtccttctgcttccgtgggtttctggataggctgcgttttgttctcaggggatgcaagttcttcctttcagggttgaagcgtgagagaggttggtttttgaaacgggagtgtttcaggttattgaggtccaaaaagaaataaagtttttgtttacgtctgtatggcttgtaagatatctcccggggccaattcagcatctctacctggccatcctaacaaggtgatttgtgaaagggtgagacttcagagcctgttccctctcctcccaagtgatcagaacactaccgttcaagaggatgctcacttcaaagctttcttccagagtgaagatagtccaagtcctaagagacagcgcctctctcattcagtctttgattatacatcagcatcaccagctccctcaccaccaatgcgaccatgggagatgacatcaaataggcagcccccttcagttcgaccaagccaacatcacttctcaggggaacgatgcaacacacctgcacgcaacagaagaagtcctcctgtcaggcgccagagaggaagaagggatcgtctgtctcgacataattccattagtcaagatgaaaactatcaccatctcccttacgcacagcagcaagcaatagaggagcctcgagccttccaccctccgaatgtatctccccgtctgctacatcctgctgctcatccaccccagcagaatgcagtcatggttgacatacatgatcagctccatcaaggaacagtccctgtttcttacacagtaacaacagtggcaccacatgggattccactctgcacaggccagcacatccctgcttgtagtacacagcaggtcccaggatgctctgtggttttcagtggacagcacctccctgtctgtagtgtgcctcctccaatgcttcaggcatgttcagttcagcacttaccagtaccatatgctgcattcccaccccttatttctagtgatccatttcttatacatcctcctcacctttctccccatcatcctcctcatttgccaccaccaggccagtttgtccctttccaaacacagcaatcacgatcgcctctgcaaaggatagaaaatgaagtggaactcttaggagaacatcttccagtaggaggttttacttaccctccatcagcccaccccccaacattacctccatcagctcccttgcagttcttaacacatgatcctttgcatcaggaggtgtcctttggagtaccttatcctccatttatgcctcggaggcttacaggacgtagtagataccgatcccagcagccaataccacctcccccttatcatcccagcttactgccatatgtgttatcaatgcttccagtgccacctgcagtgggcccaactttcagctttgaattagatgtagaagatggagaagtagaaaattacgaggccctgttaaacctggcagagcgactgggagaggcaaagcctcgtggactgactaaagcagatattgaacaacttccttcttatcggttcaatcctaacaaccaccagtcagaacagactttgtgtgtagtatgcatgtgtgattttgagtcaaggcagctacttagagtcttaccctgtaaccacgagttccatgccaagtgtgttgacaaatggcttaaggcaaatcgtacttgcccaatttgccgagctgatgcttcagaagtgcatcgggattcagaatgaccaacctaagaagcacaaatttagtttgggtgttcctcatcacatgtatatacggactatccattgaacttaatctgtgtggcttccagccctccctttaccaaaagggtcaatggacctttctttgcactgtgtgacttaatcaactataaaagcttacaattagtcttcacagttatgggattgttatactaaccgtgtgattggaactccaaagactttttctttagcttaattttgtgtgtgcactaacattccctggtttttgtgtgatcattccgagtgttgctgcaagattacagtggacgtgatcttttagcatgtgcttttataaaaagtggtagctacagatgatatagcaatctaccttatatagagccttcagaaactgtgagtggaaatgaatgcgcagcgtatgactgttggtgataagtgtatctgtgtgagtgtgtgcaactacttgtgtgagggcatggtagctaacgtgtgtatgagatcctatataccagcatgtaccaagaatgtgtgtgtagttttaattatgctgcaatgtataatctggtgtgttatttaaacagcactagtactgtacactggtttttttcccttgtgtttgctgttgcacactgattgctgagggtgcatcaattacaagcattgaatactccatccccttccctcccagtgaatggaatgagaaaagccttcttcctttgcttcaggcagctgtcaccttctctttattggtggtcctaagtgggtcacttaagaaaaaaaagtgtaacaaattctcgctccatgaacctggtttttttttattctgttgtggaaatttttaaatctccaacttgctgtttccaaaaagaaggtgcaatatcatatatcatcagttagcaatattagcatttcaatcagtgatttgaatgttgatacttttttttcctttacatttccagtaagtttcttacagaaagtacctgtgattttttttaatgtttagatttgtagtctagtctattctgaagatatttgattaatatatttctaagaagaccactagtcccatgaagtctcaccttgttgacttccaccagaacaaaacctgttaattcagcttgacttctcatatgtgttctgtgttcaagctcctgtgggcaactcaattgttttaagaaaactctatttctgttcatattaattcacttgccagactccaattctgaaagttgtctagttcttccttcatcacacgtgcttctcatcgaaaccctggtttcaggatggatcaagtgctgttacagctcatgttccttagacctgatttgttttgatattttactgcctttccttttaatttttgtttgaatgagaaaagtttaatacaacaggtgtccagaatacttgcagtataaatgaagatttggtttttgtataaaaaaataatgctgttaaacaggagttgaccttcatttagttgatgtaatacatagctgtatggggttttttttagtaagttctttgagcataattcactttaaagtcatttttccagcaatgtttaaattactttctcattcttttagtgtattcaacattgtctgcctcttcctgcagttgatgtaattgctttgtttgcaatagcacaagctgcattattccagtcaggactgtgataacttgctgccagccccactcaactttcagttggctctgtgtcagttttccattcagtgttaactacttgttactgccatgctgcttgccctcccttgaagtgtctataagctcatcacagcctagagttaagtaaagtcaattcacagaagcacaattttgccctttgcgagacattgttgcctctatctagtcctacaagtagggttttgcatactgtgtttgcccctagggttgtcagtgcatcagaaatacttctaaatagtggtaaaaatgcacatggttaatgcacatgttacttttaaatcattaggatatccctcacctgttcctgatgaataaaaagtgtgttaaagaccaaaattcttggcataataatcagctacatacaaatcacatatagtttaatcttttttaatgaaaaaaaatcatgtttaaaatggcaaaagcccatcttatacacttttatatagctgcaaaaaatttatatctgtacagatctaacactacgacactcagtattcattttattgaagcatgcaagtaaagcactttttctaatttatatagaggtatctaattaacacagcacattgtactaatgactaggagtagcagctttttcttctctccctctatgaattcttataatgtccctttttctgtaagtttttgagaggcaattggcaatttaggaggcagcagggtctgttttggtcaaatcttgaatttcgttgttgcactctagtgactgatctttgggaatgtcttgtctttgcatggggctcatagagatgtgtgcagacttgcttattgtggttagtgtgtatcaggaacacacacacaggtgttctgaccagctcaggcttgccacagtgagcaactctgtggctagcaaaagagaagtttatttgtgcccagccattggtcaccttgggtgatgcaccagatagcaggcagatgttggttcattggccttcgtcctctttcctcctaaaataatattggctttaccatcttaactcagctgtgggttttttgtgggttcttgtttgttttttggcatgaattgtcatctttggtgtttttttaacccccagcccctcaaaaaaataaggcctccaggtatcaagatctcatattaggattttctgtccttaattttttgagcaaaatctggaaaatgtgaaagcatatttagattttatatactatctgaaatgtgatttgttaagattcttaaatttgggcctcttagaataattttgaatgagatctaccgactcacttgtgagaatatttttcacagattatctttgggccttttcattagaaagctgtttgtttgtccccctgttggtacatttggttacctcattttgccgtttcagattgtgaaagctcacaggggtgttttttggaatcatttgctgagtcattttctcaaatcatattccattgtatcagttaacatatagttttaaatgtatgtattataaatatctgtaaccaaatcatttgaaggcttgataaatttttaacaaagtttgtacattttttatgaaagttactagtaatgctttactaagtagtgcaatgaatttttatttttaatccctgtgcccaattttggagttgagagggttgttggtaataaatgtatgatgtacacttaaaaaaaaaaaaaa

SEQ ID NO: 919 - DNA, 2198 bp, Homo sapiens
ggcggggcgatctggagtaggaggtgtgaccggagggcgaaattggggcttcctctgctctggtgacccagaaccgtcaactgaaatgaccctgtctgtgtagtactccggcaggatgggcctcggagcgtaaaggcggcaaaaacaaaaatattaaaaaaaaggagagagggacaaaaaaaagaaaacccgaaagtttcagctgcattgctgcggaacgttttttagccagaaggcgaaagaagaaatcggaagtgacgtcgcggccaaaacaagcccgggcttggaggcctgtactgaagctggcctcagatgggaaggcccgactcgctgtctgctgtcgtcggtggtcgcgagaccttgcactctcaccgggtcggcctccagcccctgtgcccgggatccgctcgccgcggatgagcgagagtttcttcctgggacttttcgggcacagctggccggtggcgacagaacggactttctttcctgcaagagtctcccctccagcgggagacagcgggctcctgtctcgggacgctgggacacctgtcgcctatttttaaatatccagattccaagaacacactggatactgctcttacaaaaccaagaggaaatcatgaagaaatgttttagttattgaaactacagttgaaatcatggatacatcaacaaatctggatattggagcccagcttatcgtggaagagtgtcccagcacttatagcctaactggcatgccagacattaaaatagaacatccactggacccaaattcagaagaagggtcagctcagggtgttgccatgggaatgaaattcatattgcctaaccgatttgatatgaatgtgtgttctcgatttgtgaagtccttaaatgaagaagatagtaaaaatattcaagatcaggttaactctgacctggaggtggcatctgtcctatttaaagctgaatgcaatatccatacatctccttctccgggaattcaagtaaggcatgtctacaccccctctacaacaaagcatttctcacccataaaacagtcaaccactttaaccaacaaacacagaggaaatgaggtctctaccacacctctgttagcaaattctttgtctgttcaccagttggctgctcagggagagatgctctatctggctactcgtatcgaacaagaaaatgttatcaatcacacggatgaagaaggatttactcctctgatgtgggctgcagcacacgggcaaatagctgtggtagagttcctacttcagaatggtgctgatccccaacttttaggaaaaggtcgagaaagtgcactgtcgttggcctgtagtaaaggctacacagatattgtcaaaatgctgcttgattgtggagttgatgtaaatgaatatgattggaatggaggaacacctctgctttatgctgtacatggaaatcatgtgaaatgtgtaaagatgctcttagaaagtggggctgatccaacaattgaaactgactctggatataattctatggatctagctgtagccctaggctatagaagtgttcaacaggttattgagtcacatttgttgaagctgcttcaaaatatcaaggagtagacacagtcatcagaaaatgtctgcccttttgtttacttcttggtccttataaatgatagttttgtttacttataaatttttacctcagttgcaatatttactggtttttagtaggttttaataaatatttctctgagtaattcactggtttataataaatgtaatactctttttataactatgttttactgtatatttaaaattataaattaatgttttcgtggcatgtaaatttttatggtacagatagttatcatcagtctttgtatcaagtgctgtaatttgacattttcagaaattattctaccctagtcatcttcactcgtgtattaagtcattcactttatatagggtttgctataaatccctagaaaaaaattgttcttattgttgaataaaaaagtgcacagtgtgattgtttacaaaatgatattataaataaataaaatacttcttctgtcagtttgcatactacttttttaagtatataagattattaaagatttctttcagatttttaatttcacccttctgtcctgccgtaacacttcattagatcaaacaatatatgtaattaaaataaactgaatctaagtc

SEQ ID NO: 920 - DNA, 4339 bp, Homo sapiens
taaaggggccgcatcaccctgccggcccggcgcgggtcgggggtgggtgcggtaggggtcccggggcggccgagcgcagaggacggacgggaaggagggcagggggcgcgggagccggcgaagcggagcgggcatcggaccgagccccccaaagaggccccgccccggccctggccccggccgggccggatggaaccccccgcggccaagcggagccggggctgccccgcgggacccgaggagcgcgatgccggggccggggccgcgcgtggccggggccggcccgaggcgctgctggacctcagcgccaagcgggtagccgagagctgggccttcgagcaggtggaggagcggttctcccgggtgcctgagcccgtccagaagcgcatcgtgttttggtcgtttccacgcagtgaacgggaaatatgtatgtactcgtcgctgggttacccgcccccagagggcgagcacgatgcccgggtgccctttacccgcgggctgcacctgctccagagcggggccgtggaccgcgtgttgcaagtgggattccacctgagcggaaacatccgcgagccagggagtcctggagagcccgagcgcctctaccatgtctccatcagctttgatcgctgcaagatcacgtccgtgagctgcggctgtgacaaccgcgacctcttctactgtgcccacgtggtggccctgtccctgtaccgcattcggcacgcccaccaggtggagctgcggctgcccatctccgagacgctctcccagatgaaccgggaccagctgcagaagttcgtgcagtacctcatcagcgcccatcacactgaggtgctgcccactgctcagcgcttggctgatgagatcctcctgctgggctccgagatcaacttggtgaatggtgccccagaccccaccgccggcgcaggaatcgaggacgccaactgctggcacctggacgaggagcagatccaggagcaggtgaagcagctactgtccaatggcggctactacggggccagccagcagctgcgctccatgttcagcaaggtgcgggagatgctgcgaatgcgggactccaacggggcgcgcatgctgattctcatgaccgagcagttcctgcaggacacgcgcctggccctgtggcggcagcagggcgcgggcatgacggacaagtgccggcagctctgggatgagctgggggccctgtgggtttgcgtcgtcctgagcccccactgcaaaccagaggaaagggcaggctggctccagctactcagcaggtgggacaagctcgacgtctgcccactggaagagggcaactactccttcgacggccccagcctgcagcccaccatggcccccgccccagagctgctccagaagggctccacctgcatcaccaacaccgaaggatgggtggggcaccccctggaccccattggctgcctctgcagggcgctcctggaggcctgtcgtctggaggaggagacacttaccctttacccagactcaggccccgagaagcggaaggtggcctaccagcacgtgcctgtgcccgggagccctggggagtcctacttggtgctggcgctggaggtggcactgctggggctggggcagcagcgggccctgccggaggggctgtacgcccaggacaaggtggtgcgcaacgaggagcagctgctggccctgctggaggaggtggagttggatgagcggttggtgcaggtgctgcgcaagcaggcggggctgctgctggaagggggtcccttcagtggctttggggaggtgctgttccgggagagcgtgcccatgcacacctgtgcccgctacctgttcaccgcactgctgcctcatgacccggacctggcctatcgcctcgcgctgcgagctatgaggctgcccatactggagacagcatttcctgctggagaacctcatcccagcccgctggactccatcatgagcaaccgcttcccccgctggttcatccttggccacctggagacccgccagtgtgaactggcttccaccatgttgacggccgccaagggagaccccaagtggctgcacacggtactgggctccatccagcagaacatccactctccggccctgctctttaagctggcgcaggacgcctgcaagacagccaccccggtcagcgccccaccagacaccacgctgctgggcatcgcactggagctggggctgcaggtgatgcggatgactctgaacgtaatgacctggcggcggagggagatggtgcgctggctggtcagctgtgccacagagattggcccgcaagccctgatgaatatcatgcagaactggtattccttattcacaccagtggaggcggctaccatcgtggcagtgacgggcaccacacacgccactctgctgcgactgcagctggacacatcgcggagggaggagctctgggcctgcgcccgcaccctggccttgcagtgcgcgatgaaggaccctcagaactgcgccttgcctgccctgaccctgtgcgagaagaaccactcggccttcgaggcggcctaccagatcgtgctggacgcggcggccggcggcctgggccacgcccacctcttcactgtggcccgctatatggagcaccgcgggctgccgctccgggcctacaagctggcgacgctggccctggcgcagctcagcatcgccttcaaccaggacagccaccctgccgtcaacgacgtgctttgggcctgctctctcagccactccctgggccggcacgagctctctgccatcgtccccctcatcattcgcagcatccactgtgccccaatgctgtccgatattctgcgccgctggactctctcggcgcccggtctgggccccttaggggcacgccgggccgccaagccactgggtgccgaccgggcgccgctctgccagctcctggacgcggcagtcaccgcctacatcaccaccagccactcgcgcctcacgcacatcagcccgcggcactatggggatttcatcgaattcctgggcaaggcccgggagaccttcctgctggcgcccgacgggcacctccagttctcacagttcttggagaacctcaaacagacctacaagggcaagaagaaactcatgcttttggtgcgggagcgttttggttgagggacagtggggtgcgtgggagtggggatccccctcgcccctgcgtcccccacccttgctctccaattaggcccacgtggcatttcagtattattaagtcagggaaggagcccggctggagatgggggcagggggagcagcatcctgccacgtgtgtgcctgggagtctgtgagcaagtgtgcaagactccagaagcagaagccatactgccacccagaagcctggaaggggtgtgtgcttgggctgctggtatgaccccactttgggcaccccaaaagcaataggcaaactccccttacccagactggcttgggctccaggagggaggctgggaggcaggactttccagaaatcgaccctctaagtcaatgtagcacattttcccccaaccccaccctgggtggccaagggtcctcccccaccccctactgctcagggccccccattatgccacctccaaagtggctgcccagccaggaccattggctcacccccactgaaggaattgaagaggcctcaggcctcagcctcatacctcacccccttatcctatccggccaggacccccatttccttgggcactagggtcccagggtgggctcagggttggggaagtcctcgctgccctctcttctcacctgctagtcactggacgtacaactcaggaactgagcgaggctcacactgccccttccaacctggggttgggggacacagacgcgagagagccggagacccccacccccgatctggaaaggaaagagacctgtatcttggtgtttttctggctttttcaccctttcgcctcctgtctttctgcttcgccccttcatcttactctgtttccatttttcccggcacttacctgcctttctctctgcacctaagtccctgccgccctctctctttggccatccttcctttcccccaccttgacccagggaggagaagggagaacatcacccccccaagtcacccccacatcttttcccttcttgtatattaaggacaaaataccacatcattttgtaactttttttctatttattgaacggtgtattacatgtccttttcctttttttttttcaaagattgaacagaaatttttctttttaattttattttgagactggggtgcatctccagagccactcacaccctcaacctcgtttcctccgc

SEQ ID NO: 921 - DNA, 3873 bp, Homo sapiens
ctttggtttgcggagcggtcgggtgtattctccgccgcccccacgccctcgaggtccccgccaccgaaccagcggcggagcccgcccgcgcctcccgcggcattcccgcaccggatcgctcctcgctggggcgggacctggcctggcggctctggtcactatgagtgaaacatctttcaacctaatatcagaaaaatgtgacattctatccattcttcgggaccatcctgaaaacaggatttaccggaggaaaatcgaggaactcagcaaaaggttcaccgccatccgcaagaccaaaggggatgggaactgcttctacagggccttgggctattcctacctggagtccctgctggggaagagcagggagatcttcaagttcaaagaacgcgtactgcagaccccaaatgaccttctggctgctggctttgaggagcacaagttcagaaacttcttcaatgctttttacagtgtggtggaactggtagagaaggatggctcagtgtccagcctgctgaaggtgttcaacgaccagagtgcctcggaccacatcgtgcagttcctgcgcctgctcacgtcggccttcatcaggaaccgagcagacttcttccggcacttcattgatgaggagatggacatcaaagacttctgcactcacgaagtagagcccatggccacggagtgtgaccacatccagatcacggcgttgtcgcaggccctgagcattgccctgcaagtggagtacgtggacgagatggataccgccctgaaccaccacgtgttccctgaggccgccaccccttccgtttacctgctctataaaacatcccactacaacatcctttatgcagccgataaacattgattaattttaggccatgcagtggaacctgtcacctaatgggactgcattctgaatggaacattccggctcttcaattttttaagcaatttagactgtagcaagaaaatgtgcagccttttgggcaaagcccctgggaacgaggcctatccactatggactatggtaacttggtaggatttttagtatttattttaatggagggacaaatgctttctaactgggcccccgactccgcaccccagttcgcagtgaggccctgggtgggtcacctgccctctctggacttgtttcttcaactggaggaggtccctgcctatgctgacattccattgtagaaaaatggggcctctggtgtctctttaccaggggcagtgcctctctgcgggggaggaaaagctcaaggttagctgtcttaacccaagtgacttaccaggcctacaaaagagtccagtccagtcacttgttggactgggctctgacagatggcctattgaggtcaacttgaatgtgagggctacggtgtggtttcaaacattcatgatggatgtattttcctacccctaacttaaggagaaaaaaaaaaagacttcctttttttgccaaagtccagaaaggggcctttagcctttagtaggagctcaaattgttggggcccctctacctctctcagggctagaactgcctgactcttggtggacgagcccttcagggttctgctttcagccccacctggacagaggcttacaagactagggtctggaccagaatctgtgtatttctgtctgggaccaggaagccgcagctgtcccatcatccccagcaaatcctagaagtggagtctggatacttcaaggatagaagtgttggcacgcacagccatggacccagctgagcagagcagacgctttgcaggctgcccctggcttcttcctccctttcccgcttctgctctctttatggactggtcagagggtaggtgggaaagaacagacaagccatgggaagttggcagtggggagatttccactgtggaaaccgcctgggaattccggccagcagcttcctccttcagccacctggccataccccttaaataagcccctcaccttgctgcctcaggaccttcaagattccatctgtgggctggccggcaagatggcaccagtggggacccacaccctggctgggcagaggtgctgctagcaacctctcttcctctataagaggaaatggaaaatgcagggtgtggaattgccctttggggtccttccttaattgaaggccaccttctcacaggtttcattctgcagggatttactggaatctattggtgctgctgcatgagtctgctgacaacctgactgcacaaggactgggtagcagactcctcagagtcctcttgacacaaatgtcagatttgtgtcactcttctgccttcgtgaaaagccaatagcactctcagatatcaggggattttagttccaagcagggaccctggtttccatactgccctcagctggagtttggatccaaaggctctggctaagtcattatgtcactttttcacaggaatgtaaatttgactgtcacctctgaatttgttcagtgtcccaccatggtctatgagaagtacactggaagcgtggggggaacacatgacatgatttgtgaatatcatcatctttgccagacaagtctccaggggatccctgtttcccaactgaaaggtgtgaacggacacacacacagcctggatgacgccttggctgttctaaggggctgtaaggtgggctctgggccttccagctaggctctcaagcacagcagaagcctcactgggctgctatgtctctgtatttgtggcttgtgtggtagcctcagaagcagagctgtttggcagactggctggagaaattccctctaggagacttgcctgtgctgtgcttccaggtcacagagccccccggaaactcacaggggccctcttcccagaaaagaatctattctatcacttcagaatcaggacactcaagctctggcagaggaaggccaagttactttcatggtcttaccctctgcttttcccctttttgcaaaaaaccactggccaaatccgaaccattgcccttgtttcccccacgttctctctcagatctttgtctcgaagggaaaacatagtggatgaaaaggtgtggcaggctttggcaccttgttaaaatttctagtcatctgtggatgttaccttgcttgtccacagcagccagtcaccctggccagtcccacttcctggataattctctaccctcaccccacagagccatctctctccagaccaaaagctggaaggagagttgctttgagagcttgtttttacaactgcatgtttattatgatactttctctccaaaggaaacttttaaatcaatgggaacaattagcaacagaaagagcacagtccctgcttttgactgggttcctattttaagcacaaatgagagctctggagccagaatgccagggttctaacttcagcattcacttactagctgtatgatcttggccaagtcacttcacctccctgagccccaattcccaagtttgtgaaatggcaacaatacctatgtgtcactggattattggttaaaacagaatgagattccttgtgtgaaaatagctattatacctgacacactcatcgtatgggctctgcaaagggatattccccaacctgtccttcctgacaggaagcatagggcactgcagatggggaagcatgtcaccttggcagtgactcggtggcttcccaagcaggagtgtcaggggaaccatgagagagagtctaggagcaaacacatcaccaccctgagcagatacaggagtggggagggggctgtaactcagtgagtggcttccaggggccccaggccctgctggatgtgggccaagccctacagcttccctaggcagtaagtaaaaacattctcctagcattaaaatggtttccataa

SEQ ID NO: 922 - DNA, 2546 bp, Homo sapiens
ggggaggcggctggcgattcctggggacgcctgggaaaggaagttccgggaccctccctgctctcggtcctcctccgcttcctgcctcatgcctcaccttgtccccagcgcctggactcccccttaactgcttgggaaatgtgacctttgctctggggggcctggccctgcaggccccaaccttccctcatctctggcggccctcttgggcctctgacccagcccctccccgggccaggctcacagaagctggcttctgggactgtcctgggcccaagtgggcacctgcgccagccccacctgtgcctgggctgtggccccttcctacagggcgctcaccatggccccgccgctcctgctgctgctgctggccagtggagcggccgcctgcccgctgccctgcgtctgccagaacctgtccgagtcgctcagcaccctctgtgcccaccgaggcctgctgtttgtgccgcccaacgtggaccggcgcacagtggagctgcggctggctgacaacttcatccaggccctggggccccctgacttccgcaacatgacgggactggtggacctgacactgtctcgcaatgccatcacccgcattggggcccgcgcctttggggacctcgagagcctgcgttccctccaccttgacggcaacaggctggtggagctgggcaccgggagcctccggggccccgtcaatctgcagcacctcatcctcagcggcaaccagctgggccgcatcgcgccgggagccttcgacgacttcctagagagcctggaggacctggacctgtcctacaacaacctccggcaggtgccctgggccggcatcggcgccatgcctgccctgcacaccctcaacctggaccataaccttattgacgcactgcccccaggcgccttcgcccagctcggtcagctctcccgcctggacctcacctccaaccgcctggccacgctggctccggacccgcttttctctcgtgggcgtgatgcagaggcctctcccgcccccctggtgctgagctttagcgggaaccccctgcactgcaactgtgagctgctgtggctgcggcggctggcgcggccggacgacctggaaacgtgcgcctccccgcccggcctggccggccgctacttctgggcagtgcccgagggcgagttctcctgtgagccgcccctcattgcccgccacacgcagcgcctctgggtgctggaaggccagcgggccacgctgcggtgccgggccctgggtgaccccgcgcctaccatgcactgggtcggtcctgacgaccggttggttggcaactcctcccgagcccgggctttccccaacgggaccttagagattggggtgaccggcgctggggacgctgggggctacacctgcatcgccaccaaccctgctggtgaggccacagcccgagtagaactgcgggtgctggccttgccccatggtgggaacagcagtgccgaggggggccgccccgggccctcggacatcgccgcctccgctcgcactgctgccgagggtgaggggacgctggagtctgagccagccgtgcaggtgacggaggtgaccgccacctcagggctggtgagctggggtcccgggcggccagccgacccagtgtggatgttccaaatccagtacaacagcagcgaagatgagaccctcatctaccggattgtcccagcctccagccaccacttcctgctgaagcacctcgtccccggcgctgactatgacctctgcctgctggccttgtcaccggccgctgggccctctgacctcacggccaccaggctgctgggctgtgcccatttctccacgctgccggcctcgcccctgtgccacgccctgcaggcccacgtgctgggcgggaccctgaccgtggccgtggggggtgtgctggtggctgccttactggtcttcactgtggccttgctggttcggggccggggggccggaaatggccgcctccccctcaagctcagccacgtccagtcccagaccaatggaggccccagccccacacccaaggcccacccgccgcggagccccccgccccggccgcagcgcagctgctctctggacctgggagatgccgggtgctacggttatgccaggcgcctgggaggagcttgggcccgacggagccactctgtgcatggggggctgctcggggcagggtgccggggggtaggaggcagcgccgagcggctggaagagagtgtggtgtgatggacgggcagcttcctgtgtgctccaagggatgagcctcgtggggcagagggcccggggccgccgcctggcctgggagtccctccctggtttttattctcagtacctcaggctcccctgtgtacttggaggggcagggagccctttcctcggttctggcctccagaccagggtaagggcaggcccctccaacaggtgctcacagccaccgaggcaggggctgcagccacccactgggagtcttgtttttatttataataaaattgttggggacacctcaaaaaaaaaaaaaaaaaaa

SEQ ID NO: 923 - DNA, 5644 bp, Homo sapiens
gctcccggaagcggcggccgcggcgcggagccgagcgggcgtccgtcgccggagctgcaatgagcggcgcccggaggctgtgacctgcgcgcggcggcccgaccggggcccctgaatggcggctcgctgaggcggcggcggcggcggcggcggctcaggctcctcggggcgtggcgtggcggtgaaggggtgatgctgttcaagctcctgcagagacagacctatacctgcctgtcccacaggtatgggctctacgtgtgcttcttgggcgtcgttgtcaccatcgtctccgccttccagttcggagaggtggttctggaatggagccgagatcaataccatgttttgtttgattcctatagagacaatattgctggaaagtcctttcagaatcggctttgtctgcccatgccgattgacgttgtttacacctgggtgaatggcacagatcttgaactactgaaggaactacagcaggtcagagaacagatggaggaggagcagaaagcaatgagagaaatccttgggaaaaacacaacggaacctactaagaagagtgagaagcagttagagtgtttgctaacacactgcattaaggtgccaatgcttgtcctggacccagccctgccagccaacatcaccctgaaggacctgccatctctttatccttcttttcattctgccagtgacattttcaatgttgcaaaaccaaaaaacccttctaccaatgtctcagttgttgtttttgacagtactaaggatgttgaagatgcccactctggactgcttaaaggaaatagcagacagacagtatggaggggctacttgacaacagataaagaagtccctggattagtgctaatgcaagatttggctttcctgagtggatttccaccaacattcaaggaaacaaatcaactaaaaacaaaattgccagaaaatctttcctctaaagtcaaactgttgcagttgtattcagaggccagtgtagcgcttctaaaactgaataaccccaaggattttcaagaattgaataagcaaactaagaagaacatgaccattgatggaaaagaactgaccataagtcctgcatatttattatgggatctgagcgccatcagccagtctaagcaggatgaagacatctctgccagtcgttttgaagataacgaagaactgaggtactcattgcgatctatcgagaggcatgcaccatgggttcggaatattttcattgtcaccaacgggcagattccatcctggctgaaccttgacaatcctcgagtgacaatagtaacacaccaggatgtttttcgaaatttgagccacttgcctacctttagttcacctgctattgaaagtcacattcatcgcatcgaagggctgtcccagaagtttatttacctaaatgatgatgtcatgtttgggaaggatgtctggccagatgatttttacagtcactccaaaggccagaaggtttatttgacatggcctgtgccaaactgtgccgagggctgcccaggttcctggattaaggatggctattgtgacaaggcttgtaataattcagcctgcgattgggatggtggggattgctctggaaacagtggagggagtcgctatattgcaggaggtggaggtactgggagtattggagttggacagccctggcagtttggtggaggaataaacagtgtctcttactgtaatcagggatgtgcgaattcctggctcgctgataagttctgtgaccaagcatgcaatgtcttgtcctgtgggtttgatgctggcgactgtgggcaagatcattttcatgaattgtataaagtgatccttctcccaaaccagactcactatattattccaaaaggtgaatgcctgccttatttcagctttgcagaagtagccaaaagaggagttgaaggtgcctatagtgacaatccaataattcgacatgcttctattgccaacaagtggaaaaccatccacctcataatgcacagtggaatgaatgccaccacaatacattttaatctcacgtttcaaaatacaaacgatgaagagttcaaaatgcagataacagtggaggtggacacaagggagggaccaaaactgaattctacagcccagaagggttacgaaaatttagttagtcccataacacttcttccagaggcggaaatcctttttgaggatattcccaaagaaaaacgcttcccgaagtttaagagacatgatgttaactcaacaaggagagcccaggaagaggtgaaaattcccctggtaaatatttcactccttccaaaagacgcccagttgagtctcaataccttggatttgcaactggaacatggagacatcactttgaaaggatacaatttgtccaagtcagccttgctgagatcatttctgatgaactcacagcatgctaaaataaaaaatcaagctataataacagatgaaacaaatgacagtttggtggctccacaggaaaaacaggttcataaaagcatcttgccaaacagcttaggagtgtctgaaagattgcagaggttgacttttcctgcagtgagtgtaaaagtgaatggtcatgaccagggtcagaatccacccctggacttggagaccacagcaagatttagagtggaaactcacacccaaaaaaccataggcggaaatgtgacaaaagaaaagcccccatctctgattgttccactggaaagccagatgacaaaagaaaagaaaatcacagggaaagaaaaagagaacagtagaatggaggaaaatgctgaaaatcacataggcgttactgaagtgttacttggaagaaagctgcagcattacacagatagttacttgggctttttgccatgggagaaaaaaaagtatttccaagatcttctcgacgaagaagagtcattgaagacacaattggcatacttcactgatagcaaaaatactgggaggcaactaaaagatacatttgcagattccctcagatatgtaaataaaattctaaatagcaagtttggattcacatcgcggaaagtccctgctcacatgcctcacatgattgaccggattgttatgcaagaactgcaagatatgttccctgaagaatttgacaagacgtcatttcacaaagtgcgccattctgaggatatgcagtttgccttctcttatttttattatctcatgagtgcagtgcagccactgaatatatctcaagtctttgatgaagttgatacagatcaatctggtgtcttgtctgacagagaaatccgaacactggctaccagaattcacgaactgccgttaagtttgcaggatttgacaggtctggaacacatgctaataaattgctcaaaaatgcttcctgctgatatcacgcagctaaataatattccaccaactcaggaatcctactatgatcccaacctgccaccggtcactaaaagtctagtaacaaactgtaaaccagtaactgacaaaatccacaaagcatataaggacaaaaacaaatataggtttgaaatcatgggagaagaagaaatcgcttttaaaatgattcgtaccaacgtttctcatgtggttggccagttggatgacataagaaaaaaccctaggaagtttgtttgcctgaatgacaacattgaccacaatcataaagatgctcagacagtgaaggctgttctcagggacttctatgaatccatgttccccataccttcccaatttgaactgccaagagagtatcgaaaccgtttccttcatatgcatgagctgcaggaatggagggcttatcgagacaaattgaagttttggacccattgtgtactagcaacattgattatgtttactatattctcattttttgctgagcagttaattgcacttaagcggaagatatttcccagaaggaggatacacaaagaagctagtcccaatcgaatcagagtatagaagatcttcatttgaaaaccatctacctcagcatttactgagcattttaaaactcagcttcacagagatgtctttgtgatgtgatgcttagcagtttggcccgaagaaggaaaatatccagtaccatgctgttttgtggcatgaatatagcccactgaccaggaattatttaaccaacccactgaaaacttgtgtgttgagcagctctgaactgattttacttttaaagaatttgctcatggacctgtcatcctttttataaaaaggctcactgacaagagacagctgttaatttcccacagcaatcattgcagactaactttattaggagaagcctatgccagctgggagtgattgctaagaggctccagtctttgcattccaaagccttttgctaaagttttgcactttttttttttcatttcccatttttaagtagttactaagttaactagttattcttgcttctgagtataacgaattgggatgtctaaacctatttttatagatgttatttaaataatgcagcaatatcacctcttattgacaatacctaaattatgagttttattaatatttaagactgtaaatggtcttaaaccactaactactgaagagctcaatgattgacatctgaaatgctttgtaattattgacttcagcccctaagaatgctatgatttcacgtgcaggtctaatttcaaagggctagagttagtactacttaccagatgtaattatgttttggaaatgtacatattcaaacagaagtgcctcattttagaaatgagtagtgctgatggcactggcacattacagtggtgtcttgtttaatactcattggtatattccagtagctatctctctcagttggtttttgatagaacagaggccagcaaactttctttgtaaaaggctggttagtaaattattgcaggccacctgtgtctttgtcatacattcttcttgctgttgtttagtttgttttttttcaaacaaccctctaaaaatgtaaaaaccatgtttagcttgcagctgtacaaaaactgcccaccagccagatgtgaccctcaggccatcatttgccaatcactgagaattagtttttgttgttgttgttgttgttgtttttgagacagagtctctctctgttgcccaggctggagtgcagtggcgcaatctcagctcactgcaacctccgcctcccgggttcaagcagttctgtctcagccttctgagtagctgggactacaggtgcatgccaccacaccctgctaatttttgtatttttagtagagacgggggttccaccatattggtcaggcttatcttgaactcctgacctcaggtgatccacctgcctctgcctcccaaagtgctgagattacaggcataagccagtgcacccagccgagaattagtatttttatgtatggttaaaccttggcgtctagccatattttatgtcataatacaatggatttgtgaagagcagattccatgagtaactctgacaggtattttagatcatgatctcaacaatattcttccaaaatggcatacatcttttgtacaaagaacttgaaatgtaaatactgtgtttgtgctgtaagagttgtgtatttcaaaaactgaaatctcataaaaagttaaatttttgtctgacaaaaaaaaaaaaaaa

SEQ ID NO: 924 - DNA, 2424 bp, Homo sapiens
aggaagaggaagagcgcggccggcggcgctgcgctgagagcaggggcccggccaaggcgagtgccgcgcgggccaccatggccacggacgagctggccaccaagctgagccggcggctgcagatggagggcgagggcggcggcgagaccccggagcagcccgggctgaacggggcagcggcggcggcggcgggggcacccgacgaggcggccgaggcgctgggcagcgcggactgcgagctgagcgccaagctgctgcggcgcgcagacctcaaccagggcatcggcgagccccagtcgcccagccgccgcgtcttcaacccctacaccgagttcaaggagttctccaggaagcagatcaaggacatggagaagatgttcaagcagtatgatgccgggcgggacggcttcatcgacctgatggagctaaaactcatgatggagaaacttggggcccctcagacccacctgggcctgaaaaacatgatcaaggaggtggatgaggactttgacagcaagctgagcttccgggagttcctcctgatcttccgcaaggcggcggccggggagcttcaggaggacagcgggctgtgcgtgctggcccgcctctctgagatcgacgtctccagtgagggtgtcaagggggccaagagcttctttgaggccaaggtccaggccatcaacgtgtccagccgcttcgaggaggagatcaaggcagagcaggaggaaaggaagaagcaggcggaggagatgaagcagcggaaagcggccttcaaggagctgcagtccacctttaagtagcgggggctgcagccgaccgccctgctccggccccagtgtggtgggcgagggtggcgcatgggaggccgagcctgaatccttgcctgtgtctgacgggaccactactaaaaacctaaaaatatctgtgaatggagcaagttcaggggtcttatggaggtggcccggcccctccccgctcccttccactctgcacgaggccgccacaccggcgctggctccctgcccggcccggccctccctggcaatccctgggctctcttgcacccctaactgccccctgcctgctccggcactgccccaggcccagctcctggccctaggtccctcccagccccatgtgcctgccgcctgccctccacacatccctgtccccccaacccgggaacccctgccctcctccagcaggccgcaccgcccctggggccccctgccagccccttcccaggctgggagacggcagaagagatagaatcagggctgcccccacagagtgggacccaaggggctaattggaggcacgaggggacccctccccagggccttttcctcctctgcgtcttccatctactgaaatgggagagggggtggggagcttctgttctggtgaagggacccgggcaggcccccagcaccccatgctgacttggagaaccccagatctctggggcccagccaggcagggtgtgggggcagctgtgccaatctacctcacaggcccaccccctgccgggcatgccgtgggatcatgggcagggaaggctctgggggtcggagacaccgctgcttagcacccccagccagaacaccctgagggtctcggggctctggagagagtggggcgggaggaagaattggcaccttcctagggaaggagacgagcgcttcgccttgattctccgagaagcctccgagaagtgctttaagtgtgtttgcatgcgccaggcggtgggcagcgggggcctgtccagccctctcccgccatccttccccaagtgacgtccactgccttgtcaccagcgacctgcctgtcatgcccaccccctgaggaagcatggggaccctaacaccctggtgccctgcaccagacaggccgtggtcaggcccaggccaccggccgggttctgccacagcttcccacgtgcttgctgacatgcgtgtgcctgtgtgtggtgtctgttgctgtgtcgtgaaactgtgaccatcactcagtccaaacaagtgagtggccctcgaggccacagttatgcaactttcagtgtgtgtcataacgacgtcactgctttttaaactcgataactctttattttagtaaaatgcccaggagtcctggaagctacgcggacttgcagaggttttattttttggccttagaatctgcagaaattaggaggcaccgagcccagcgcagcagcctcggacccggattgcgtttgccttagcggatatgtttatacagatgaatataaaatgtttttttctttgggctttttgcttcttttttcccccccttctcaccttcccttctccccgaccccaccccccaaaaaagctacttcttcattccgtggtacgattattttttttaactaaaggaagataaaattctatattcttatgtgaaaaa

SEQ ID NO: 925 - DNA, 1991 bp, Homo sapiens
gccgagcggagaggccgcccattggccggccagcgccacgtggccgcccccgccggtatattaggccactatttacctccggctcactcgccatgggttggagagggcagctcgggtagagagggctggcggagcggcgcagacggcggcagtcctgctcagcctctgcccggctccgtactccggccccggcctgcgccctcagaaaggtggggcccgaaccatgagctcctacctggagtacgtgtcatgcagcagcagcggcggggtcggcggcgacgtgctcagcttggcacccaagttctgccgctccgacgcccggcccgtggctctgcagcccgccttccctctgggcaacggcgacggcgccttcgtcagctgtctgcccctggccgccgcccgaccctcgccttcgcccccggccgcccccgcgcggccgtccgtaccgcctccggccgcgccccagtacgcgcagtgcaccctggagggggcctacgaacctggtgccgcacctgccgcggcagctgggggcgcggactacggcttcctggggtccgggccggcgtacgacttcccgggcgtgctggggcgggcggccgacgacggcgggtctcacgtccactacgccacctcggccgtcttctcgggcggcggctctttcctcctcagcggccaggtggattacgcggccttcggcgaacccggcccttttccggcttgtctcaaagcgtcagccgacggccaccctggtgctttccagaccgcatccccggccccaggcacctaccccaagtccgtctctcccgcctccggcctccctgccgccttcagcacgttcgagtggatgaaagtgaagaggaatgcctctaagaaaggcaaactcgccgagtatggggccgctagcccctccagcgcgatccgcacgaatttcagcaccaagcaactgacagaactggaaaaagagtttcatttcaataagtacttaactcgagcccggcgcatcgagatagccaactgcttgcacctgaatgacacgcaagtcaaaatctggttccagaaccgcaggatgaaacagaagaaaagggaacgagaagggcttctggccacggccattcctgtggctcccctccaacttcccctctctggaacaacccccactaagtttatcaagaaccccggcagcccttctcagtcccaagagccttcgtgaggccggtacttggggccgaaaaactgtggcctgcagaagtcccaggcgacccccatccctatctagacttaggagctcagtttgggatggaggtgggagaacaaaaatgaatagggatttcacttgggaaatgaagtactttagttggcttccgagttccagactatatgtccagatattaattgactgtcttgtaagccacttgtttggttatgatttgtgtcttatcagggaaaaggtgcccagctgccagcccagctccgctgctatctttgcctcacttagtcatgtgcaattcgcgttgcagagtggcagaccattagttgctgagttctgtcagcactctgatgtgctcagaagagcacctgcccaaagtttttctggttttaatttaaaggacaaggctacatatattcagctttttgagatgaccaaagctagttagggtctccttgatgtagctaagctgcttcagtgatcttcacatttgcactccagtttttttttctttaaaaaagcggtttctacctctctatgtgcctgagtgatgatacaatcgctgtttagttactagatgaacaaatccacagaatgggtaaagagtagaatctgaactatatcttgacaaatattattcaaacttgaatgtaaatatatacagtatgtatattttttaaaaagatttgcttgcaatgaccttataagtgacatttaatgtcatagcatgtaaagggttttttttgtaataaaaattatagaatctgcaaaaaaaaaaaaaaaa

SEQ ID NO: 926 - DNA, 3982 bp, Homo sapiens
cgcggcggcggcagcggcggcggctacaccgggcttggccccctccctcctccgttcccccctcctcccccctcccctcagcggtggctcccaagaagtccgagacacgcggatcaactcactatcctgaaggtccattctcccaagaagaggggacagaaagacagatctatttgtaagaaaggcttgggtatcccatgaacgagccaacagaaaaccgattggggtgcagcaggactccagagccagatataaggctcagaaaagggcaccaactggatggtacacgaagaggtgataatgacagccaccaaggagatttggagcccattttagaggcatctgttctatcttcccatcataaaaaaagctctgaggaacatgaatacagtgatgaagctcctcaggaagatgagggctttatgggcatgtcccctctcttacaagcccatcatgctatggaaaaaatggaagaatttgtttgtaaggtatgggaaggtcggtggcgagtgatccctcatgatgtactaccagactggctcaaggataatgacttcctcttgcatggacaccggcctcctatgccttctttccgggcctgttttaagagcattttcagaatacacacagaaacaggcaacatttggacacatctcttaggttgtgtattcttcctgtgcctggggatcttttatatgtttcgcccaaatatctcctttgtggcccctctgcaagagaaggtggtctttggattatttttcttaggagccattctctgcctttctttttcatggctcttccacacagtctactgccactcagagggggtctctcggctcttctctaaactggattactctggtattgctcttctgattatgggaagttttgttccttggctttattattctttctactgtaatccacaaccttgcttcatctacttgattgtcatctgtgtgctgggcattgcagccattatagtctcccagtgggacatgtttgccacccctcagtatcggggagtaagagcaggagtgtttttgggcctaggcctgagtggaatcattcctaccttgcactatgtcatctcggaggggttccttaaggccgccaccatagggcagataggctggttgatgctgatggccagcctctacatcacaggagctgccctgtatgctgcccggatccccgaacgctttttccctggcaaatgtgacatctggtttcactctcatcagctgtttcatatctttgtggttgctggagcttttgttcacttccatggtgtctcaaacctccaggagtttcgtttcatgatcggcgggggctgcagtgaagaggatgcactgtgatacctaccagtctccagggactatgaccctaaaccagggcctgcggcacttgcgggcctccctgctggctactgatgccagtaccagaggagccccaaaactttgacagcctcgtgggctttgtgacggcccaggggctctgcgtggtacatgactgagaagagaaaaacaaaaataaatcatacctcaaaggatggagtgcatcaattgggagaaaaggagacatagcccaaaccctggcttattcttgggatctactgattgcgggctctgcaagacccttggcaaactggcttctgatccatatcatatttatttgtagaagatggcgaaacagtttagctggtggttctttcttctccctttctctctctctatgacaataatacaaaccaatttaagtgaacatttatatccgataaggggtgggagtgtgattttaaatgctcttttgggagaacaaagaaattaatgtaaataagatttctaactgtttaaataagactttatataaatgtttaaaacataggggtaagggagggagggagaatttttgtatagaatgaaacatgcaagtaccacacactgtttgaattttgcacaaaaagtgactgtaggatcaggtgatagccccggaatgtacagtgtcttggtgcaccaagatgccttctaaaggctgacataccttggaccctaatggggcagagagtatagccctagcccagtggtgacatgaccactccctttgggaggcctgaggtagaggggagtggtatgtgttttctcagtggaagcagcacatgagtgggtgacaggatgttagataaaggctctagttagggtgtcattgtcatttgagagactgacacactcctagcagctggtaaaggggtgctggaggccatggaggagctctagaaacattagcatgggctgatctgattacttcctggcatcccgctcacttttatgggaagtcttattagagggatgggacagttttccatatccttgctgtggagctctggaacactctctaaatttccctctattaaaaatcactgccctaactacacttcctccttgagggaatagaaatggacctttctctgacatagttcttggcatgggagccagccacaaatgagattctgacgtgtccaggtttctcctgagctcatctacatagattggtagacccttcctttggattaggaaagatgagttttacctctggtacactgtcttggtaagcctggatgtgacagacacctcggctctccttgaataagaaagccagcagaactcttaaagccagttgtagtacggagttgtcagcactcactgaacctcactttacagggataagagtggtgtggcattttaaatacaatggtatgttattgccagggagtgaggtacaagacgatggctcatgtcacaggcctacctgatacggtgtcagagaaagtggtggggaaaggatctggttcatggaattctgatcttggcccataggtgaaccaccaaaatagtgctcgagtcttaggttactgtcatcaaagacttgggatgactccattatatcctggggttgtgggtattagaactaaatatggaggtcctgagcatggggactggcgtcctcagtaggtgtttgggaatatgggaagggtctcctatttattcaatagagttttctcagttattttcctcccttgcccttgcaatctccagcaaaaggtgggatctaggaagaaagaatccagtgtagaagttgagaagaacttgaacgttttggttctggataaggtcactgtcctaggtgctaggtggaccgagcaaaagactcagtggatgaactggtgcagtgcctgacagaataaagaacagtattaatccctttgagaaagcatagtccagcaggacagtggccatttggacagaagcccacttagtttcttgggagcaacagcacgtatcagaagccagacttgctcttcggtcatgcactttgggatacagcgtataggtgcagccctgtcacaacaccaacagaagtagcagcctctgggtgcagtcacccacaccccaaagctggaaggatctggttcaacatagcacaaacccttaggaaaaatgaaattaacatcactgatgtgtaatccagtaaaatctccctttttcgggtgtgtatgtgggcatgtgcccatttctatgtgtgtgtctacgtgcagctcactaccaacagcctcatgtgcacttgacctgacagtgctcgctgagaactctcaccaggttggcgcctgaatgccttactctcagcagtcagaggcttgcttgctctgtgcagatttttaattttcttttttggccctaggctggttgggacctctacagcttcattctttcaccattaaatagtggcctttttcagtattttccctcttcccctttataaattatgctaaagccacaaagcacatttttggggatcatagaaggttggggttccagaaaggcatctgtgtgatggttccattgatgtgggatttccctacttgctgtattctcagtttctaataaaaagaaccaaatgaaatatgaaaaaaaaaaaaaaaaaa

SEQ ID NO: 927 - DNA, 3274 bp, Homo sapiens
ccgggagcctgcgagccgcggcgggacccgagcgcacgcaggggcgcggcgacggcgggggctagtcgggctgcggaggcggccgtcgggagtgcggagcgcctcggacgagggtccaaccgccggcaggcaccagagggcacggctggctcggcactgggaggggcccggcgctcgcagccccccacgcccagagaggatgcggtgcgccctgagagccgggtagcctcggatagcggcgctgcgtacgcgatgatggatgagccgtggtgggaagggcgcgtcgcctcggacgtccactgcaccctgcgcgagaaggaactgaagctgcccaccttccgagcccactccccactcctgaagagccgccggttcttcgtggacatcctgaccctgctgagcagccactgccagctctgccctgcagcccggcacctggccgtctacctgctggaccacttcatggatcgctacaacgtcaccacctccaagcagctctacaccgtggccgtctcctgcctcctgcttgcaaacggagtttcgctcttatcgcccaggctgaagtgcagtggcatgatctcagctcattgcaacctccacctcccaggttcaagcaattctcctgcttcagcgccccaccccccacccacaccgccccaagtagctgagactacaggtaagttcgaggatcgggaagaccacgtccccaagttggagcaaataaacagcacgaggatcctgagcagccagaacttcaccctcaccaagaaggagctgctgagcacagagctgctgctcctggaggccttcagctggaacctctgcctgcccacgcctgcccacttcctggactactacctcttggcctccgtcagccagaaggaccaccactgccacacctggcccaccacctgcccccgcaagaccaaagagtgcctcaaggagtatgcccattacttcctagaggtcaccctgcaagatcacatattctacaaattccagccttctgtggtcgctgcggcctgtgttggggcctccaggatttgcctgcagctttctccctactggaccagagacctgcagaggatctcaagctattccctggagcacctcagcacgtgtattgaaatcctgctggtagtgtatgacaacgtcctcaaggatgccgtagccgtcaagagccaggccttggcaatggtgcccggcacaccccccacccccactcaagtgctgttccagccaccagcctacccggccctcggccagccagcgaccaccctggcacagttccagacccccgtgcaggacctatgcttggcctatcgggactccttgcaggcccaccgttcagggagcctgctctcggggagtacaggctcatccctccacaccccgtaccaaccgctgcagcccttggatatgtgtcccgtgcccgtccctgcatcccttagcatgcatatggccattgcagctgagcccaggcactgcctcgccaccacctatggaagcagctacttcagtgggagccacatgttccccaccggctgctttgacagataggccacctccagacctcacgaggaagccttggagatgtgggcagaggaagaggacactgaagaggagagctcagccaagtgaggcagcaggaggccatccctgaagagccttggaacgtggagggtctgtgctccttttaaataaaactgacccagagcaaaacattcaataacatacctcacccgagagcattcctctgagaaacgtctgccacgtgtggctagggtacaaaaggatggcttggtggccgtccccccacacaggggcccagtgaatcgagaaagacttgataagaggccaggagagtgggaactggacacagaccactgatctcaagcatgtccagtttttagcattaaagacttttctattctttgctgatggcagctacaccgctgaaaaaggaggggcagcctggcgtgttctcaggacccccggaggatcccatattgggtgcttttctttccctggctctatgcagaggggcctgagttggtgtgtatgcctgagtgtttgccttgcgaggcacagtgggtggctgtcttgcctttgttttcgaacctaaaaccattttcagccttttagatatgtcatgtgctgctgcttcccgaagtggtcttgctttctgtttcgtaagatgtcttgtttacacactgtatcagggatttggtgatacttgaaaattcctttggagaaaaaaacaaatttaattgccacactgcctgtcccacatgagggctgttaatttggaacccaagtttgaacccaacttgtgatggacccgcaggtaaccacagagcttcctttttgaaggcatatggttggagagaaccattttcccagctctcggttccggaagattccacgtcttggaggctgtgttcaccactagaactttaataactacccagggagggagaagctcgttgaaaggaagacaaagatttaaacagttcccacctctctccaccacatacttacagggcatgagtttaacccagtctaggctttgagtgtggctgatagcgaaggatagcaatgtggaaaatttgcttagtcccacctgtatttggggagtgggatgtacatgggcgtttgataccaccattgataggcaagcgactggttggatcaaaagccagtatttagggatctgcagcgagagggccctcaggaagactcttgtaaccatgtgcaatatgtttttattctgactcgcagcttgtgctcagcatgttctttggtttagtttggggttgggggacacattgttcacccagcagaactgggaggtgcaaaggaccgtggaagcaatttttgttttgtttgaggaatacctgtcttggattccttagccccttgccagtcctggagactgtggcaggggccgccaggaaggcagctgtctgctgctgagtcagatcggaaggtggtgaatctttccagagcagctgaaaatctcagcatggagacagtaagaaaagagacggggtgtggataagactctgccaccgtgtcacactagcataggaggctgcacgttcatttgttgttgtttttttttcctttgccaacctccgttctatttatgtgcaagcagtttggattcaagttcttgtatctgtctgttctgggacctggggattgtgagggttccctcacagccagcacgacccccagaaagaggcgtcccacaataaacacgtcacctgct

SEQ ID NO: 928 - DNA, 4089 bp, Homo sapiens
ccgcgtcaccgacgtcccgctaggctgagaccggtgcgccgcgcgctagtggccgctcttccgcgggctagcgggcggtgggggcgccagcagcgcggaaggcgggcacgcgggccatggctccctgggcggaggccgagcactcggcgctgaacccgctgcgcgcggtgtggctcacgctgaccgccgccttcctgctgaccctactgctgcagctcctgccgcccggcctgctcccgggctgcgcgatcttccaggacctgatccgctatgggaaaaccaagtgtggggagccgtcgcgccccgccgcctgccgagcctttgatgtccccaagagatatttttcccacttttatatcatctcagtgctgtggaatggcttcctgctttggtgccttactcaatctctgttcctgggagcaccttttccaagctggcttcatggtttgctcagaattctcggggcggcacagttccagggaggggagctggcactgtctgcattcttagtgctagtatttctgtggctgcacagcttacgaagactcttcgagtgcctctacgtcagtgtcttctccaatgtcatgattcacgtcgtgcagtactgttttggacttgtctattatgtccttgttggcctaactgtgctgagccaagtgccaatggatggcaggaatgcctacataacagggaaaaatctattgatgcaagcacggtggttccatattcttgggatgatgatgttcatctggtcatctgcccatcagtataagtgccatgttattctcggcaatctcaggaaaaataaagcaggagtggtcattcactgtaaccacaggatcccatttggagactggtttgaatatgtttcttcccctaactacttagcagagctgatgatctacgtttccatggccgtcacctttgggttccacaacttaacttggtggctagtggtgacaaatgtcttctttaatcaggccctgtctgcctttctcagccaccaattctacaaaagcaaatttgtctcttacccgaagcataggaaagctttcctaccatttttgttttaagttaacctcagtcatgaagaatgcaaaccaggtgatggtttcaatgcctaaggacagtgaagtctggagcccaaagtacagtttcagcaaagctgtttgaaactctccattccatttctataccccacaagttttcactgaatgagcatggcagtgccactcaagaaaatgaatctccaaagtatcttcaaagaataaatactaatggcagatctgcgatttctgggtccactttctgagatgctttctaaaaccaaccaactgataaaaagtagatgagacttctccaagctgcttcacaagcaaactaaccgaaaaaccgaaaatatacaaacagcttcacacacacacacacacacacacacacacacacacacacacaaaggaagatcatcaatggctgcggtagcctagtaggaatggactatataataatatagcaggtgctcaataactgtttgttgcatttcagtaaaagcagaataacctttcaaaataataacaggctgggtgcaatggctcacacctgttaatcccagcacttcgggaggccaaggtgggcagttcgcttgggcccaagagttcgagaccagcctgggcaacatggtgaaaccctatctccgtgaaaaaatatgaaaattagccaagagtggtggcacatgcctgtagtcccagatacttgggagtgggctgagatgggagaatcgcttgagcccaggaggtcaagggtacagtgagccgaggtcatgccactgcactccagcctggcctgggcaacagagcaagaccctgtctcaaaataataataatatataattttacaccaaaagtttcaggaaaaaacgagtttgttggagttagtttatactttcacatatcaccacaaagatctccagttaaataactatcaatatccatttccattcatctccccctcaaatcatagcctaacagaacactttgaaagctcttttatttaatatttttttacatcctttgaagggagtgcttcaaaaatgaaagcatcagaagataaaatatttttatatttatgcatagcaagccttcgtgaacggaagtgacacactctggattgaataatactgtagcctcattcatatgtagttattcaaattggattaatgtctgtgtgagtttatttgaactagcagaaagtatctgaagatattcaggaataaagtttatacttaaaatagcttatgttaaagaaaatacctgtgattaattcagagggaaataaatgcatggtataaaagaaaaccaaaaacttaaaaaataatactatagcctgagcaacacattaaaactgcacacttgtgcagcgtaagattctctggcttattggctgaggtgttaagtttattccttttatgaagatgtcctattacagtcagctaagcactaaagctttgcatttatatgtactttgctatgggggaaagaaccttatgattaataagacacatatcaaatgcatagtcaatcattcccacccccatccctggagctgtaacccaaaactgttaaactaagattcctttgttttttttgtttttttgagatggagtctcactctgtcgcccagactggagtgcagtggtgggatcctggctcactgcaacctccgccttctgggttccagcgattctcctctgcctcagcctcccaagtagctgggattacaggcacatgccaccatgcccaggtaattgttgtatttttagtagagatagagtttcaccatgttggccaggctggtctcaaactcctgacctcaggtgatccacctgcttcggcctcccaaagtgctgggattacaggtgtaagtcactgctcccggatgcatgtcaagcacattggaaagttcttacaacaattctgatggaggattttctctcccatcaaccaaacaccacttaagattaacctgtggctcagtctacttaaataaatgccatatttattttacttatcatttagaatttgccattctcaggaacaaaactttttgtacattggaaatggaaaacattgcagtttggtcttaatttccacatgaatatcaagtgtaatttttaataaattatttggagaaaaatgtattttattttagcatgcaattttatgcccaggttagactagagatttggctgatgttctggaatctcattgtactcttaagtaaaataacgagcatcccatgacgcaccctgtcaggggttgtgagaaagctgcagtgtccagtttcccacccctgtttcctgctgtctctctcccactcatccctgtttcttactcatcccttttccttctttgcccaaacatcatatttctaggcaaagataagagaggagatagtgatgtcctgaaaggggttcagaacaacgtagcatggcctttggtgaaagcgtcaccgatgggaaataattgagaattgtgcagtgcttgcagcgtcagaatcagcactgttttttgtgttggtgaaaatattccatgtgcgtaaagggagagcatcagggactttgcaaattcttcacaaggacccagaaatagcttaaagattcatggttttcctgttggcttaaatagccttaatctttcattttctactaccattaagtcggggaaatgacattgaactacctcattagcagccttcccttgattaactactgactaaaagtgtgctgaaaatggcctttgtttttgtgaagctcatcctatacactaacatttgcttaaccatggattattttgtctctacaaagctgtgccctgtattcgatttttacttcaatgagtggttattgctagaattcctacaaaaaaaaaaaaaaccgttgcagatatttttgtatgtagcttaatagatatttagtttaaggagactgcaacatttgcataaggtgcctaaaaactcaagaaccattgataagtgagatcactcaaaatgagctgatatattaaagaagaccttaaaacagtaaaaaaaaaa

SEQ ID NO: 929 - DNA, 4038 bp, Homo sapiens
aaagcccgcctttcgtgacaaataaaggtcgtagccgcagagtcaacgggcggagctaaagtggtcgtgattcatgctgtcgcgggaaccccgaaggtggggccccacgtaacaagaagatgacccgaagttgctccgcagtgggctgcagcacccgtgacaccgtgctcagccgggagcgcggcctctccttccaccaatttccaactgataccatacagcgctcaaaatggatcagggctgttaatcgtgtggaccccagaagcaaaaagatttggattccaggaccaggtgctatactgtgttccaaacattttcaagaaagtgactttgagtcatatggcataagaagaaagctgaaaaaaggagctgtgccttctgtttctctatacaagattcctcaaggtgtacatcttaaaggtaaagcaagacaaaaaatcctaaaacaacctcttccagacaattctcaagaagttgctactgaggaccataactatagtttaaagacacctttgacgataggtgcagagaaactggctgaggtgcaacaaatgttacaagtgtccaaaaaaagacttatctccgtaaagaactacaggatgatcaagaagagaaagggtttacgattaattgatgcacttgtagaagagaaactactttctgaagaaacagagtgtctgctacgagctcaattttcagattttaagtgggagttatataattggagagaaacagatgagtactccgcagaaatgaaacaatttgcatgtacactctacttgtgcagtagcaaagtctatgattatgtaagaaagattcttaagctgcctcattcttccatcctcagaacgtggttatccaaatgccaacccagtccaggtttcaacagcaacattttttcttttcttcaacgaagagtagagaatggagatcagctctatcaatactgttcattgttaataaaaagtatgcctctcaagcaacagcttcagtgggatcctagcagtcacagtttgcaggggtttatggactttggtcttggaaaacttgatgctgatgaaacgccacttgcttcagaaactgttttgttaatggcagtgggtatttttggccattggagaacacctcttggttatttttttgtaaacagagcatctggatatttgcaggctcagctgcttcgtctgactattggtaaactgagtgacataggaatcacagttctggctgttacatctgatgccacagcacatagtgttcagatggcaaaagcattggggatacatattgatggagacgacatgaaatgtacatttcagcatccttcatcttctagtcaacagattgcatacttctttgactcttgccacttgctaagattaataagaaatgcatttcagaattttcaaagcattcagtttattaatggtatagcacattggcagcacctcgtggagttagtagcactggaggaacaggaattatcaaatatggaaagaataccaagtacacttgcaaatttgaaaaatcatgtactgaaagtgaatagtgccacccaactctttagtgagagtgtagccagtgcattagaatatttgttatccttagacctgccaccttttcaaaactgtattggtaccatccattttttacgtttaattaacaatctgtttgacatctttaatagtaggaactgttatggaaagggacttaaagggcctctgttgcctgaaacttacagtaaaataaaccacgtgttaattgaagccaagactatttttgttacattatctgacactagcaataatcaaataattaaaggtaagcaaaaactaggattcctgggatttttgctcaatgctgagagcttaaaatggctctaccaaaattatgttttcccaaaggtcatgccttttccttatcttctgacttacaaattcagtcatgatcatctggaattatttctaaagatgcttaggcaggtattagtaacaagttctagccctacctgcatggcattccagaaagcttactataatttggagaccagatacaaatttcaagatgaagtttttctaagcaaagtaagcatctttgacatttcaattgctcgaaggaaagacttggcgctttggacagttcaacgtcagtatggtgtcagcgttacaaagactgtctttcacgaagagggtatttgtcaagactggtctcattgttcactaagtgaggcattactagacctgtcagatcataggcgaaatctcatctgttatgctggttatgttgcaaacaagttatcagctcttttaacttgtgaggactgcatcactgcactgtatgcatcggatctcaaagcctctaaaattgggtcactattatttgttaaaaagaagaatggtttgcattttccttcagaaagtctgtgtcgggtcataaatatttgtgagcgagttgtaagaacccattcaagaatggcaatttttgaactagtttctaaacaaagggaattgtatcttcaacagaaaatattatgtgagctttctgggcatattaatctttttgtagatgtgaataagcatctctttgatggagaagtgtgtgccatcaatcactttgtcaagttgctaaaggatataataatctgtttcttaaatatcagagctaaaaatgttgcacagaatcctttaaaacatcattcagagagaactgatatgaaaactttatcaaggaaacactggtcatctgtacaggattataaatgttcaagttttgctaataccagtagtaaattcaggcatttgctaagtaacgatggatatccattcaaatgagagacctaaaatatattaacattttaattaagaatacttgatcaacattttttgaagttcaatttaccatattttataaattgcgcattctgcacagtggacaagtttgcaattctgacttattaaaatttcaaattctgcatatcacaaaatctccttatacttttggtatggcttgcagcatttatgagttttccaaaatatagaaagcagtaggtcagtaggagcaaactagccaacaggtactgtctttgaatttactactgtaagactaagcagtgttactggacacagttttaacttgttcaatctgcttcaaaaacaagaaaaacaacaactatgagttatcaaaatattgactccatttatgactagactacatttctgaaagatctttggtttatgattcttaagaatattgacaatacctataaaactttgaagataacttttacttaaatatgaaaattatagtttgaaaattaggctcaagcaaatatcaaatactgcaaaaatccccttgtcccaggataccctaaaatagaagtgcttaaactttgtcaggcagaaggtaaagtacatgagccatgagattcttccttgtgctgcagccacgctggggagtgcaatctggaaagaacatacctaatgtgtttttcaccatccattatctctgaactttgaaatattacttttgaataataggctggacacttagtttgacttgaaagagctcaatgctcatcggaaaacagggagaaacctaatctgaagatggaagcatactaaggacaattttctccactcacatccacatttgaaaagagggacagaaaaacataggtaactctactttcacaaatgaggatagtttaacggatagaagaaacaagcacattattcacctgtgttgtaaaacatctactcttttttgtcactgaataagtgttcccaaagtacagttaatcctaatatgaaaacttagaattgtaaaagattaatgataacgtaaaagtatattgattaaaattccccttacaaagtatattttgatgtttgtttattctacctcaaacagaggcttaagttttgaagtgtaaccagtttatacttcattttatacaaaacttattgctgagaagtctgaatattgtgctttttgttgtttgtaaatagaattgaatttaaatacaccaggataaatctt

SEQ ID NO: 930 - DNA, 4014 bp, Homo sapiens
gtgcgggggaagatgtagcagcttcttctccgaaccaaccctttgccttcggacttctccggggccagcagccgcccgaccaggggcccggggccacgggctcagccgacgaccatgggctccgtgtccaaccagcagtttgcaggtggctgcgccaaggcggcagaagaggcgcccgaggaggcgccggaggacgcggcccgggcggcggacgagcctcagctgctgcacggtgcgggcatctgtaagtggttcaacgtgcgcatggggttcggcttcctgtccatgaccgcccgcgccggggtcgcgctcgaccccccagtggatgtctttgtgcaccagagtaagctgcacatggaagggttccggagcttgaaggagggtgaggcagtggagttcacctttaagaagtcagccaagggtctggaatccatccgtgtcaccggacctggtggagtattctgtattgggagtgagaggcggccaaaaggaaagagcatgcagaagcgcagatcaaaaggagacaggtgctacaactgtggaggtctagatcatcatgccaaggaatgcaagctgccaccccagcccaagaagtgccacttctgccagagcatcagccatatggtagcctcatgtccgctgaaggcccagcagggccctagtgcacagggaaagccaacctactttcgagaggaagaagaagaaatccacagccctaccctgctcccggaggcacagaattgagccacaatgggtgggggctattcttttgctatcaggaagttttgaggagcaggcagagtggagaaagtgggaatagggtgcattggggctagttggcactgccatgtatctcaggcttgggttcacaccatcaccctttcttccctctaggtggggggaaagggtgagtcaaaggaactccaaccatgctctgtccaaatgcaagtgagggttctgggggcaaccaggaggggggaatcaccctacaacctgcatactttgagtctccatccccagaatttccagcttttgaaagtggcctggatagggaagttgttttccttttaaagaaggatatataataattcccatgccagagtgaaatgattaagtataagaccagattcatggagccaagccactacattctgtggaaggagatctctcaggagtaagcattgtttttttttcacatcttgtatcctcatacccacttttgggatagggtgctggcagctgtcccaagcaatgggtaatgatgatggcaaaaagggtgtttgggggaacagctgcagacctgctgctctatgctcacccccgccccattctgggccaatgtgattttatttatttgctcccttggatactgcaccttgggtcccactttctccaggatgccaactgcactagctgtgtgcgaatgacgtatcttgtgcattttaactttttttccttaatataaatattctggttttgtatttttgtatattttaatctaaggccctcatttcctgcactgtgttctcaggtacatgagcaatctcagggatagccagcagcagctccaggtctgcgcagcaggaattactttttgttgtttttgccaccgtggagagcaactatttggagtgcacagcctattgaactacctcatttttgccaataagagctggcttttctgccatagtgtcctcttgaaaccccctctgccttgaaaatgttttatgggagactaggttttaactgggtggccccatgacttgattgccttctactggaagattgggaattagtctaaacaggaaatggtggtacacagaggctaggagaggctgggcccggtgaaaaggccagagagcaagccaagattaggtgagggttgtctaatcctatggcacaggacgtgctttacatctccagatctgttcttcaccagattaggttaggcctaccatgtgccacagggtgtgtgtgtgtttgtaaaactagagttgctaaggataagtttaaagaccaatacccctgtacttaatcctgtgctgtcgagggatggatatatgaagtaaggtgagatccttaacctttcaaaattttcgggttccagggagacacacaagcgagggttttgtggtgcctggagcctgtgtcctgccctgctacagtagtgattaatagtgtcatggtagctaaaggagaaaaagggggtttcgtttacacgctgtgagatcaccgcaaacctaccttactgtgttgaaacgggacaaatgcaatagaacgcattgggtggtgtgtgtctgatcctgggttcttgtctcccctaaatgctgccccccaagttactgtatttgtctgggctttgtaggacttcactacgttgattgctaggtggcctagtttgtgtaaatataatgtattggtctttctccgtgttctttgggggttttgtttacaaacttctttttgtattgagagaaaaatagccaaagcatctttgacagaaggttctgcaccaggcaaaaagatctgaaacattagtttggggggccctcttcttaaagtggggatcttgaaccatcctttcttttgtattccccttcccctattacctattagaccagatcttctgtcctaaaaacttgtcttctaccctgccctcttttctgttcacccccaaaagaaaacttacacacccacacacatacacatttcatgcttggagtgtctccacaactcttaaatgatgtatgcaaaaatactgaagctaggaaaaccctccatcccttgttcccaacctcctaagtcaagaccattaccatttctttctttcttttttttttttttttaaaatggagtctcactgtgtcacccaggctggagtgcagtggcatgatcggctcactgcagcctctgcctcttgggttcaagtgattctcctgcctcagcctcctgagtagctgggatttcaggcacccgccacactcagctaatttttgtatttttagtagagacggggtttcaccatgttgtccaggctggtctggaactcctgacctcaggtgatctgcccaccttggcttcccaaagtgctgggattacaggcatgagccaccatgctgggccaaccatttcttggtgtattcatgccaaacacttaagacactgctgtagcccaggcgcggtggctcacacctgtaatcccagcactttggaaggctgaggcgggcggatcacaaggtcacgagttcaaaactatcctggccaacacagtgaaaccccgtctctactaaaatacaaaaaaattagccgggtgtggtggtgcatgcctttagtcctagctattcaggaggctgaggcaggggaatcgcttgaacccgagaggcagaggttgcagtgagctgagatcgcaccactgcactccagcctggttacagagcaagactctgtctcaaacaaaacaaaacaaaacaaaaacacactactgtattttggatggatcaaacctccttaattttaatttctaatcctaaagtaaagagatgcaattgggggccttccatgtagaaagtggggtcaggaggccaagaaagggaatatgaatgtatatccaagtcactcaggaacttttatgcaggtgctagaaactttatgtcaaagtggccacaagattgtttaataggagacgaacgaatgtaactccatgtttactgctaaaaaccaaagctttgtgtaaaatcttgaatttatggggcgggagggtaggaaagcctgtacctgtctgtttttttcctgatccttttccctcattcctgaactgcaggagactgagcccctttgggctttggtgaccccatcactggggtgtgtttatttgatggttgattttgctgtactgggtacttcctttcccattttctaatcattttttaacacaagctgactcttcccttcccttctcctttccctgggaaaatacaatgaataaataaagacttattggtacgcaaactgtca

SEQ ID NO: 931 - DNA, 1707 bp, Homo sapiens
gaggatgcagacgccgcggccggcgatgaggatggaggccggggaggcagcgccgccggcgggggcgggcggccgcgccgcaggcggctggggcaagtgggtgcggctcaacgtggggggcacggtgttcctgaccacccggcagacgctgtgccgcgagcagaagtccttcctcagccgcctgtgccagggggaagagctgcagtcggaccgggatgagaccggggcctacctcattgaccgtgaccccacctacttcgggcccatcctgaacttcctccggcatggcaagctggtgctggacaaggacatggctgaggagggggtcctggaggaagccgagttctacaacatcggcccgctgatccgcatcatcaaagaccggatggaagagaaggactacacggtcacccaggtcccacccaagcacgtgtaccgcgtgctgcagtgccaggaggaggagctcacgcaaatggtctccaccatgtctgatggctggcgcttcgagcagctggtgaacatcggctcctcctacaactacggcagcgaggaccaggcagagttcctgtgtgtggtgtccaaggagctccacagcaccccaaacgggctgagctcagagtccagccgcaaaaccaagagcacggaggagcagctggaggagcagcagcagcaggaggaggaggtggaggaggtggaggtggaacaggtgcaggtggaggcagatgcacaggagaaaggttcccgtccgcaccctctcagacctgaggctgagcttgcagtgagggcttctcctcggcccctcgcccgcccccagagctgccatccctgctgttacaagccagaggcacccggatgtgaggccccagatcacctccagggacttggggttcccatctgaaatcctttatttttgtaccatggggtgggccccgggcctgagaaggaagaagcaccctctccccggcctcctctgtctgcacccgtggggctgtgacttactcctgcctccaggggcggggcggggcccccctgggacctcttaaggcccaaggtgggccccaggacctctgggcagagtggactgctcatggcagatgtgtggcaatgtctggctgtgtctctccggcacctgcgtcccctctcccgggctcccctgctgcatggtggatgtgctccttcctggcccggtcacattgcctccttgagccttagtccagggggtcactcctcccaccccacctacctcacagggttgttgtgagggtgcacagaggagcaaagtccctgaaggccctcaggcagtatataggggccgcccaccttcagctgccctgggatgggaaggacccagcccgacccctgggcataacactgtgtttgcaaatggagattcaggtattggggatgcaggttgtggggagctggcctggcagagtaggggtagttggcttggccttctctttggtgatcccacccccagccatttgcattgctggcccagcgcctggcctggggggcggggagaggcagcagaaggggctgggcaggggcggtggaggactcaggaactgcccggggagagtgggtatggcggctgagccaggggccctcctgtgtttgacttcccgggatgggtccttgcttctcagctgtgtccgaccccaccatgtaataaaacccaaaggaacagcccaaaaaaaaaaaaaa

SEQ ID NO: 932 - DNA, 2750 bp, Homo sapiens
agctatcccggcgggccgcgcgcgcggccgcgtttgaatggccctgagtgggactcggcccagaagccgagggactctctaggctgccgggcgctggtcgtcagcgccgaggctgggctgaggcgccgcggtaccatgaggcgccggtacttaagagattatggcatcagaaacccacaatgttaaaaaacggaacttttgtaataagattgaggatcatttcattgatcttcctagaaaaaagatctctaatttcactaataagaacatgaaggaggttaagaaatctccaaaacagttggctgcttacataaatagaacagttggacaaactgtgaaaagcccagataaacttcgtaaagtgatctatcgcagaaagaaagttcatcatccctttccaaatccttgttacagaaaaaaacagtcccctggaagtgggggctgtgacatggcaaataaagaaaatgaactggcttgtgcaggccacctgcctgaaaaattacaccatgatagtcgaacatatttggttaactccagtgattctggttcttcacagacagaaagcccatcatcaaaatatagtgggtttttttctgaggtttctcaggaccatgaaacaatggcccaagttttgttcagcaggaatatgagattgaatgtagctttaactttctggagaaagagaagtataagtgaacttgtagcttatttgttgaggatagaagatcttggcgttgtggtagattgccttcctgtgctcaccaattgtttacaggaagaaaaacaatatatctcacttggctgctgtgttgacttgttgcctctagtaaagtcactacttaaaagcaaatttgaagaatatgttatagttggtttaaactggcttcaagcagtcattaaaaggtggtggtcagaactatcatccaaaacagaaattataaatgatggaaatattcaaattttaaaacaacaattaagtggattatgggaacaggaaaaccatcttactttggttccaggatatactggtaatatagctaaggatgtagatgcttatttattacagttacattgagagatttcatctactaaagagcatttggtttttcaaaacatccctgaactgtataatttacaaaaaaaaaaagtctcgtctgagaactgtgaactgtggaagaaatcaaaactattttttcttttaaaaagccacgtaatgaaaccactaatgaaatcccagcaatctgcttcacattgaagtggaaaaatatccaaaaggagcagcttcaatttcattgaggtgaaagtgcactatgaagattgttcacctttgctgcatttgggagttatatggttatttggtaacattaagaactactggattttaatgcaatcctgcataaaaatataatttatactatgtgaaaaaataagacaggacttaccactaggaaccaccaagaccaatcatcattaacttttttaagattgtgttttattaaaaaaaaaaaacacttaaatgtgtgcagctattttcttatgttgaaaagactgaaagtttaaaacatgaaaaaaatcaatattaaacattttttgttcacactgagatactgtgtatgtaaaatgccttaattattaataagccaatgtgttatgataccaatatctgttttaaaaaactaaaaccaaccatgcttctggcatgataaaatcatggaattaaatcaggggtttacattcttgtagagtgttcttgaaacactctctgcaccatttttaaaacttgagaatagttttagtatctctgatattttttgccagaatcatcatgtcatgtatgaatgtgttatccctatctaaggaaaaaggtgaatatgtttttgtatgaatgtttaactggaaatgtccatggacttggctaatttatatttactttttattgtacatagatttctaatatttttcattcctgtatcatttaaacttccttcatttgagtaaattcactaaatatttctattttttgcttttttaaattctgattttatatgaattctaattctttttcactacatatgttttaaagagttacatacagtgatttagaatggtttacagttaatgctgatcttgtattttaaattccaacactttgtgtcactacctcctctaatggttagtatgatatgctagcagactgtatgaggtctttttttaaaataccacttttagtgtcagtgaaccaaattctggaatgtcttaacagctctaaatcttacttgtcttgaaaatgattggggtttaataccactgctggtggttcacacatcatcccatccttaatatgcctgacaggcatctgagcaaaggtttttagtaattgaatttctctgcagtagtccttcaagcacttgaatgtaaacctttagcatttattcgtttaatgactactgatacgaatctcaagcagatttcttgctcttaaaagttatgtttcactgagttctggttttgtgtagctatattttatatagctagatattcctcacagtgaacatgaattgtaataattggttatttccttaagtctttagattataataatttcagattattgcacgtctgtgatttgagaggtgagttatttaagaggccagttttcaggacatgggaatttgaattgtaaacctgttatctctgtgaaacttttaacatgataaaatataacctttctttgtgcttaaaaaaaaaaa

SEQ ID NO: 933 - DNA, 6528 bp, Homo sapiens
cggccgccaggggtccccgctcggcgtccccgcgagacagtcgagccccggccggctgcgcggcgcgctgggtgcatgagggggctgctccggagcgacggcggctgcagctggagccaggcgctcgcccgtccgccggttggctcgccgggacctcgcgcaccggcggcagagtcccttgcgtggattggcaagcgacgccccacctgccccgagctcaccattttctttcgcgctggctgcagctgacccggcgaagggagccgaccgggccctgggctggaggtaaaaccccacggaaagaacatgaggttcccttggaaatcattcaagaggaagatggaaggggctgtttagaagagcttaaaagctacaggctgtaagactggggcctgagtgctggcagtggaaaacactgttgggctgtgatctctccctgaaaagttccaggtgccttttcgcttcctgcaaaagaaaggaagcgaaagagaagaccatgtccatagccctgaagcaggtattcaacaaggacaagaccttccgacccaagaggaaatttgaacctggcacacagaggtttgagctgcacaaacgggctcaggcatccctcaactcgggtgtggacctgaaggcggctgtgcagttgcccagtggggaggaccagaatgactgggtggcagtacatgtggtggacttcttcaatcggatcaacctcatctatggcaccatctgtgagttctgcaccgagcggacctgtcctgtgatgtcagggggccccaaatatgagtatcggtggcaggatgatctcaagtataagaagccaacagcgctgccagctccccagtacatgaaccttcttatggattggattgaggttcagatcaacaacgaggaaatatttccaacatgcgtgggtgttcccttcccaaagaacttccttcagatctgcaagaagatcctgtgccgccttttccgggtctttgtccacgtctatatccaccacttcgaccgggtcattgtgatgggtgcagaggcccatgtcaacacctgctacaaacacttctattactttgtcacagagatgaacctcatagaccgcaaggagctagagcctttgaaagaaatgacgagcaggatgtgtcactaatgctccacctcaccctttggaagaaaggaaagctgtttcctcctggtgccctgagcgggcaggaggtggaccaccctggctgaaatgacacacctactcccaggaacagcagaggtggaggcaagcagtgactcctgagagacattccccactcactttgtgtgctcttaaccttctgagtgctgctagcccagacctgtggacgaggcagaccacaacgtgaaagaaggaccagccccttgaccgttctggctggggaattgtccacgaggaagcctctgcacttccacacatggcacagttctgcctgtgacctgccgcctaagctttactggaattcaggttttgagactgagatgcgtgttcgtatttttccacttatctgtcttgtcagctggccgacttctctgtgattggttttttaagtgccgggtgaattttggacctctggatgtgcagcaagtttttatgcaataagccttcctttcaggtctctaaaagctcctgctctgatctgtggtttaacactgtgcagggctgtggagctctgagacacctgaacccctacccatcccctgcacctccctactctccctgccgaggcgtccatagcatttccctaataaatagttttatcagggacactccatggggtggcttgtctctgccccaaacagggtcttcacgttctaactgcagggaagagactggttactagcgtaaagctgacaagttaccagttcacctgatcagaatgtattttttataaccaccatcattccttgtctcttcagtggaagatattctttcctgtttcccagaagagagaaataaaagtcctaaataactaagaatgatcagcgggagcgttgggcatgattactgcagtgtttgttctttattaaagacagggagtcgtggctgtctctacataatactaacatttcagtgaaaaaagtacaattggttatttggtacgtgtagatttaacacccagacggctgacttgtaaccctccccactagccttctgagcatttaaacccagccgtcattctctccccactccacgctccccactcctctgccacgttatgttacggcacaaaattaatttctgcccctgtgattgggccacggttgccaaggtaacagtggagctggagctaacttccttctttcatcctttccaatttttctattccagaagacagtcagaataatgcattctgtactacatcctgccttttgaaacctaaatgagttttcgttgatgaaatgttgccttctctgattcattcacaaaactgtggtggttctgaccacctgtgacgaggggggtcataatacttccagtgatccttttaatttagcaaaatatttgtcggtggagggaagtagataagaatgtattagtgtattttaaagtaataatgattaaagaataactaaatgactctgattttgttttatcaatcataatgtgttaaagccctctgtggctgccacaaaagactagaatcatgaaatctttgtccaagctaagaaagggctgtctctgtgggtacagtggcattctctgttgacctaaccaagcagcctgaaccttgctttgtgtctcgtaaaggtcatctcacggaatccaattgctgctacctcaccatgttgctgtgccctggtcaacaataaacatacttttgtcccccttcctaagtaactttgagaggacaagataggcaaagttttttccctacatctcttttggccaaaagaatatctgaccatcacagagatccagagaacagaaacaagagcccctaagtcccagcctctgcaatacacagttaccagatgggaatgcagcacagtggcacagagaggtaactacggagcccatgccctggaggaactctgtagctgtgcatcatggaacgccacaggatttttacattaaaaagttgaatatgttcctgcatttcagcagtgcataatcgagcaggaggctggaatctggagacctttgttattcattctttttaaggttattttttattaactgtgcatatgaaatttccactcaatttaaaaatccaaatctttttaagcttcttggaagaatttcctcctgcttatattgttaattgcactaatgaactcttctagggtaaattctggcaaactaccctttttttttttttaatcacagaatattcctgttcccacagaactttggcacattctgaagaaaatctctgcagtcaatttttatctcctctgcttgactgcatctaactgttcatctctgttataaatggagcttcagccctctgggtcagagactgacaaccctccttcttcttcctaacctgtcctactctccttctttttctgctttcattttaattttgggaaattttaaagtaaaagtttcaaagttgaaagattatagtgagtacccttatgtcctttagtgcatcagttgttaatgttttgccttgttttcttttcttccttttttttttttaagagaaggggtctctccctattttacccaagctggccttgaaccccttgcctcaagtgagcttcaaccttagcctcctgagtagccaggactatggcatgtaccaccgcacctgcctcacattttctttctcactgtaaatacacattcttattcttgaaccttctgaaaataagttgcagacatcatgaaaatgtaaaatacttcatcatattctttcttttaataagagcattgtcctataaatctgcaatattttcacgcccatgaaactgaacactgatactgcataaatctaatatatgatccatattcaaaattctccagttgtccccaaaatatcctttatagctgtttatttttaaatccaggatccaatcaagaattatacgttatatgtagttgtcattctcttttgtttcctttaattgattagagttgcccttttgtgtgtgtctgagtggtgggtggtggggtggtgtttgtgtatgatgtgcagtgtgtgtgtgtgtggtgtgtctttcatgacactgacattattaaagagttcaggcaagtttgtggaatgtcccacaatctagacttttttactgattgtttcctcattacgagatacaggttacattttttttcccaagactgctacatgtgtgatgttgtttccttactactgcctcacctcaggaagcacataatgtctacttgtctcttttctgatattaggactgatcaggtgttgtctgcctgatccaatcattatcaagttccataattcattattaagctctgaaattcaggacacatacatttatagagtgtgaggctgtgcatacgtacattcatcccttaatgttctcaaggaggcccaggatccccaaaatattataagcattgcagtcagatgatatagcactagcaaagcattcatccctttccatataacaggagggaggggaagaaggaagtttccatgtgcaggcaatacgtgagagcatgggcaagtgaggatttgtatgctccctgtagccagaggtgaaatattcaacgcttttattttttctcccgtcttcaatgacctcccatttggacccatagtttatttatagagagcacacactccctaattgtcagatggtttttttgggaaaactcttagatagtacagtgagttgtgaccctccaaaggatcacaagtacataaacagatacaaagtatttatgtggtattaaaatttcatggtgatggtgcaagggagagatgattaggaagaaaatgtcttacacggctgtaattgagaaatactgatctagagtcatttcctgcttcttaaattgttcgttttctcttccctgggtattttctcatttccaaagacccagagtctcagagccaggttaagtggaagaaactttgagaggtttcttaatcaattccttctatctctcaaaccatgccagtaacttccttggtgaaaaaatctatactcctctcacagttcttcgggcatggaaattctatagcattctttggtataaccaacccactgaaccctccacaacatcttgaattccattcaactcgagctgaagtattctttttgagtttcagtatatcttttctagtgtcccacttttagaaaggtccaaagatgatatataataagtgaaaatacaattaatcagagctttatttgcatatccattaaatatctgaaggctattaccagttgtgcttcagcctcctttcccttgcaattctcccagggtggcatcctctacggagtcttgttgctccattgttgaccactgatgtaactcaacgtgaaaccttcccaaagctctccacatcactctctgttatggctgtgaccagcagtgaacatgaaaagaacttatttcatgccttctccaaactatattgtttctttgctaagtccagacctgctttttctacatttataggttttctattttaatcgccatgcaaaattctttatcatactcaatcattttggtttatcttcctgacttcttacctttaacatccctgttaaagattacactgttgttgtttcaaaaaaaaaaaaaaaaaaaccttaattggcaaaacattaagggacttgaatagaattacacttatctttttgtgctgatttatgtcaatccatcattctggttattgatggaagcaaattgcttcctatgttctctaaaccttatgtcccttccatactccatgagtaccacactgggagaaaacaaaagcaaaaagattgtgggaaaagtatagccattatctttgaggaaatgtgtaccaaggcacaatcattaaaaggagttggaggcatcatttggttgacactgttgtcattcttgttctgatcattttggaccttgaagaaattggtgattctctcctagaattagacaaacaaagtgtgtttggaaataatgattgttttcctgccttaaaaaatatattaacagaaagcttttataacaggctgtttccctctggacaggtattaattctgagtaagaattttcagtgactacataaggatttgtgtaacttatgaaggaagagtccatttctaatcaaataattcgcctgttttactagcttatagtgatctgatttcagaattttcctgtatcttttttacatacatcagaaaaagaaatgtttactatatttttggttccatttatgattgtattaagcatttgactataaggaaaactaacaattaaatcaattagaaaagcaacataaaattaaatgatatttaggaaatcagttatatgtgagcttgggtattcaaatgtcacaaataaaaagcatataaccattaaaa

SEQ ID NO: 934 - DNA, 5697 bp, Homo sapiens
gcttttctccttggcatggtcacggaatggatacctgtttgatcttcctgcactgctgagaaatcttccttttgggggagaggattaagtctgggttgaggtaggccacctgttgagacctggtgaaagatcaggtataataatgttctgcagtgaaaagaaattgcgtgaagtggaacggatagtgaaagccaatgaccgtgaatataatgaaaagttccagtatgcggataatcgtatccacacatcgaaatataatattctcaccttcttgccaattaatttatttgaacagttccaaagagtggcaaatgcctattttctttgccttctgattttacagctaattccagaaatttcctccttgacctggtttaccaccattgtgcctttggtcctggtgataactatgacagctgtcaaagatgccacagatgactattttcgccacaagagtgataatcaagtgaataatcggcagtctgaagtgctcatcaacagcaaactgcagaatgaaaaatggatgaatgtcaaagtgggagacatcattaaattagaaaataaccaatttgttgctgctgatttacttctcctatcaagtagtgagccacatggtctctgttatgttgaaactgctgagcttgatggggaaacgaacctaaaagtccgccatgcactatcagttacttcagaacttggagcagatatcagcagacttgcagggtttgatgggattgttgtctgtgaggtgcctaacaacaagttagataaattcatgggaatcctttcttggaaagacagcaagcattccctcaacaatgagaagataatcctgagaggctgcatcctgagaaataccagctggtgttttggaatggttatttttgcaggtcctgacactaaactaatgcagaatagtggtaagacaaagtttaaaaggacaagcattgatagattgatgaatactctagtactatggatttttgggtttctgatatgcttgggaattattcttgcaataggaaattcaatctgggagagtcaaactggggaccaattcagaactttcctcttttggaatgaaggagagaagagctctgtgttctccggattcttaacattctggtcatatattattattctcaatacagttgtacccatttccttatatgtgagtgtggaagtaattcgtctaggacacagttattttataaactgggaccggaagatgtattattctcgaaaagcaatacctgcagtggctcgaacgaccacgctcaatgaggaactggggcagattgagtacattttctccgacaaaacgggtaccctcactcaaaacatcatgacctttaaaagatgttccattaatgggagaatctatggtgaagtacatgatgacctggatcagaagacagaaataactcaggaaaaagagcctgtggatttctcagtcaaatctcaagcggatagagaatttcagttctttgaccaccatctgatggaatccattaaaatgggtgatcccaaagttcatgaattccttaggttacttgctctctgccacactgtaatgtcagaagagaatagcgcaggagagctgatttaccaagttcagtcacctgatgaaggggctctagtgactgccgctagaaattttgggttcatttttaaatcccggaccccagagaccataacaatagaagaattgggaacactagttacttatcaattacttgcctttttggatttcaacaacaccagaaaaaggatgtctgtcatagttcgaaacccagaaggacagataaagctttattccaaaggagcagatactattctgtttgaaaaacttcatccttccaatgaagtccttttgtctttgacgtcagaccacctcagtgaatttgcaggggaaggccttcggaccttggccatcgcatacagagacctggatgacaagtactttaaagagtggcataagatgcttgaagatgcgaatgctgccacagaagagagggatgaacgaatagctgggctatatgaagaaattgaaagagatttgatgctactaggtgccactgctgtagaagataagttacaggagggtgttattgaaacagttacaagtttatcactagccaatattaagatctgggtcctaacaggagacaaacaagaaactgccatcaacatcggttatgcctgcaacatgctgactgacgacatgaatgatgtgtttgtgatagcagggaataatgctgtggaagtgagagaagaactcaggaaagcaaaacaaaatttgtttggacaaaacagaaatttttccaatggccatgtagtttgtgaaaaaaagcagcagctggagttggattctattgtagaagaaaccataacaggagattatgccttaatcataaatggccacagtttggctcatgccctagaaagtgatgtcaagaatgatctcctagaacttgcttgcatgtgtaagactgtaatttgctgcagggtcactccactccagaaagcccaagtggtagagctggtgaagaagtacagaaatgctgttactttggccattggtgatggagccaatgatgtcagcatgattaaaagtgctcacattggtgttggcatcagcggccaggaaggattgcaagcagtcttagccagcgactattcatttgcacagtttagatatctccaaaggcttctccttgttcatggaaggtggtcttatttccgaatgtgcaaattcttatgctatttcttctataagaattttgcatttacacttgtgcatttctggtttggtttcttctgtggtttctcagcccagactgtttatgaccagtggttcatcaccctttttaacattgtttacacatcactgcctgttttagccatggggatttttgaccaggatgtgagtgaccagaacagcgtggactgtccccagctctacaaaccaggacagctgaatctgctttttaacaagcgtaaatttttcatttgcgtgttgcatggaatctacacctcattagtccttttcttcatcccctatggggccttttacaacgtggctggagaagatgggcaacatattgctgactaccagtcctttgcagttaccatggccacatctttggtcattgtggtcagtgtgcagatagccttggataccagttactggactttcattaatcacgtcttcatctgggggagcattgccatttatttctccattttatttacaatgcacagtaatggcatctttggcatcttcccaaaccagtttccatttgttggtaatgcacgacattccctgacccagaagtgcatctggcttgtaattctcttaacaacagtggcttcagttatgccagtggtggcattcagatttttgaaggtggatttatacccaaccctgagtgatcagatccgccggtggcagaaggctcaaaagaaggcaaggcctccaagtagccgaaggcctcggacccgcaggtcaagctcaagaaggtctggatatgcttttgctcaccaagaaggctatggagagcttatcacatctggaaaaaatatgcgagctaaaaatccacccccaacatcagggctggaaaagacacattataatagcactagctggattgaaaatttatgtaagaaaaccacagacaccgtgagcagctttagccaggataaaacagtgaaactgtgagtcaatatgaatttaaaccacgtagttatcttttcacttcaggtggagctgaaattctgctggctccagagtttgagatttgaggcaagaggtggggcaggcagattgcctcacttaacttaaatctgcggcagacaactgccagtgcccatcaaacaggagtgtgcgctatggaaaaccaggccagagggtcactgtctggtttgtgatttggtggacaaaacactcgctgttacaagtacagattttttttttttttaaatcaacctagataccaattgacctgaactttagaatcttatttatggagaaaaacttgtaaagctgcatattcactgaatggatcctcaggcggataaaagggtgcattttaaaggtatatatccaagctgaaaagcatgcctattgacagataaacatgtatctgtaagatcagcctttcccaaggtatacttttaaaatttaaagcgtgtactgtgttgctttcagactgagttgcatgtcactctttagtcttgatatctacctgtctgttcagccaggacaacaaatggcttccaagcctgaagaatacaaaagtgtgcttgtgtttctcatttttataccagtctagggacaaaggagactgaacatctttgcagcaggataggctggtaatttgatcaaatttattcaaaaagctctcagtctgtgtcatgtaaggacatgcttatgaaatgtgagagaggctcgccactaagtattctaaatacttttcaatggcttttctaacaacctcagtagtaatttgctgagcatcatccagaccattaatagaatcagcaaagcactggaatttcacactttaatgataatattccacatagtctatgggcaaatattttcaacatttccaatttttaaagcttcagaattgaagccaaacaaattaataaataattgttttaattactatttaaaaactcaggtttagattgtttaaaattagttgcttttgatactcagctgtcatgtttataattcaaacatgtagtaaacatatgtaggtaaggttgtttttttggagatgttgcagctcaaatttcagtccacatatgaatcatcagtgtattttccataaagtgattcgggcatatttgtgtgaaaacctcagttctgtcacttcttacctctataaacttggacgataatgtgccttctctgagactcagtttcttcctctgtaaaatgaggacatactacctacctcatgtggttggttgatgattgtctgtcaaagcacaaactctgaaattattaaaaacataattatttcataaacagatgagttaagttccagttaactcaacatcagtataacagagcaattggaagagaatatgaaaaaactggaatctaaatagtcagtgaggaaggctttgataaaatgaaattgccagaaagatataaaactggttagggtcctacagggaaataaaattataaccgtggaggtacatttctctaccagaaagcaaaaataaagcatcatgtcttaatggttttctacaaatcaacttctaattctacagagtccttaatctggtccctattaaattcttggtcagacaaagttacatttcccaagagagtcaggtgacacttgagtgagtttgatggataatgagctaatgtgatatctataggtcacaattttttaaaaccaaaattttcaagtctgggataatctttcctaaatgggatcaaatgaaataatatgtgtaaaagagtcaaatgcagtcctttaccatagtaactgcctatggacgttgtctttcccttacatgcctgcctacacttaaccagatgttggttttcaatgtctaatttgtcattagtttcaccacatttgctcactttttgtaacatttttgcaagatttgaaaactttcagtaaatgttttggcactattggtaaaaaaaaaaaaaaaaaaaaa

SEQ ID NO: 935 - DNA, 3667 bp, Homo sapiens
gagcttccggggcggccccgggcaggtcggcggcggcggcccgcagtcgtggaggagcggtgggagcgtcggcggccgcgggcgatgcaacttccggacgggactcccctctgtccgcgcctcacatctccccttcctctcgcctagtcctgtgccgttttccgtccgcgactcttccggcccagagctttcggagtgcggttgctcaggggaagccgtcgccgcccccgcctcggggccgagtgagagtgcccgtcgcgtcgcgccgcgtcgccccccgggccgcctccttgccgccagtggcgggctccgttctccctcgaagcactccccccagctccatgaatggaaatcggctccgcaggacccgctggggcccagcccctactcatggtgcccagaagacctggctatggcaccatgggcaaacccattaaactgctggctaactgttttcaagttgaaatcccaaagattgatgtctacctctatgaggtagatattaaaccagacaagtgtcctaggagagtgaacagggaggtggttgactcaatggttcagcattttaaagtaactatatttggagaccgtagaccagtttatgatggaaaaagaagtctttacaccgccaatccacttcctgtggcaactacaggggtagatttagacgttactttacctggggaaggtggaaaagatcgacctttcaaggtgtcaatcaaatttgtctctcgggtgagttggcacctactgcatgaagtactgacaggacggaccttgcctgagccactggaattagacaagccaatcagcactaaccctgtccatgccgttgatgtggtgctacgacatctgccctccatgaaatacacacctgtggggcgttcatttttctccgctccagaaggatatgaccaccctctgggagggggcagggaagtgtggtttggattccatcagtctgttcggcctgccatgtggaaaatgatgcttaatatcgatgtttctgccactgccttctacaaagcacaacctgtaattcagttcatgtgtgaagttcttgatattcataatattgatgagcaaccaagacctctgactgattctcatcgggtaaaattcaccaaagagataaaaggtttgaaggttgaagtgactcattgtggaacaatgagacggaaataccgtgtttgtaatgtaacaaggaggcctgccagtcatcaaacctttcctttacagttagaaaacggccaaactgtggagagaacagtagcgcagtatttcagagaaaagtatactcttcagctgaagtacccgcaccttccctgtctgcaagtcgggcaggaacagaaacacacctacctgccactagaagtctgtaatattgtggcagggcaacgatgtatcaagaagctaacagacaatcagacttccactatgatcaaggcaacagcaagatctgcaccagatagacaagaggaaattagcagattggtaagaagtgcaaattatgaaacagatccatttgttcaggagtttcaatttaaagttcgggatgaaatggctcatgtaactggacgcgtacttccagcacctatgctccagtatggaggacggaatcggacagtagcaacaccgagccatggagtatgggacatgcgagggaaacaattccacacaggagttgaaatcaaaatgtgggctatcgcttgttttgccacacagaggcagtgcagagaagaaatattgaagggtttcacagaccagctgcgtaagatttctaaggatgcagggatgcccatccagggccagccatgcttctgcaaatatgcacagggggcagacagcgtagagcccatgttccggcatctcaagaacacatattctggcctacagcttattatcgtcatcctgccggggaagacaccagtgtatgcggaagtgaaacgtgtaggagacacacttttgggtatggctacacaatgtgttcaagtcaagaatgtaataaaaacatctcctcaaactctgtcaaacttgtgcctaaagataaatgttaaactcggagggatcaataatattcttgtacctcatcaaagaccttctgtgttccagcaaccagtgatctttttgggagccgatgtcactcatccacctgctggtgatggaaagaagccttctattgctgctgttgtaggtagtatggatgcacacccaagcagatactgtgccacagtaagagttcagagaccccgacaggagatcatccaggacttggcctccatggtccgggaacttcttattcaattttataagtcaactcggttcaagcctactcgtatcatcttttatcgggatggtgtttcagaggggcagtttaggcaggtattatattatgaactactagcaattcgagaagcctgcatcagtttggagaaagactatcaacctggaataacctacattgtagttcagaagagacatcacactcgattattttgtgctgataggacagaaagggttggaagaagtggcaatatcccagctggaacaacagttgatacagacattacacacccatatgagttcgatttttacctctgtagccatgctggaatacagggtaccagtcgtccttcacactatcatgttttatgggatgataactgctttactgcagatgaacttcagctgctaacttaccagctctgccacacttacgtacgctgtacacgatctgtttctatacctgcaccagcgtattatgctcacctggtagcatttagagccagatatcatcttgtggacaaagaacatgacagtgctgaaggaagtcacgtttcaggacaaagcaatgggcgagatccacaagctcttgccaaggctgtacagattcaccaagataccttacgcacaatgtacttcgcttaaatagtccaagtatattctctgagaggaagtactgaaagatgaattgacatacaacgtatgtttccagtgaagtcaattgagtaaggacacctccagccatacagaaaccaacactgtgtgggggccaaggtctgatccttatgttaatacaaggaagattgtttacttcatcaaggaacacagcatcattatgcaatatgaaaccagccaactgctttttgtgcggtctcctataggaagtatcgcaattgttttgttttcatttcttgtagtctaacccttttaatgcctttacctcaagttgcttggcagcacaactatctttgcaaaaaaaagtaaagaaaaagtaaatgatggtttaaaaaatacacaccttcatgaataatcaaagtgatttttcagaattatgtgtgcaaaaaattaatgtgcattcatatattcttgtaaaaggtgtctgtgtatttttaaaatatatacatccatacttcatatgcatatatatctagatctggattgataatagatatatatgtgtctgttatatattttagagttcattccattggggaattttctttcccttttattctacccccactaccgcctttatttctctatttcccttgccttcatcacctacatttttttcccagtcctaccagtgacattcaaatgttgatgtatctggttcgtttgaatataaaatatggcaaactaaaaaaaaaaaaaaaaaaaaaaa

SEQ ID NO: 936 - DNA, 6111 bp, Homo sapiens
gctaaagagcgcgggtcctcggccgtggagggtcaagtggcttcttctgagcgctgagggaggggagcgtgcgtaggggatggtgccagcgctgcgttatttggttggtgcctgcggacgggcccgcgggcttttcgccggtggctcccctggggcgtgcgggttcgcgtctgggaggccaagaccgctgtgtggaggtagccgcagcgccagcaccagctcatttgatatagtcatcgttggtggcggaattgtggggcttgcctctgccagagcactcatcctgcgacatccatcactttctattggtgttctggaaaaggagaaagatttagctgttcaccagactggacataacagtggtgtcatacatagtggaatttattataaacctgagtctctgaaagccaaattatgtgtacaaggtgcagccctcctctatgagtactgtcagcaaaagggaatttcctacaagcagtgtggcaagcttatagtagctgttgaacaagaagaaattcccagacttcaggccctatatgagaaaggcctccagaatggtgtcccgggcctgaggctgatccagcaggaggatataaaaaagaaggagccatattgtaggggtctaatggctattgattgtccacatactggcattgtggactatcggcaggtggctttgtcatttgcccaggatttccaagaagcaggtggctctgtcttgaccaattttgaagtaaaaggtattgaaatggctaaagaaagtccttcaagaagtatagatggaatgcaatatccaattgttataaagaatacaaagggagaggaaattcgatgtcagtatgttgtgacatgtgcaggactttactcagaccgtatttcagagttgagtggctgcactcctgatcctcgaattgtaccattccggggagattacctgcttttgaagccagaaaaatgttatcttgtaaaaggaaatatttatccggtcccagatagccggtttcctttcctaggagttcacttcacaccaaggatggatggcagtatttggctagggcctaatgcagttcttgcctttaaacgagagggttacagaccctttgacttcagtgccacagatgttatggatataattatcaatagtggcttgattaaactggcatcccagaatttttcctatggagttactgaaatgtataaagcatgttttcttggtgcaacagtgaagtatcttcaaaaattcatccctgaaattactatcagtgatatacttaggggcccagctggagtaagagcccaggccctggatagagatggaaatctggtagaagattttgtatttgatgcaggagttggggatattggaaatcgcattcttcatgtgagaaatgcaccttctcctgctgctacttcttccattgcaatttctggaatgattgcagatgaagtacaacaaagatttgaattataaataatgaaaggagctaggtatgcactgtaatcttcatgtcagcaacaagaatgtactaattgcattctttaatttaaaaaatggtttttaaactttagtttttaggtcaaagataaccactgcattgttaaaatgatgtaacatagaaataataattttctacaaaaattagccaggcatggtggcgcatgcctgtaatctcagctactcaggaggctgaggcaggagaatcaattgaaccgagcagacggaggtgagctgagagctgagattgcaccactgcactccagcctgggtgacagagcaagaaaataataataataataattttcaaaatgttaggctgggggccgtggccagcactttgggaagccaaggcaggtagattgtagcccaggagtttgagaacagcctgggcaacatggcaaaaccctgtttctacacaaagttagctgggtctggtgcctctgtagttccagctcctcagtaggctgaggtgagaggatcacttgagcccaggaggtctaggctgcagtgagcttatgttcatgacactgcattccaggctggatgatagagcaagatcttgtctcaaaaaaaaaaaaaaaaaaaaaaaaaatccagcctgggcaacatagtgaatgaaaccccatctctacaaaaaatacaaaaattagctgggcatgatggtgtgtgcctgtagtcccagctacttgggggctgaggcaggaggatcgcttgagcccgggagatcaaggctacagtgagctgtgttcatgccactataccccagcctgggcaacaaagtgagtccctgactcaaaaaataaaaacaacaacaaaaaataaattccatgcttatttactttgcgaataaagaggcaaggtacagttttatctgtccgaatccctgacttttatttattttttttttcagacggagtttcactcttgttgcccaggcttgagtgcaatggtacgatcttggctcactgcaacctctgcctcccgggttccagcgattctcttgcctcaacctcctgagtagctgggattacaggcgcccaccaccatgcctggctaattttttgtatttttagtagagacggggttttgccatgttggccaggctggtctcgaattcctgacctcaggtgatccacctgcctcagcctcccaaaatgctgggattacaggtgcgagccatcatgctcagccctgaatccctgactttgttaatgacctgtccttaccaaccatgacctagagaagatttggctttttaagagttttggagaaagatggcataaaaatagattatttccttaaatcaattttttagcattacgctacctaagctcgtttggtctctcatagacaagaaaatacattatattgtaggttacattcttttaattttgaagagtcacaaaactcacattatttagagcaacaatatttgtatttggaaattaaaaattcatgatttcaagaaaatacataaaatttacatttttgagtagtttgaataagtttctatcttaattataatatttgtaggaaataacaaaacaaactcaaagcctttattatttccagtctctttgtaactgatgtggtatggtatcatcatgaaatctaaacagtggtacactgagtggttgtcctgttcttcaatctctgtggctgagaactgaaataacttagaagagacagatttttatgagagcagttttagaatcctgacactgatgtatagaactccaatttaaaaaagttatttatctattatatctctgatctttagtcacactaaggctctcaaaatgttggccaagattggtaatgattcatacgtacttgatttttcagggctcctataaacttgtatagggatatttttccatttttgataaatatctaactttgaggcattcacttttgtaaaccgcgaaagtgccttacattcacctcatgagtattttaagttgatgcccagtgctgtggtatatcctgtatatatgtgttttgtggtatctatcgaaattattcttataatttagaaagttagaaaatagaaattgtaaatgaaaatgtggcgacctgactgcagaactttgagtactgaaccacatttaggtgaggcattttcatccattctctctgatttgctctctcaggattcatcttctactgtgtatgtcttctttcctcttagctctccaaagctgtatgatggatgggtgagaaggatgtgcattttggttgataggaaaaatgtttctgttttcttccttttcccctcacttcaagcattgatgattacattgattgagctacctcatccattaatttgaaaggctacacttcatcagctcatgtttaagaagtagcacatcccaggtaaacagagtaggccattattcaactcttaggatgagtatattaaaagcattcagatatcaatgacagaagaaacaagccctaatgtttctttataacagctgattcctgcaagaaatgcaaacacaggatatttttctgttccattacaagattactaagagatggaaaatattatcattctgtattttgtcagtagtacgattgcatacatactaagttgtaaacattgaattacaaaaaatgattgtcctaattgaagcagtcctcaatccatttgagtctgtacaataccctgaaaaggaaacaacaggtgctggagaggatgtggagaaataggaacacttttacactgttggtgggactgtaaactagttcaaccattgtggaagtcagtgtggcgattcctcagggatctggaactagaaataccatttgacccagccatcccattactgggtatatacccaagggactataaatcatgctgctataaagacacatgcacacgtatgtttattgtggcactattcacaatagtaaagacttggaaccaacccaaatgtccaacaacgatagactggattaagaaaatgtggcacatatacaccatggaatactatgcagccataaaaaatgatgagttcatgtcctttgtagggacatggatgaaattggaaatcatcattctcagtaaactatcgcaagaacaaaaaaccaaacaccgcatgttctcactcatagatgggaattgaacaatgagaacacatggacacaggaaggggaacatcacactctggggactgttgtggggtggggggaggggggagggatagcattaggagatatacctaatgctaaatgacgagttaatgggtgcagcacaccagcacggcacatgtatacatatgtaactaacctgcacattgtgcacatgtaccctaaaacttaaagtataataataaacaatatatatatatatatatatataaaataccctgaaaaataaaaatgaaaaatttgttgaaagtgttttgaatatgtaggttattctgcttgtaaaacgttttatatgtatgtcaatagggtttttttgtttaatactgatataataaagttttatgtatttctgacagaagaaatgtatattaatatttaaaatattttaatgagccttggtgttgtagagaacatattttttagttccataaaaacttttatgcaaataaatttttttatgtgtaaaacataaactgtttgctttagatagatagcagccaacctttttaaaaaactcatttctgtgttagtatataatacaaaatgaggttgagtcatttatattttgggtaaaaagtggagcattttagattttaacttcagagtgtttgtgaggaactcttgatgtaccagcaagtatatttttggtgtttcatgttacgtagcttaactcttttatccatacatatatgtgtatatcaaagtccttcccttgatcctctcagcattagcactgtttggggagttgcctttactgttggcagaattccactttccctgaggccatttggaaatctacctagtagcctgtgggataaccttaactcttagaactttcttcaaaggatggtggtgagaatggggtatactgccaggccctggcctacgggagtttgtagggcctacttttggaggcaatccaaccctgatggctgtacctatgagctatccctgtaaacacaggagacatggtgtctatattgtttaaggactggctctgccctcctgggcccttaatctgtgtctagacttcttggtcagaggtttcctcatctttctgcgcatacactattatctaaagatcttgtaaacatttttgagttgtaatcgtaaagtcagtttctaagcttttctaacacactcaaagggagtttttgaaatctcttcatcagggcttaaggtagaaggacagggtgaaatggttgggaaagcaaaagctgcctcgagatgttttcaaatagtttgtactcattaaatagcttaagaatggaaataaaccctgaagccctgaagggaagaacagtgttgataccaaccaactctacttttctggcctcaaatcctagaaagtattgtgggtttgttgttgttgttgatgttgttaattgcttgtattttctgcttatgggaaggatctcacattaaagttatcttattttaaaaaaaaaaaaaaaaaa

SEQ ID NO: 937 - DNA, 5339 bp, Homo sapiens
gcgatgccgaggtcctctgctcccgccgggcgtgcagcgggcgcgcgcgcgtgtgtttatgtgtctgtgtgcgtgtgtgtgtgtgtctctctctgtgtgtgtgtgagatgaattggagtcatacgactgggtgtttccttccgagtggttttcatcagcaatccattaggaaatcatggaaactttttttttcctggctaaaaggatgaaaactgagtcatccacttttgactgtcatccatggaagagctcttattaaaagcctcagactttcgggacctatgattctttggcacaaccttttggaaaattcttaagcagggatgaagcaaacttgattggagttggggaaaaagaagacagattagtatttttcatgctgacaaaaaatagctgctatgacttttcccgcaacgtggacaggggccaagtgaagctgaactggtcatggtctgtcgcccagtgttcccttgtcgtcggcgattttgcccccgacccttcttggtgggcttagtggtggcaatctgtctcttctaccagactctgaccctccgagggtcgaggaagctcacagccgctgcccctggggctgtcccacacacatccactgaaacccaggcaagcagatgcaagaaaggattctctcaggacaaacagtgcttccttctctctggtaatgcccaggaaaccagaaaggtcaaagaatcaatggagacacactttggcagccatggccgaagggccatactctacaggcctcctttctacagcaaaacagagcttcagctacaccagcacattctgactcaacatggctatacggttgtcatcgctgaagaaaggctcaatgctggcctagggccggggctactagaacaaggtgatctgggctcttgggatctgctcatttgcctgtcttctaagaaagcagaaggaacaccctgtatatccaaggaagtcatgtgccagttaggtttacatcaaaaggcaaacagattaccagaaatacagcagccactttgcagaaaggaaggattatgtcaaatagttagaagattcccagaactgcaacttccagtgagtccctctgtgtgtctggatcagggaatgcaattaaagccgagtacttcgagtcaccttttaaaaacagtgaagccacgtgtgtggaaaccaggggactggagtcgtgaacagctgaatgaaacgacagtccttgctccacatgaaacaatctttcgagccgaagatctatctgtgattcttaaagcgtatgtgttggtgacgtccttaacccctttgcgtgcattcattcattcgacgggcacagtttggaatccaccaaagaaaaaacgcttcactgtcaagctgcaaacattttttgagacattcctgagagccagttcacctcaacaggcttttgacattatgaaggaagcaattggcaaactactgctagcggctgaagtattcagtgaaacatctactctgggaccaaagaccttccatagatgcagattctgctttcaacttctaacttttgatattggttatggcagtttcatgtaccctgtagtgctccaggtacacgagcatttaaattttcaagattatgataatatggattttgaggaccaaaatacagaagaattccttttaaatgacactttcaattttctcttccctaatgaatcatcactttccatattttctgagatatttcagagactttatagatcagatgttttcaagggtgaaaactatcaaaaggaactaaatcagtgtctgtccttagaagaaattaactcaattatgactttcataaaggaacttggaagtctgggacaattccaactgctcttcccatctactactcctgggattcagtcactgatgcatgaattttatgatgtggcaaatcctgtgggaaatcctggctcagtcctgacccaatactggtctcttttaaatgtatttgaacaatttcagttcatgaataaaaagacacagccacatccactggaatggaattctttcacagaagataagaacattgaaaaaccacaagtgccatttgatgcaatagaaaataaaaaagctgcagttccacaaattaaaaatgaaaataaagaaatacattgcagtgatgatgaaaacacaccatgtcatatcaagcagatcttcacacatccacatttggaactaaatcctgactttcatccaaagatcaaagattattactgtgaagtcccatttgatgtggtaacagtgacaattggagtggaaactcctaagtgtctgtgcaaggtgcacctgtacgagcaggcagggccaagctttgccagctaccctctgggcttaggaatgaacaaaatctcaatatttgttgtggatgaatctccagcacacggtgagactctgatcacgtacaaactcaccatctatagagaagaccgcccaagtctgcccttgtttgaggccttcacagcatgtggttttgtgcaggattgtggtttgctgattcatccagaggaaacctgtgggttacagcctatttcttctgactacattgaagccattttacagtctgaactaaaaagatgtccatctggggacatgaaaggccagtggattgtgccttgccttagttgttcggacaacaggacgtgtgactggagagaaataacctggcagccccacaactgccaatatggtgtcctaactaagcctcaactccagcagtgcctgggaggaaggaagattctgttcattggagattcaaccaacagagggatcatgtactatcttattgaaaggctgaatgaaacgttgcaggaatggcagaaagtacatggcactaaattctatcacaacgtcaatggtgggaagactttgatcagttattcctactatccccagttctggataagcccttcattgagaccaacatttgaaaatgcacttgaacacctcttgcaaagatcacgtcccctagagaatactggccagactgtattggttgttggtggtgttcagtggcttaattccaatcacctgcaaattattcacaaagttttgaagagggaaaatttactcaatatcctagtgatcatcaaaactttgggaattggatttcatctgccagtggatggagtacatttcttaacacagagtgaagtacagaacttatggaaagaaaatttgattattctggatactgcaaaaaaacatggctatgaagtagttgacacattcactataacaatggggcgttacaaagagtttctacaggggaagtgtggatgtcatttccatgaggtagtgaaatcaaagttatccaaagaatataactttattaaaatgaaaagatcaagaaatcatatcatgggaagatatttcagcaatcaaagcaaactacaacaaggcactgtaacaaattttcgatcgccatatcatgtcagaggtccaataaatcaggtttgttctgaaatccttctcagcaggatgtgtgcaaataaaaggactatgtaggctccctgcaggagagctgaatctggagctggagacgagctagtcacccggacaatggtctaggagccaagcgctgcacatcgcacacatttgggatcgaccacacacacttgtgcacaccagcacatgcatgcacaccagtacacacacagttaaataatgataacacttcttacagctttatgaattcaagatgtgaccttgaacaccagtccatttcacagtgaaagatatacctagagaaacgttacttgaagcataattattaaccagaaccactgtgggccaggtatggcattgtgataataaagagaaatatagacacttaaaattatgtgaaaaaaaggataatgctctttcatgttgtcttaccatatctataggtacatcaatattgaaaaggagaaaaaccaatgacattccactggcaagtagaagttgtcctttcattctttaccaggagaaaatgtgatgtttatgatggcttaggctttgtgaatctaatgcttatgaaaaacatttcttcctatactttttaaattttattactgaaaggaaaagaacaggaatgttccacaagggaatttgaagagattctgtgagagagatatgaaatattttatagttaaaacaccaatatattcaactttacacttcttgtgtttttcataaacattccctcttgtcttatctgtgtacttcgatgggtaactgcagtctgaattaatgaaatatgtaattttaaagtaagtaacaaaatgtagttcctcatgtattactgtactatgtttcattgatgatattacttaaatcttgtgtttgccattacagccctatgtaacttaaaattacaattatattttatgtaaatattttgcaaaggactatgcattctgaaatgcataggtgctttttcccaccaagcatttgcatatgtccacaaatagtattatgttactagtatctatattttgattttcctgagcaactgtatcaaatccaaatttagattagacaaaaaattattattttaattaaactgtggcatacatataatacatacctaattatagtagtgagaactatttcttttatctctttaggttcaaaatggtgaatttctttattatatgaatgctttgttgtgagataacatcacactgttacaatggattttagaggtttgtcttttttgggtggggtgggaagctgagagggttaattcaatacatggctgaaattaccaaatgtataaatacctcattttcactaccatacaagaaaaaaacacctattttgattgatcagttcttttgtatgaatatccacctcctttaaatactctatttttatatatatttttatatgaagataaacatgaatttatatttaactgtcttaaattatatttacataaatgcaaatatcacttgatataaacaatacaaatctgcatcttacagatgataatttttttagaagaatgatacagaattaactttaaaaataaaacttttctaatatacacttaaatgcaaacatcatttttaaattttcagtgatttttttaatgacataaaacgttaccaatgtgtgcagcctctccatcatgttttaacatactgtatactctatagcagtattacagtcagtatttcatataattttctttagacctaactgttaccatctgactgaggttactctggtatttatctcttcgctgctgaaataataatggattttagaaacaattgtaataatatcattaataaatgtcttactagtaataaaaaaaaaaaaaaaaaaaa

SEQ ID NO: 938 - DNA, 12687 bp, Homo sapiens
atgcgcagcccatgttagtgatggaggagagaagatggcggaagcggaatttaaggaccatagtacagctatggatactgaaccaaacccgggaacatcttctgtgtcaacaacaaccagcagtaccaccaccaccaccatcaccacttcctcctctcgaatgcagcagccacagatctctgtctacagtggttcagaccgacatgctgtacaggtaattcaacaggcattgcatcggccccccagctcagctgctcagtaccttcagcaaatgtatgcagcccaacaacagcacttgatgctgcatactgcagctcttcagcagcagcatttaagcagctcccagcttcagagccttgctgctgttcaggcaagtttgtccagtggaagaccatctacatctcccacaggaagtgtcacacagcagtcaagtatgtcccaaacgtctatcaacctctccacttctcctacacctgcacagttaataagccgttcccaggcttccagttctaccagcggcagtattacccaacagactatgttactagggagtacttcccctaccctaacggcaagccaagctcaaatgtatctccgagctcaaatgctgattttcacacccgctaccactgtggctgctgtacagtctgacattcctgttgtctcgtcgtcatcgtcatcttcctgtcagtctgcagctactcaggttcagaatttaacattacgcagccagaagttgggtgtattatctagctcacagaatggtccaccaaaaagcactagtcaaactcagtcattgacaatttgtcataacaaaacaacagtgaccagttctaaaatcagccaacgagatccttctccagaaagtaataagaaaggagagagcccaagcctggaatcacgaagcacagctgtcacccggacatcaagtattcaccagttaatagcaccagcttcatattctccaattcagcctcattctctaataaaacatcagcagattcctcttcattcaccaccttccaaagtttcccatcatcagctgatattacaacagcagcaacagcaaattcagccaatcacacttcagaattcaactcaagacccacccccatcccagcactgtataccactccagaaccatggccttcctccagctcccagtaatgcccagtcacagcattgttcaccgattcagagtcatccctctcctttaacagtgtctcctaatcagtcacagtcagcacagcagtctgtagtggtgtctcctccaccacctcattcaccaagtcagtctcctactataattattcatccacaagcacttattcagccacaccctcttgtgtcatcagctctccagccagggccaaatttgcagcagtccactgctaatcaggtgcaagctacagcacagttgaatcttccatcccatcttccacttccagcttcccctgttgtacacattggcccagttcagcagtctgccttggtatccccaggccagcagattgtctctccatcacaccagcaatattcatccctgcagtcctctccaatcccaattgcaagtcctccacagatgtcgacatctcctccagctcagattccaccactgcccttgcagtctatgcagtctttacaagtgcagcctgaaattctgtcccagggccaggttttggtgcagaatgctttggtgtcagaagaggaacttccagctgcagaagctttggtccagttgccatttcagactcttcctcctccacagactgttgcggtaaacctacaagtgcaaccaccagcacctgttgatccaccagtggtttatcaggtagaagatgtgtgtgaagaagaaatgccagaagagtcagatgaatgtgtccggatggatagaaccccaccaccacccactttgtctccagcagctataacagtggggagaggagaagatttgacttctgaacatcctttgttagagcaagtggaattacctgctgtggcatcagtcagtgcttcagtaattaaatctccatcagatccctcacatgtttctgttccaccacctccattgttacttccagctgccaccacaaggagtaacagtacatctatgcacagtagcattcccagtatagagaacaaacctccacaggctattgttaaaccacagatcctaacccatgttattgaaggctttgtgattcaggagggattggagccatttcctgtgagtcgttcctctttgctaatagaacagcctgtgaaaaaacggcctcttttggataatcaggtgataaattcagtgtgtgttcagccagagctacagaataatacaaaacatgcggataattcatctgacacagagatggaagacatgattgctgaagagacattagaagaaatggacagtgagttgctcaagtgtgaattctgtgggaaaatgggatatgctaatgaatttttgcggtcaaaacgattctgcactatgtcatgtgccaaaaggtacaatgttagctgttctaaaaaatttgcacttagtcgttggaatcgtaagcctgataatcaaagtcttgggcatcgtggccgtcgtccaagtggccctgatggggcagcgagagaacatatccttaggcagcttccaattacttatccatctgcagaagaagacttggcttctcatgaagattctgtgccatctgctatgacaactcgtctgcgcaggcagagcgagcgggaaagagaacgtgagcttcgggatgtgagaattcggaaaatgcctgagaacagtgacttgctaccagttgcacaaacagagccatctatatggacagttgatgatgtctgggccttcatccattctttgcctggctgccaggatatcgcagatgaattcagagcacaggagattgatggacaggcccttctcttgctgaaagaagaccatctcatgagtgcaatgaatatcaagctaggcccagccctgaagatctgtgcacgcatcaactctctgaaggaatcttaacaggaacatgaagccttgataaaacagcagttttacttttctcacaaaaacttgtaaggtaaaggcctaacttggtctagaatatgacacttattgtggtggatagccaagcacattgggatctccacatcaaatactgacatttcttctacaggtataataattcatcatgcattttcataattaataaacattggtaaaattaattttacaggttacatgaaacattgaaagacttgttacagagggccatgatatttttcaaagaaatgtgttatactagataatttttttaaaggtgatgtttatcattaatataaagaatccttttaaaagtaatttaatgatttacatttctcctcttttgattcaattttcttatacattttttctaccctattagttttctaaaggttgtcatgagaggtatattatggaataatttagtagtccagtgacagaatcgtatgaaatcagtgtacattttaaaaaacatgtcttttagacatatgctttatctataaaaaaggaattgtgttctagtatgaacaatactgatctggaagtgagaagagttagtttctattccaaacttgaccaagaatttggtttgactgagaacgttttcctctcagtttttgtacatttatttagagcagtggttctcagtggaggtcagttttgatcgccaggggacatctggcaatgttgagacattttggttgtcacagcttgggggtgggttcaggggagggttgctactggtgtctagtagttagaagccagagatgtttctaaacatcttataatgcacaggacagcacccctccactgtaaagaattattggttcaaaaatatcggtactgccaaggttgagaaactctgatatagaaggagtgataaatattgttttcacccaaaggaatacttttaaaggatgaagcttactaaacatatatgatggaagtattattcagataacattaatattctgctgaataattttttctagtttaatcatactagaaaaagaaaaaaaatctacaaattgtcctataaaataaggacaaacatgcaaataatttaactctcagaaagtactaattcattctgattatctttcatacctctgtgctcctctgcactgacgaagacataatatgattatacctatgaactagtgcacagccttttctggcaagaaaatagtttgtagcagatacgtggttgctctttggatttttttctattgttgaacatgctgggactagctagaatgcacattcctacttcctttaccaaacgtttgcatgcttcctgcaaagcacttaccaagtgatttctcttgaaccatcggatataattttgtatgtacatgtttgaggaaaaaaatgtaaagcaaaaccttttactgaacagtgttctatagaattatgacactaaaacaaaattgtttgtggaagccctgaaagctttatagtcctggacatcaaaaattttatttgagatgatgaatgttttgttttcatcttttcttatattaccacaattgagatattttagtaattgaaggaacatacacagatatttggcagaagtcgagtaaggaggggaaaaaaagagtccgtgagtttcagtcattttcactgctcttttcaaaaagattgtgttgagctggtagaagactaaagatgtcactgaagacatcacagatactatatttatcttttggctttgtgtacattagagaatgttgattatttttatacaaaaatacagcgggtaatttttttaatctttagatgcctcttgtttgaatgtatgctttgtggaattctttgtgtagtaatgttttaaaaaaagatgtttactgatagttacatgtaggattagaatatgtaatataatataaggctcatgttccagacctacgatagcttgtagtctatgttacgtatttctttatatcacatttttaatcattggattaaagtatcaaggaaagctaggtactctataatgagttttcatttattagcagttaatcatcatgacagaattgtcatatgcttgacttttccctcttcttggaatttcagaacacaaatacaggctaagcattagtaagagatggcccacagtatgagagagagaggtgcaacggaaaatctcgcctggaattaaaacttttcatagattatccacggttaatacaaaatttattatatggggatagactgctccagcaataatgattacatcctataactgtattacctatggcctttaaggtatcaattttgaactgtgttgtaggctctccttttatttgttctctttcctaatagcagccattctgtacttattgaaagcccctgtgcctactgctgtcttaagtattcaggaggggcttacaagagggttttctattggagaataccgtataatcttaaatctagtccagatctctgttgtccccactcaaaacatacacaaaatatgcacttgcttttttcaagtgagtttttatttaaaaatggcttgtttgctatcacattggtgcagctgtttctttcaagatgagttaatcatcttaatttcaaagcttcagctatatataatggatatatagacaacactgagcatccacctctctcctgagctttaaagcagagtttcagtatgatataggtggggagagtaaattgttttcatatcctttcatactactactaatagttttaggattttgactggggagagataatgacaaacagaaagggaacatggaggttcttcctacttttgctacctaagtttgcattttctgacttccttgcagtgttgcactctttgtcccattgggataaaaagcataagtttgaaattttgctttaagccttgtgttcctggggaagttaaacaactaagagagctgatttgtaaaaattattttttatatgacattaatattcatcaagccttgtgtaggcatgtgtaagacacagctatgcagctttgagtagtcaatatagtatgagatagagtgttgtcccaaatcctcctgtcactttttaagtagcatattatttccctgatggtcctgttactttgctgttgaatgctctaaacagaactttttaaaaggtgtgttttaagagcagtcacctaggagtagacaaggtggaatgggaggagagaaatggtaatgcaaaagcttgagcatgggaagagtcagaggaggaggccatcatccttgttagcttagcctacttcaacactgagcacatttctgcacttttgaagtgaaattcatgttttacttagaagaaataattttctttcattagggatcccagttgatttttgtttcctggtgtatcaaaatacttagaactatgaaacaagtattattgtgatcatgcctttgaataatttttgacgtagcttatcttcatgtatcaagtataaaattataatgagacatctattcacaaatacaagtcttagattgaattgaaatgtgttatagtgccctgtctcccactgacttgttcagttaaatgtcttaaagtacattatgtacatcttcaggcttttggtaccacaatggcacaagtatggtagggaggcaatatagtcttaggctatatgcctatattaagtgtgtataaacaatttttgaaagaatacactattatagatgtatgtgagtgatgctgacctgacagccatatccagtggatgaaactgactggacacactgttaaaatgttttaaagatgtattttcagccagaacagcctggttatagtttgtggttttcaccttggtggattgcaggaacacatgcagcctactggcattgagcattagctaatggcatgaaagggcctcatctcactacctctctaaggcctctagctccaagaaaaccatgaaaacttctttcttggagagatctttgtctcagaatccttagagaggatttcgtatgggggctaactttaggaagggaggcagctggggcaggactttctgatacctgacagtcatgttccagagcaacctttgggcagtggaaactggcgcatctatgcaaaatgattgctcaatctctatcttgtgtactacatatgtaactagctgggccctaaggaaggttttctagggggaaggatagggaagtagaggaggagacaagtaggaggaacaaagcattctagacccaagaggatagaagatatttaggatagatatggctttcatccatagttcaaaataatgcgttttgttagatgccagttatagcagtaaataggttatagtttttatatgtcaagatttacctgtaatcagactcattctttcactctctatacccactgtctccatgcttgggagcatggatattaatagttccagtgatgtagaagttagtgatttttgatttctgaaaaaggtgagaaccttttattacagttggagaatatttgtcaaaaattcaaaggttgttgtaattgagttgccagaattacagagtttccattttcagatatcacagttgaatcacctctgtagattgttataaagagaggcattttaagatagtattttatttgctaggttgtgtctcagtctaagaattgggaaaagaagagctataggtttctctttcctagtctggatttcagtaaacacaagcctacctctgcttctttggttcacagcagtgtggatcatgaaatgaactgtttacccacattcatcaatattggtattttacaaatctacttggagcatttaatttcatctcaaagattgtgatccactttagataagcacaaatacagtattaggaaaagtaaatatgcaatcttactaaaatttcaacttgttaagctgtatatcttaaaagaaattatttggggctgggcatggtggctcacacctgtaatcccagcactttgggaggctgaggtgggtagatcacctgaggtcaggagttcgagaccagcctgaccaatatggtgaaaccctatctctactaaaaacacaaaaattagctgggtgtggtggcatgcacctgtaattccagctacttgggaggctgagacaggagaattgcttgaacccaggtggtggaggttgcagtgagccaagatcacacccctgcactccagcctgggtgacagagcgagactccatctcaaaaaaacaaaacaaaaaattatttgggaagatacgtcctcttttattagaagttcataaaatgtatcatatagttttgttcacagtagttatataagctttcttcaaataaatttaaaattagattaccttctttggaaaaagaatttcctaaatttttaagaattttcaaagttttacatattagtttttagaacctaatccgttttaaaattgtactatgagaaagcttttttttgaaagttgtaaagcattaatacaaataatacaaatataattattaccatcacattccagagaatatggctttttctaaactttcaatttagaaaacatacattaagggagaatctctgccctccttttcagctctgaagatcagcttttctactcagacacatgcacacaccccttccaagtgtcatgtttatgggaacatttgggaaatgttttccagatgttttattttttcccttttatagtttgttgacatttaattttacttaaagatgacaattttaatcggaaatgttagaggtacaacatagtgaggttctagctagctttatacttttgaaaaatatttttgtttctactgctttttacaagtactagtcctctcagtgatactggtggtgttcagtatgaatccatagaaagaaaacaaaatttgttgtttaaaaaaagcagagtaatgaatgaatttcagttttgaaaacaacataatttgaaaacactgttatactaacatggcaaggtgttaattaaatataagagtaaggtagtaagttcttttagagcacctgtttaaatttactccagtaatcatcttaaggattgatagtcaccatcacttattggcttaaaagttatatttcatggaatattatcagtgttaaatccaagctttgtggagctttaagtgatggtggtgaaaaagttggtgtttatgagagagtggtggggtgtctagtcattagtgaagttaaacatcaacctgttttagaaagaattttttagtcttgcctaaagtaaaccagaagtgtctagtgtttaaatctttatttagaatgcttctcttaaaagtattttttgttttgggtagtattaaataatcagtaaataatctatttcagtagtaaataatgaattaagatgatgatgaatgaggattaacacactggtctggagactggggttttatttcagtgggttagctgtgtgtgacatgttgggcaattactcagctgttttaacagcttccagatatgcagtatggtgcctgtactactcaaaagttgattttggtttaattcatctttaaggtacctcccagctctaaaactatgattctaggctgtgtaatggggttattcctactttattctctttccttttttaagggttcattttatacttaataagcatccatttcttgggtcacctacagtctttgttctcctaaggattaaaatagaaaattcatacataacaagcaaatgatgacattttcctaaatgctccttattggttaaccactgaatatatgaacacatatgaatattgtcattcatgtacttaaattcatttagcaaactatttgaacacttacatgtgcagtgtttggtgaacatgacatgaggaactagtagtaagtaaaatcttccccccaaaattcattgtggcttaaataaatatgaacataatcattactacttaatatactgagagggaatcttaataaacttggaactgggagggaatatttgtatacattgggtaaagggttaggctagatgacatctaaggggtctgagtgaatcatatcataatttttataacacatttcacatactaaacatcagttggccccatacctgattaagttacaaaatttaggagacttaacattaaggacttacaggttgagacagcccgtatttcacaacattattttgacacttgactctattccagagttgttgctatacaaggcatgtggcagaacaaaaaaaaagctggtgttgatataagagctttttacccagtattgacagtgagcaactttctttctttttttttttttttcttttttttttttttgagatgggttcgctctgttgcccaggctggtgtgcagtggtgcgatctcagctcactgcaacctccacctcccgggttgaagcgattgtcttgcctcagccttccaagtagctggaattacaggtgcccgccgccacacctggctaatttttgtatttttagtagagacggggcttcaccatgttggccaggctagtctcgaactcttgacctcaagtgatccacctgccttggcctccctaagtgctgggattacaggcatgagccaccacacctgtccgacagtgtagcaactttctaaaactgaaaaatctcaaaggagatcattggaactgacttgttcatttattttttgtttttaaattaagaaagattacacaaaataagtgttactgtactttaagctattacaaatatccaacttttaaagatatgtaagaatcagtaatattctagaaagcacatatatagtaaaagggcatcctttaaatgtagaacgggtaaacatgaaacagttccatgcttgaattgttaagtatctagggggtaaacattgaatgggagaatcatttattgggttaaggtcccttccttgtcattctgggatctgtgaatcacattgtaattcctgttgacaaagctttacttgttaacatcagttgatactgacattctccataaagatatagaatgaaaatatctattaaaaatagtttatcattgttttagcttttttgttttgtttgttttgagacagagtctcactgtcacccaggcttgagtgcagcggtgtgatcttggctcaatgcaacctccacctcccaggttcaatagattctcccaccttggcctcccaagtagctgggattactggcatgcaccactatgcctggccagttttttgtatttttagtagagatggggtttcaccatgttggccaggctggactcgaactcctgacctcaagtgatccgcccacctcagcctcccaaagtgccgggattataggcatgagccactgcgcctagcctgttgcagctttttaaagcaggaaaatatccatataaactgttgggttagaatctatattagaatctttcaaactaattgaaaacaggaagactatcatctaagtagccagataatctgggtttcaaaaagttattccatggtactggtttaaaaaatacttttcaagtgttttaatttttaaagtgtaactaattcttcaaatatgttatgctgttaaaatatgtattccataagtactttttgtatatgtattcttaaattttaaaaagtcaactgaatgcgcaaagatgatataattttggatgtagacatttaaactagattcccagtcctctccttcaaaagcttggtctttgtttttcctatagggaaaaaagtcaaaataagttccaaaaactatcctcaaagtagtattgtgcttgtagtaaatgaaggttggatggatggatactgacaatggtggcaggcatttcaagccttttaaattagtactttttgtcgtcttgcttattaaaattttgttaattttagcaaagaccaattgttgtgataaactggtgttttttggatgcttcaagcacacgttaaccaattttttaattccccttttggttcctcccattgttctaaaataggactttcatattattaaaacctcaaaagatgatccacccaggatgaacaaagatcaccaaggggaaagaaaacattttttatctttacagaaaacatgttaagattatatatagatgtattctttacattggatattgtattagagtcctccttacaagaaatgaaatagtttttagcactcttagcattagagttcctagattggtgttgatagctacagttttaaaatgtataacctgaaaatgaaggttaattttgcattgtaagagcacatttgatctatgtaaaaagtgtccatttggtgtatttttttaaaaaagagaaagcactttcatattaagtagcatgtgtatgaatttagattttcatatttgttgtgtctgtattcagtgaagtaaattgagcatttaaatgtttgttgatggcaacattaactattaaattaaagcaccttatactctgctgcttaacttgcttgtaattgcacctttgttacctgcacattttcatatagaatattgttgtaacattgcttcatgtgggtctggatggaagattagtgggcctacaggatcatttatttatattgtttatattacaataatatattgtagatcagttgtaagttcatttctttacaaataaaagcctcttccatttgactggaaaaaaaaaaaaaaa

SEQ ID NO: 939 - DNA, 5760 bp, Homo sapiens
gttgcatttccgggcactggggctccgccatcgtcgccaagcgcgtccccgccgcgagccgctaatcgtccgccgctcccgttaccggggcaaccgcggcgcctcctccgtgtcggccccgatcgtccctccgcgccattttcaaactgctctagcgccggagcccgtgcctggacggaaggagctagtgggggactcgaggcctgagggcaatgcggctggaggcggaggcaacggcggctggagctgccggactttaatttttggaagtgaataaaacttgttttagaagacgagatgactacagctgtagagagaaagtatattaatattaggaaaaggctggatcagctgggataccgccagactctgacagtggagtgtttacctttggtagaaaaacttttcagcgacttagttcatacaactgagagccttcggcaatcaaaattatctgctgtgaaagctgaaaaagaaagtgccaattttgattttgttttggaaccctataaacttgaaaatgcaagattgagtagagaaaataatgaattatacctagagttaatgaaactgagagaacattcagaccaacacgttaaagagttgaaaacttcattgaagaaatgtgcacgtgaaacagctgatctgaaatttctgaataaccaatatgctcataaactcaaactgttggagaaagagagcaaagctaagaatgaaagaattcaacaacttcaagaaaagaatttgcatgctgtagtacaaactccaggtggcaagaaaagaagtattgctttcaggcgccagcgtatgcaaattgatgaaccggttcctccctctgaagtcagttcatatccagttcctcaaccagatgacccttacattgcagacctccttcaagtggctgataacaggattcaagaacttcaacaggaagtccaccagctacaagaaaagttagcaatgatggaaagtggggtgagagactatagcaagcagattgagctaagagaacgagagatagaacgactgtcagttgctttggatggtggtcggtcccctgatgtcctttctctggagtctagaaataaaaccaatgaaaagcttattgctcatttaaatattcaggttgactttcttcagcaagctaataaagacctggagaagcgtatacgagagcttatggaaaccaaggaaacagtgacatctgaagtcgttaatttaagtaacaaaaatgaaaaactctgccaagaattaactgaaatagatcagttagcacagcagttggaaagacataaagaagaagtgcttgagactgctgataaagagcttggggaagcaaagaaagagattaaaagaaagctctctgaaatgcaggatcttgaagaaacaatggcaaaacttcagctggaattgaacttatgccagaaagaaaaggagagactgagtgatgaactccttgtaaaatcagacctagaaactgttgttcatcagcttgaacaagaaaagcaaagacttagcaaaaaagttgaaagttttgcagttacagaacgacaacttactctggaggttgagaggatgagactagaacatggaataaaacgtcgagacaggtcaccttctcgtttagatacatttctgaaaggtatagaagaagaacgagattattataagaaagagctagagagactccaacatataatacagcgaagatcttgctctacaagttatagcgcacgtgaaaaaagttcaatatttagaacaccagaaaagggtgattacaattcagaaattcatcagatcacaagagaaagagatgaacttcagcgtatgctagaaagatttgaaaaatatatggaagatatacagtccaatgttaaattattgacagcagaaagagataaactaagtgtcttatataatgaagctcaggaagaattatctgccctaagaaaggaatccacccaaaccacagcaccccataatattgttagtcttatggaaaaggaaaaagaacttgcgttatctgacttaagaagaattatggcagaaaaggaagctttaagagaaaaattagagcatattgaagaagtgagtctttttggaaaatcagaattagagaaaactattgaacatttgacatgtgttaatcatcagcttgaaagcgaaaaatatgaattaaagtctaaagtgttaataatgaaagaaacaatagagtcgttagagaacaaattaaaagtccaagctcaaaaatttagccatgtggctggtgactcatctcatcagaaaacagaggtgaactcacttaggatagtgaatgagcagctacagcggtcagttgatgactatcagcaccgactttccataaaaagaggtgaacttgaatcagcccaagcacaaattaaaatactggaggaaaagatagatgaactaaaccttaagatgacttcacaggatgaggaggctcatgtaatgaaaaagaccattggtgttattgataaagaaaaagactttctccaggagactgtagatgagaagacagaaaagattgcaaatttgcaagaaaacctagctaataaagaaaaagctgttgctcaaatgaagataatgatctcagagtgtgaatcatctgtgaaccagctgaaagaaacattggttaatcgagatcgtgagataaacagcctccggcgccagcttgatgcagctcacaaagaactcgatgaagtaggaagatctagagaaatcgcttttaaggaaaacagaagactgcaagatgacctggctacaatggcaagagaaaatcaagaaatctcattggaattggaagcagcagtgcaagaaaaagaagaaatgaagagcagagttcataaatacataacagaggtgtcacgatgggagagcttaatggctgccaaggaaaaagaaaatcaagatttgttagatagatttcagatgcttcataaccgtgctgaagactgggaggtcaaagcccatcaagctgagggagaaagcagctcagttcgactggaacttctttctattgacactgagaggagacatcttcgagaaagagtggagctattagaaaaagaaattcaagagcacataaatgcccatcatgcttatgaatctcagatctcatcaatggcaaaagccatgtctcgattagaagaagagctgagacatcaagaagatgagaaagcaacagtattaaatgacttgtcatctcttagagaactttgcattaaacttgattcaggcaaagatattatgacccagcaattgaattcgaaaaaccttgagtttgagagggttgtggtggaattagaaaatgtaaagtcagagtcagacctactgaaaaaacaactttcaaatgagagacatacagttaaaaacctcgaatcattgttggctacaaacagagataaagaatttcattctcacttaacctcccacgagaaggatacagaaatccagctacttaaggagaagttaaccctttctgaaagcaaattaactagtcaaagccgggaaaacaccatgcttcgagctaaagtggcacagttacaaacagattatgatgctctgaaaaggcagatctcaactgaaagatacgaacgagaacgagcaatccaagagatgcgtcgacatggtcttgctacaccaccccttagttccactctgaggtctccttcacattctcctgaacatagaaatgtgtaattatcagaaagaataatggctttcaatgagttcctatgtggatttttaaaagaacagaacagtaatgaaatatttgaagtacttgttgctgaaaatcatgaacatggacacaaattctacctctgtcaacttttatttaaatcagtgaatatgttaaaaagtttggtttaaaagaactatatctatatgtatattttcatatatatgacagaacaagaatatgtattaatagtgcctaatgtatctatatttttattattcatgaattaaattactaaaagtatgtttatactgtgaattaatataatgtattcacattattctttaataatctgtttattaataagccatgatatgtgtatgtaaatattcttacagtacttgtttttagttgtcatgcctatgtttagaccatatcttaatgtattcacaaagaattatcaactttgatgctatgctgtcatgcttaactttttcttcttaaaattattcatagatctactgtctgttgtcaaggggaatatattcaggtctagtcttcttataatagcagaggtcttggtaaaataactaccatatataacgtgttattgccatctagaagaactatgatgagaaagatacatttatatattatgtaaaatgttaactatcatcatatggactctatgtaacacaaattcaaaagcaaactaaaagctatatgcagagttttgtataaaacaatagaacagaaatttgggacatttttctaggaaataaaattcctcggtgtattaatctaaggtttcaaagtataaaagtatatggggtaggccgggtgcagtggctcacgcctgtaatcccagcactttgggaggccgaggcgagtggatttcctaaggtcaggagtttgagaccagcctgagcaatgtggtgaaaccccatctctactaaaaatacaaaaattatctgggcttggtggcgggcacctgtaatcccagccacttgggaggctgaggcaggagaattgcttgaacccgggaggtggaggctgcggtgagccaagatcatgccattgcactccagcctgggtgacagagtaacactctgtctcagaaaaaaaaaaaaagaaaaatatatggggtaaatacagtaaaacgttttgttaaattccaatatacattcagtgataccactctttttcttctaagcctgtgtgttataatttaccagttccccaaaatgccatttttaacgccgaactgtgtaatatacatggaaaacagctttttacaattaattttcaaagttgtaattttaaagaatttgggtgtatacctatgttaatgaaacaacagaagtacaaaaaagaatatcagatacaaaaatcaatcgtgaagaaaatctgttcttaatatatttcattatgattgaaaaacataaaaactaacataggaaagtgaatgatcagttacttatgatatattttgtttcctcttgtggtttaataaagtgaagtgtgtgtgtgtgtgtgtgtgtgtatacctgggggtgggcagtgctctttttctaaaactaatatggcttatatatctgaattatgccctttttagtgtgtattaggatgtgggctggtttgcttttctaccacctttgtaattttatgtatcccatctcctttgtgtgaattcatatattatagcaaaatacaagagacatgggactgtttgcaataccatatggaaatcttttaataaatatatgtaaataaaataaaaaatatttgtctccaccttttccccaaaagcaacagcaagacatattttgttagatattttatttttaatgttttctataatttaaaaatgtatagcctgccaaatgttgttttcataaccatgatattgttttgaaaaaattttatcttaaaatactgaatgttctgaccttttatagatgtttttgattttgttttaaataattttaaattatggagcttgacctagatttgccaataaactttctagcctattaaaaaaaaaaaaaaaaaaaaaaaaa

SEQ ID NO: 940 - DNA, 4156 bp, Homo sapiens
actcagccctgggaggtgactgagagtggaggggattcaagggggatgactccagcagagcacctcactcctttgaagagcacagaggaagatgtcagcccagtcccttcctgcagcaacaccccccacgcagaagccccctcggatcatccgcccccgccctccttctcgttccagggctgcccagtccccagggcctccccacaatggctcctctccacaagaactaccccgaaactccaatgatgcaccaaccccaatgtgcacccccatcttctgggagcccccagctgcatccctcaagccccctgctcttttgcccccctcagcttctagagccagcctcgactcccagacttccccagactcaccttccagcacccccacacctagtccagtgtcccggcgctccgcctccccagaacctgctccccggtctccagtccccccacccaagccgtctgggtcaccctgcacgcctctgctccccatggctggagtcctggctcagaatggctctgcctcagctcctggcactgtgcggaggctggctggcaggtttgaagggggtgctgaaggccgggctcaggatgcagatgccccggagccaggtctccaagcgagagcagatgtgaatggggagagagaagctcccctcaccgggagtgggtcccaggagaacggtgctccagatgctggcctggcctgccctccctgctgcccctgtgtctgccacaccacccggcctggcctggagctcagatgggtgcctgtggggggctatgaggaggtccccagggtcccccgtcgggcctccccgctgcggacctctcgctcccgcccccaccctccaagcatcggtcaccctgccgttgtcctcacatcctaccgctccactgctgagcgcaaactcctgccactcctcaagcctcccaaaccaactcgtgtcaggcaggatgccaccattttcggggaccccccacagccagatcttgatctgctttctgaagatggaatccaaacaggggacagtcctgatgaagctcctcagaatactcctccagcaactgtggaggggagggaagaggaggggctagaggtgctgaaggagcagaattgggagctgcccctgcaggatgaacctctgtaccagacctaccgagcagccgtgctgtcagaggagctgtggggggtgggtgaggatgggagtccttctccagcaaatgctggagatgcacccaccttcccacgaccccctggacctcgcaacaccctgtggcaggagcttccggctgtgcaagccagcggtcttctggataccctcagcccccaggagaggcgcatgcaggagagtcttttcgaggtggtgacgtccgaggcttcctacctgcgctccctgcggctgctgaccgacaccttcgtgctgagccaggcactccgggacacgctcaccccccgtgatcaccacacactcttctccaatgtgcagcgagtccagggagtcagcgagcggtttctagcaacgctcctgtcccgtgtgcgctcttccccccacatcagcgacttgtgtgatgtggtgcatgcccacgctgtggggcctttctcggtgtatgtggattatgtgcggaaccagcagtatcaggaggagacctacagccgcctcatggacaccaacgtgcgcttctccgccgagctgcgccggctgcagagcctccctaagtgtgagcggctcccgctgccgtccttcctgctactgcccttccagcgcatcacccggctgcgcatgctgctgcagaatatcctgcgccagacagaagaggggtccagccgtcaggagaatgcccagaaggccctgggtgctgtcagcaagatcatcgagcgttgcagcgctgaggtggggcgcatgaagcagactgaagagctgatccggctcacccaaaggctgcgcttccacaaagtcaaggccctgcccctggtctcctggtcacggcgcctggaattccagggagagctgactgagttagggtgccggagggggggcgtgctctttgcctcgcgcccccgcttcacccctctttgcctgctgctctttagcgacctgctgctcatcactcagcctaagagtgggcagcggttacaggttctggactatgcccatcgctccctggtccaggcccagcaggttccggatccatctggaccccctaccttccgcctctcccttctcagcaaccaccagggccgccccacccaccgactactccaagcttcttccctatcagacatgcagcgctggctgggagccttcccaaccccaggcccccttccctgctccccagacaccatctatgaggactgtgactgttcccaggaactgtgttcagagtcgtctgcacctgccaagactgaaggacggagtctggagtccagggctgcccccaaacacctgcacaagacccctgaaggttggctgaaggggcttcctggggccttccctgcccagctggtgtgtgaagtcacaggggaacacgaaaggaggaggcaccttcgccagaaccagaggcttctcgaggctgttggatcttcttcaggcacccccaatgcccccccaccctaatgcaggctgaggagggggcacatgttgggagacacctaccagtgtggcacggagagaacaaagcccattcatccattggattcactgtcagtggagatactacctctcgtggcaaccatagagatcgagcttcaggacagagcagccaatgaaaacggccgcctgaacccacagcaataagaatgaatgaggatgccttgaatgtgtggccaatggagacagaggcttagtgcagagcagccaatgggtactgagctggctgagcctatggccaatgagtattcctgctatgctcagggccaaggaagacaaatctaggtcatggcagttgaaaaagggcctcattggagataaagtcgtaggataaaattgggaacaggaatgagcaggaagccaatcagccaaagaaaatggtgatctggacccaagagaccagtagtcaccctgcttgtttctgcagcaatgactggtcctgtcttttgagtctgggaaatactagtttccattcctggatgcttcctgtgccctctcaagccagttcttctcttccagaagaattcagagtatgtgtctcagaaaatctgtgtgtgtacatgtgcatgtgtagatatgtgtgtatatgtatcaggaaaggcattctgctgactgtggtgtgtgtgtggtgattgtgctcctgacccacaaatgactgagtgctccatttcttcctttaccccccatttttcctattattcgctccaagaaagatgctaagtctgagctccagaagagactgtgctgggtgtggcttggcacccaggggatgagagccctgagctttgggtctcttggaggctagggttctgtggcagttgcagggcaatgttatggagcagccaacggcctggcagaggagcccaagggactgaagatggccagtagctgggtcctgaggcccctgaagtctgcagacccttctccttgccccaaacactggcctccataattcctgcctgcagatctcccaacttgaactataatccaccagccagcctcagccttgagctttggaaccacattagatcctgcatctgggtgaagaaacgggagctgtggaccacaggccagccagtgaacctcctgggctttcttgcctttgtcctgatcctctcacagaaacactgggccaaacagtggggagagattggagagcgggtgtggctgcccaaccccatccagagcatctgcttccagatgagccagtgcctcgcatgataccagaggaggcgagggacagagacagcaaggcagacagtggctggcaggggggcccaggcccgggacgaggcctccccttcagctcaggcacagcaacttgcccaggactgacactgtcaccctgactgcaggaggcacagggactccgggagactcagagggcgaagagcactggcatttggcatgtccatgacattggagactcccctagcagggtgcctgacgtgtggggaaccctcagtaaatagtggtgcatttgtattgagaaaaaaaaaaaaaaaa

SEQ ID NO: 941 - DNA, 8176 bp, Homo sapiens
gagagcgagagtgagtgagtgtgagtgcggggtggggtggtggccgttacgttcggggcaacggctacggcagtggagaagtaagaagagaaacaacgtccggcgcttccgccttcgcttaggaggaggaagagctggtagggaaaggaaagtgcttcgccctgggcctggactggaccgagtcgggttggtgggggtctgggctatgagcttttgagggtcgcctgggacgcggagcgagacacgagagccaggagctatgtctcagccgccgccgccgccgcctccgttgccgccgccacctcctccccctgaggctccacagactccgtcgtccttggcgtcggcggctgcttcgggggggcttttgaagcggagagaccggagaatcctttccgggagctgcccggatccgaagtgtcaggcgcgtctatttttcccggcctccggttctgtcagcatcgagtgtaccgagtgcggccagcggcacgagcagcaacagctgctgggggttgaggaggtgaccgacccggacgtagtgctacacaacctgctgcggaacgcgctgctcggggttacgggggcacccaagaagaacacggaactggtaaaggtgatgggcctttccaactatcactgcaaattgttgtcgcccatattagctcgctatggaatggacaaacagacaggccgggccaagcttctccgggacatgaaccagggcgaactgttcgattgcgccttactgggtgaccgcgccttcctcatagaaccagagcatgttaacactgtgggctatggcaaggaccgctccggaagcctcctgtatttgcatgacactctggaggacattaagcgggccaataaaagccaggaatgtctcattccagtgcatgtggacggggatggacactgcttggtgcatgctgtgtctcgggctctagtaggccgagagctcttctggcatgccttaagagagaatcttaaacagcactttcagcagcacctggcccgatatcaagctctgttccatgacttcattgatgctgctgagtgggaggacattatcaatgagtgtgaccctctgtttgtaccacctgagggtgttcccttgggcctgaggaatatccacatatttggtcttgccaatgtgctacatcgtcctattattctgttagattccctcagtggcatgagaagctctggtgattattcagccacctttctacctgggctcatccctgcagagaagtgcactgggaaagatggtcatttgaacaaaccaatctgtattgcatggagcagctccggtagaaaccattatatccccttggtaggcataaaaggggctgctttgcccaaactgcctatgaatttgcttcctaaagcatggggtgtgcctcaggaccttattaaaaagtacataaaacttgaagaggatggtggttgtgttattggaggtgacagaagtttgcaagataaatacttacttaggcttgttgctgctatggaagaagtctttatggacaaacatggtatccatcctagtttggttgctgatgtccatcagtatttctacagaaggactggagtgataggagttcagcctgaggaagtcacagcagctgctaaaaaagcagtaatggataatcgccttcacaaatgtttgctctgtggtgccctttctgaacttcatgttcctccagagtggttggctcctggagggaaattgtataacctggcaaaaagtactcatggacagctgaggactgacaaaaattacagctttcccttgaacaatttggtttgctcatatgattcagtgaaagatgttctggtaccagactatggaatgagtaacctaacagcttgtaattggtgccatggcacatctgtgcgaaaggtcagaggagatgggtctattgtgtatttggatggagacagaactaattctaggtccactggtggcaaatgtggttgtggattcaaacacttttgggatggtaaggagtatgacaatctaccagaagctttccctattactttagaatggggtggaagagtggtcagagaaacagtatattggttccagtatgaaagtgattcatctttgaatagtaatgtttacgatgttgcaatgaaacttgttaccaagcactttccaggtgaatttgggagtgaaatcctagttcagaaagttgtccacactatattgcatcagactgccaaaaagaatcccgatgattatactcctgtaaatatagatggtgctcacgcccaaagagttggagatgttcaaggacaagaatcagagtctcagctcccaactaaaattattcttactggacagaaaacaaaaactttgcacaaggaggagttaaacatgagtaaaactgaaagaactattcaacagaatattacggaacaggcttctgtaatgcagaaacggaaaacagagaagttaaaacaagaacaaaaagggcaacccaggactgtttctcccagtaccattcgtgatggtccatcctctgcacctgctacacctaccaaggctccctattcaccgacaacttctaaggagaagaagatccgaatcacaactaatgatggacgacagtccatggttacccttaagtcttcaacaaccttttttgaacttcaggaaagtatagccagagaattcaacattcctccatatttacagtgtattcgatacgggtttcctcctaaagagttaatgccaccacaggcaggaatggaaaaggaaccagttcctttacagcatggcgacagaattacaatagaaattctaaaaagtaaagctgaaggtggtcagtctgctgcagcacactcagcccacactgtgaaacaagaagatattgctgttactggtaaactgtcatctaaggaacttcaggagcaagctgaaaaagaaatgtactccttgtgtcttttagcaacattaatgggagaagatgtatggtcttatgcaaagggacttcctcacatgtttcagcagggtggtgtattctacagtattatgaagaaaaccatgggtatggctgatggcaagcattgtacttttccacatctgcctggcaaaacctttgtctataatgcttctgaagatagactggaattgtgtgtggatgctgcaggacatttccccattggtcctgatgttgaagatttagttaaagaggctgtaagtcaggttcgagcagaggctactacaagaagtagggaatcaagtccctcacatgggctattaaaactaggtagtggtggagtagtgaaaaagaaatctgagcaacttcataacgtaactgcctttcagggaaaagggcattctttaggaactgcatctggtaacccacaccttgatccaagagctagggaaacttcagttgtaagaaagcataatacagggacagactttagtaatagttccactaaaacagagccttctgtattcacagcttcttctagtaatagtgagcttattcgaatagctcctggagtagtaacaatgagagacggcaggcagcttgatcctgatttggttgaggcccagcgaaaaaaattgcaggaaatggtttcttctattcaggcttcaatggacaggcaccttcgggatcaaagtacagagcagtcaccatctgatcttcctcaaaggaaaacagaagttgtgagttcttctgcaaagtctgggagtcttcagactggtttgcctgaatcttttcctttaactggtggtactgaaaatttgaatacagaaacaactgatggctgtgtagcagatgcactgggagcagcctttgccacaaggtcaaaagcacaaaggggaaattccgtggaggagcttgaagagatggatagtcaagatgctgagatgactaacacaactgagccaatggatcactcttgatttaattagaggctaataaaggcagaatgtttattgtgaatatgtaatatttgttggctgggccacgtaacttgattagtcattaaaaatcttgtacgtatataattcaaagattatatcttgttattcagtgcatgatagcaagtgtgtgattggccatagcttttaatatactgctgcccaggctggctctgaatttctataaattagctgttagatctgctgagatgactttcttccatatatgtggttcattggaagttctttgtaattttaattccatgaaagtcttaatgtttccaacatgaaaattctcttacttaaatacgtttgatttctgaaaagcctacaaatggaggggaaatgagattgtgctaatgttgatgtcatcaaggtaaccatctcatatactagtgtcaaaaggtttatgtaaacttgaattttatctgaactaaattgtatcttaaaattcatacaattatttattagacagtggaatgcaaatgtttctatgaacgtaaacacattcatagagatttcttggcgaaaatatcttgagaatagaatgtaacgatataacattttgctgatttgtgcaagattggggaaaaatttcttctagattgatgaggtcaatgtgattcagttgtgttgctgtctgagccacagccaattgtgtgtgctctattaatatgttaccattatttttgattcctggcttggtcaagaacaacctgatttttttttttttaatcttgcagaaaagttgattgcaaagtgtggtagaaaaagaaataatggtagcagtagagaatttataaataagagtttatctttatgaatgagttaattgttctacaattttgatcagtggtatttaagcctgtatatgctaagtgtatttatgcccctttgagccaaaatttttttttttttttcagaatccataagagtttatttgttggcttcacttgggtttagatgcaaattttactgcatcacaccctgatcagctgggtatttgcttagtgtattcatcaaatcttcagtgccagtttccttgagaagcagctttcatgcttattccttaaaaacaacagaagagtgtttatcctgagattggtattgcactattttattttattctgcaaatctgtatcctgaagtgtacatttcaacccatattcttctctgttcactgaaattaagttgaatttgaatggctgaaagacaaaatatatgttaatacaatctcttacctagagcattcaaagcctggctgtctctgtttgcacatgtaacagatgcagaactgtgtttgtaattctaagaaaatgtatgtcagaaagtattttatcagatgtttaaaaatctctgcctgttgattcataagggatatagacagtactttaacttgtgtttccagataaggcagattttggtcatctttctgtgaaagtatctctaactgaatccacttcttaaacaaactactctattttaaataaggaaagaatggagaatctagacattttacaggtgtatctgagcaaaatatatatttgggttagtttttatcacattatcacgtttgtctttatattttatcttcatcctaaattttctccctatcaaaacagcaggaaatttttaaacttttatattgtacactatttttgcataaaataagagctgtagctaccaaatactatttactacttagtaaaggtggcttctgtgtattaaactacgaattacaaatatcacttcactaaccactataattatttttggctttttcagccactggaactttttttggggggatttaaatacaggaaaactgtttaagcaaaaaatgcactgctttcatgtaaaatgatataatcttctttaacaaatattttcttcattgataactgacagatatctcatagcattaacataaaataccagaaacaaactttatctccctattcttacatttagtgcaaattggaatgcgtatgtgaatgttagaagatggacttaatctctgacaactttattaatttctctagctacagcaatgctatttaaaagccagttaggtatgaatagtacagtaatagtttgggttctcccttgataaatgaataaaaggctcaattctgataagtgatcaaatttcttgaaattctttcaaatcagctgaaaatttggttggggtgaattgatggtttttgagaagtaggccaggtatcctcacaaagaagttttagaatagggtttcttttaagtttttaaatatcatcctttgtctttccatatggttttcataaccaaatacatgactatagcatggttatttttctagtactgccatttgtgatatagccacatcttggcgtgcaagctagacatctcaggtaaatttgtttttttttttttttttagccctagaggtaacattataactaaaatgcattcctgcaattctgtttgcagtgcttcactaaacattgaaataaagttgtaaattttttcttcagtaatccattttatagttaatcataccaaatttaagttgatgacctaaagtccaggtagtgttgaagatagtatgtatctagaatactggtaatgagaaattgttgtaaattgaagaaaacaagatgctgccatatattaagatagaatataattaactccatgagaatggttactcaggaactagttaaagagcaaacccatttctcccgcttcactctgtttcagatatttttattggaaaatgttagggtagaggcctgagaaagttagcaaatgctattgactgatactggctctgtgtcttccagtgatttttagtttggtttttacagtcaagcctactgcttgcaattaagatatcaatctgaaatgcatctgtaattcctggccacaggtccttattgccattatttttaagtatcttcattggagatgaacactgacttttgcatatggtctcttacctcagggaagatcacttgctagcaactcatactactaatgacaggtttttgagaattgtactgacatcacatgttagctactaaatgcaaaatgtataaaagtattgttttatgtagttacctaccaatactatctgctactgaataactctctaaatatgtagacctcactaataactaacctttaggtaaaaaatttacttctgtcattaattacacttcaactggtcaatatagtggcagcataaagtgtttatttcagaatatcaatacagttttgtcttcatttttcaacagtaatttcaattggttcatacttaaaatactacacagattttgagttttatggttctcaaagcaaggtttccatcttaagatttttataaacacaaagcctttgcaaaattggattaaattccacctatcttaatgtgaattaaaaaccaccatttataataataatagcgccatattctaagttgagtaaatgcatcctaccattcaaggttatcatataatttaacaaaattgtacaaccttaaggctcttcacagtataaattaatttttcaaaccagagctgttcacatgaaaatattccttagtagaatgtatatttaagaaataaaacaacaaaggggaactatatcacccatgtaagttatagagttaattacaagttctaccattcttgataattctttgagatgctaagtgtttcagttcatatttaatgatacttaaatcgtgggaattttaatgtttgttccaaaatagcagaaattgtaaaaattatgaattattggagaaaatgccattacttgtatatctgacatttaattttttaattatggagactacatgcttttgtagtataatattaatgattattctcttgtaaaagaaaaggaaaaattagtaaagaaaaaagttttagttgatgttacctgcttgtgagtatcaattacttagtttttaaatttttaaggtattgcctacttttctttagaatgcagaaatctcgtcctgagcccttattatgcctgtggtagagcaatgcaagactgaaaaggttgccagtattttcaggcttatttgactaagaattagtgccaagaactggaaagtctactttttggagggaaatgatacttagaatttgtaaacataagcagtaatagtgtaaatatttagaaaaatagcaagtgctttaactgctcaataaaatagtatagatgttatttcacccttaa

SEQ ID NO: 942 - DNA, 15643 bp, Homo sapiens
aactttaaaaagctgcttcggacaaaccagagccaggatttccactgtcggggacccgggatcggaagggtctagcccgagggaaatgctggaagatcccatcggccagtgaccagcaactttccggcgagattttgacgcggagaactgtgctctgcctcctcttattctcccaaagctcacgttggcgtcctgccttgcgggggaactcggcgcgctctctgcctgagcagcgagtgaattgaaccccagcccgctccggcgcctccgggctgatgagtgtcgctctccgcccgtccatctctttttcccggaggtaaaggcccgcggtcccccaccttcagtgcgcccgggttccaagcgccggagccagcgttttggcggagccgcttcttggatgctgaaggctgggctcctccatcgtgggtgccgaggcggcgatgggtgtcctcaaagtgtggctcgggctggccctagcgttggcggaatttgcagtattgcctcatcattccgaaggtgcttgtgtctatcaggattccttgttggcggatgccacaatttggaagcccgattcatgccagagctgccgttgccatggtgatattgttatctgcaaacctgctgtttgcagaaaccctcaatgtgcctttgagaagggagaagtgcttcaaatagctgccaaccaatgctgtcctgagtgtgttttgaggactccaggatcttgccatcatgaaaagaaaatccatgagcatgggacagaatgggcctcttctccatgtagtgtgtgctcttgcaatcatggggaagtccgatgtaccccccaaccatgcccaccgctgtcatgtggacaccaggagctggcattcatccctgaaggaagctgctgcccagtttgtgtgggccttgggaaaccctgttcctatgaaggccatgtgtttcaggatggggaggactggcggctgagccggtgtgccaaatgtctgtgtagaaatggggttgcccagtgcttcacagctcagtgtcagcctctattttgtaaccaggatgagactgtagtccgagtccctggaaaatgttgcccgcagtgctctgcaagatcctgctctgcagctggccaagtatacgagcatggtgagcagtggagcgaaaatgcctgcaccacgtgtatatgtgaccggggtgaggtcaggtgtcacaagcaggcctgcctgcccctgagatgcggaaagggtcagagcagggctcggcgtcatgggcaatgctgtgaggaatgtgtgtctcctgccgggagctgctcctatgatggagttgtgcggtaccaggacgaaatgtggaagggctcggcctgtgagttctgcatgtgtgatcatggccaagtgacctgccagactggagagtgtgccaaagtggagtgtgcccgggatgaagaattaattcacttagatggaaagtgttgtcctgaatgcatttcaaggaatggttattgtgtttatgaagaaactggagaatttatgtcatcaaatgctagtgaagttaaacgtattccagagggagagaagtgggaagatggcccttgcaaggtgtgtgagtgccgaggggctcaggtaacttgctacgagccctcttgcccaccatgtccagtgggcacactggccttagaggtgaagggacagtgctgtccagactgcacatcagttcattgccatccagattgtttgacatgctctcagtctccagaccactgtgacctctgccaagatcctaccaagttactgcagaatggatggtgtgtgcacagctgtggactgggtttttaccaagctggcagtctctgtttagcctgccagccccagtgctccacgtgtaccagtgggctggagtgctcatcctgccagcctcccctgctgatgcggcacgggcagtgtgtgcctacctgtggggacggcttctaccaagatcgccattcctgtgcagtctgccatgagtcctgtgcaggttgctggggcccaacggagaagcactgcttggcctgcagagatcccctccacgtgctgagagatggcggctgtgagagcagctgtggaaaaggcttctacaacaggcagggcacctgtagcgcttgtgaccaatcctgtgacagttgtggccccagtagccccaggtgtcttacctgtactgagaagacagtgctgcatgatgggaaatgcatgtctgaatgccctggcgggtactatgctgatgccactggcaggtgcaaagtttgtcataactcatgtgccagctgctctgggcccacaccctctcactgtacagcctgcagcccccccaaggctctgcgtcaaggccactgtctgccccgctgtggagagggtttctactctgaccatggagtctgcaaagcctgtcactcctcctgcctggcttgtatgggtcccgcaccctctcactgtactgggtgtaagaagccagaggaaggactgcaagtggagcagctgtctgacgtgggcatcccctctggcgagtgtctagcccagtgtagagcccatttttacttggagagcactggcatatgtgaagcttgccaccagtcctgtttcagatgtgcagggaaaagcccacataactgcacagactgtgggccttcccatgtgctgttggatgggcagtgcctctcccagtgcccagatggctactttcaccaggaaggtagttgcacagagtgtcacccaacctgcaggcagtgtcatgggccgttggagtctgactgcatctcctgttaccctcacatctctcttaccaatggtaactgcaggaccagctgcagggaagagcagttcctcaacctcgtgggatactgtgctgactgccatcacctgtgccagcactgtgcagctgatctccacaacactgggagcatctgcctcaggtgccagaatgcccactacctgctgctcggggaccactgtgttcctgactgcccttcaggatactatgcagagagaggagcttgtaaaaaatgccactcctcctgcagaacctgccagggcagaggacctttctcctgctcctcatgtgacaccaacctcgtgctgtcccacactggcacctgcagcaccacctgcttccctgggcactatcttgatgacaatcatgtttgccagccatgcaacacacactgtggaagctgtgattcacaggccagctgtacctcctgccgagatccaaacaaggttctgctctttggggaatgtcaatacgagagctgcgccccacagtactatcttgacttctccaccaacacgtgcaaagagtgtgattggagctgcagtgcatgcagtgggcccctgaaaacagactgcctgcagtgcatggatggctatgttctccaggatggggcctgcgtggagcagtgcttgtcatcattttaccaggactcgggcctctgcaagaactgtgacagctactgtctccagtgccaaggtccccatgagtgtacccgctgcaaagggccatttctcctcttggaagcccagtgtgtccaggaatgtgggaaggggtactttgcagatcatgcaaagcacaaatgcacagcctgccctcaggggtgcttgcagtgcagccacagggaccgttgtcacctctgtgaccatgggttctttctgaagagtggcctctgtgtttacaactgtgttcctggcttttctgtccacacctctaatgaaacatgttctggcaaaatacacacccctagtcttcatgtgaatggttccctgatcctcccaattggttcaataaagccactggatttttccctcctgaatgtccaagaccaggagggtagggtcgaagatctcctatttcatgttgtgagcactcccaccaatggtcagctagtgctctcaagaaatggaaaagaggttcagctggacaaggctggccgttttagctggaaagatgtgaacgagaagaaagtgcgttttgtgcacagcaaagaaaaactcaggaaaggttaccttttcctgaaaattagtgaccagcagttcttctctgagccacagctgatcaacatacaagcattttcaacacaggccccctatgtgctgagaaatgaagttctccacattagcagaggagagagggcaaccatcaccacccagatgcttgacatccgagatgatgacaacccacaggatgtggtcattgaaataatcgatcctccacttcatggccaattgcttcagacacttcagtccccggcaacccctatctatcaattccagctggatgaactctctagaggccttctccactatgctcatgatggttcagacagcacatccgatgttgcagtcttgcaggccaatgatggacactccttccataatatactgttccaagtgaagaccgtgcctcagaatgacaggggtcttcagcttgtggctaattcgatggtgtgggttccagaaggggggatgctgcagatcaccaacagaatcttacaggccgaggctcctggtgccagtgctgaagaaatcatctacaagattacacaagactacccccagtttggggaggtggtccttctagtgaatatgcctgcagacagccctgcagatgaagggcagcacctgcctgatgggaggacagctacccccaccagcaccttcacccagcaggacatcaatgaaggcatcgtatggtacaggcactcaggagccccagcccagagcgactccttccgcttcgaggtgtccagtgcctccaatgcccagacccgcctggagagccacatgttcaacatcgcgatcttaccacagacacctgaagcacctaaagtgtctctggaagcatctctccatatgactgctagagaagatggcctgactgttattcagcctcattccctctccttcataaactctgagaagccaagtggaaagattgtctacaacatcactctacctctgcatccaaatcaaggtatcatcgagcaccgggaccaccctcactctcctatccggtatttcacgcaagaggatattaaccagggcaaagtcatgtaccgccctcccccggcagcaccccacctccaggagctcatggccttctcgttcgctggtctcccagaatcagtgaaattccacttcacagtttcagatggagaacacacaagtccggagatggtcctcaccattcacttacttcccagtgatcagcaactgccagtgttccaggtcacagctccacggctggcggtcagcccaggaggcagcacttctgtaggacttcaggtggtagtaagagatgctgagacagcgcccaaagaactcttctttgagcttcggagacctccacagcatggtgtgcttcttaagcatacagctgagttccgaaggccgatggccacaggtgacactttcacctatgaggatgttgagaaaaatgctctacagtatatacatgatggttcctctacccgggaagacagcatggagatctcagtcacagatggcctcacagtgacaatgctggaggtgagagtagaggtgtccctgtcagaagaccgagggcctcgactggctgctggctcctctctgagcattactgttgccagtaaaagcacagccataatcactaggtcacaccttgcttacgtggatgattcttcccccgacccagagatctggattcagttaaattatctgccctcatatggtactctcttaagaatctcaggatctgaggtggaagagctctcagaagtttccaatttcacaatggaagacatcaataacaagaaaatcagatactcagctgtgtttgaaactgatggtcatctggttactgatagcttctatttctctgtctctgacatggaccacaaccatctggataatcagatatttaccatcatgatcactcctgctgaaaatccacctccagtcattgcttttgctgaccttatcacggttgatgagggagggagagcaccactctcatttcaccatttttttgctactgatgatgatgacaacctccagagagatgccatcattaaactaagtgctctgcccaaatatggctgcattgagaacacaggaacaggtgatcgttttggccctgaaactgccagtgacctagaggcatcatttcctattcaagacgtcctggaaaactacatttactactttcagagtgttcatgaaagcattgagccaacccatgatatttttagtttttatgtgagtgatggaaccagtcgttcagaaattcacagcatcaatatcaccattgagaggaagaacgatgagcctcccaggatgaccttgcagcccctcagagtgcagctgagctcgggagtggtgataagcaattcttctttgagcctgcaagacctggacaccccagataatgagctcatttttgtattgacaaaaaagcctgaccacggtcatgtactctggaggcaaactgcttctgagcctctggagaatgggagagttttagtccagggctcaaccttcacctaccaggatatcctagctgggctggttgggtatgtgcctagtgtccctggcatggtcgtggatgagttccagttctccctcactgatggcctccacgtggacacagggaggatgaagatctacacagaactgcctgcaagtgacacacctcacttggctataaaccaaggcctacagctctcagcagggtctgtagcacgcatcacagaacagcacttgaaagtgacagatattgactcagatgaccatcaggttatgtacatcatgaaggaagatcctggtgcagggcgcctgcagatgatgaagcatggcaacctggagcaaatttctattaaaggccccatccgaagtttcacccaggcagacattagccaaggccacgtagaatatagtcatggaacaggagaacctggagggagctttgcttttaaatttgatgtggttgatggagaaggcaacagattgattgacaagtcattttccatcagcattctagaagacaaatccccaccagtcatcaccaccaataaaggactggtcttggatgaaaactcagtgaagaaaatcaccaccctgcagctgtctgccactgaccaggacagtgggcctacagaattgatctacagaatcaccagacagccccagctgggccacttggaacatgcagcatcaccaggtatccagattagttcctttactcaagctgatctgacttcacgaaatgttcagtatgtccattctagtgaggctgagaaacattcagatgccttcagctttacactgtctgatggagtcagtgaggtgactcagactttccatatcactcttcaccctgtcgatgattcgctgcccgtcgtacagaacttaggaatgcgggtgcaggagggcatgaggaagaccatcacagagtttgagcttaaggcggtggatgctgacacagaggccgagtctgtcacattcaccatcgtgcagcctccacgccatggcaccatcgagcgaaccagcaatgggcagcatttccacctcacctccaccttcaccatgaaagatatctaccagaaccgggtcagctacagccatgacggcagtaactccctcaaggaccggttcaccttcactgtttctgatgggacaaaccccttctttatcattgaggaagggggaaaagagattatgacagcagcacctcagccgttccgagtagacatcctcccggtagatgatggcacgcctagaattgtcaccaacctgggactccagtggctggaatacatggatggcaaggcaaccaacctgatcaccaagaaggaactgctgaccatggacccagacaccgaggacgcgcagcttgtctatgagataacgacgggccctaagcatggctttgtggagaacaagctgcagcctggcagagctgctgccactttcacccaggaggatgtgaacttggggttgattcgttatgtgttgcacaaggagaagatccgtgagatgatggatagttttcagtttctggtgaaagacagtaaacccaatgtggtcagcgacaatgtcttccatatccagtggtcactcatcagctttaaatataccagctacaatgtcagtgagaaggcagggtctgtcagtgtcacggtgcagaggactgggaacctgaaccaatatgccatcgtcctgtgtcgcaccgagcaaggcaccgccagctccagctccagggtcagctcccaacctgggcaacaggactatgtagagtatgctggccaggtccagtttgatgagcgagaggacaccaagtcctgcaccattgtcatcaacgatgatgacgtgtttgaaaatgttgagagtttcactgtggagctcagcatgccagcttatgccctgttaggggaattcacccaggcgaaggtcattatcaacgataccgaggatgaacccacattagagtttgacaagaagatctactgggttaacgagagcgctggttttctgtttgcacctattgaaagaaaaggagatgcaagcagcattgtatctgcaatttgctacacagtccctaagtcagctatgggaagtagcctctatgctctagaatcaggctctgattttaaatctagagggatgtctgccgcgagtcgtgtgatattcgggcctggtgtgaccatgtccacctgtgatgtcatgcttattgatgacagcgagtatgaagaggaagaagagtttgagattgccttggcagatgcctctgacaatgcccgcattggaagggtggcgacagccaaggtgctcattagtggtcccaacgatgcctcgactgtgtccctgggcaacacggctttcactgtcagtgaggacgcaggcacagtaaagattccagttatccgccatggtactgacctctctactttcgcatctgtctggtgtgcaacgcggccctcagacccagcttctgccacaccaggagttgactacgttcccagctctcggaaggtggaatttgggcctggtgtcattgaacagtattgcaccttgactatcttggatgacactcagtatccggtaattgaaggactggagacatttgtggttttcctcagctcagcacaaggagccgaactgaccaaacccttccaggcagtcattgcaattaatgacacattccaagatgtgcccagcatgcagtttgccaaggatttgctcctagtgaaggagaaggagggtgtcctgcatgtccctatcactcggagcggagacctgagctatgagtcatcagtgaggtgctatactcagagccattccgctcaggtcatggaggactttgaggagagacaaaatgcagactcttcacggattacatttctcaaaggggacaaagtgaagaactgtacggtctatatccacgatgactccatgtttgagccagaggaacagttcagggtctacctcggccttcctcttggaaaccactggagtggagctagaattggaaagaataacatggccaccatcaccatatccaatgatgaagatgcccccaccattgagtttgaagaagctgcataccaagtccgggaacccgcaggcccagatgccattgcgattctgaacatcaaggtgatccgcagaggggatcagaacaggacctccaaggttcgctgcagcacgcgggatggctctgcccagtctggtgtggattattacccaaagagccgagtcttgaagttcagtcccggtgtggatcatatcttttttaaagttgagatcctgtccaatgaagaccgggaatggcatgaatctttctcactagtccttggcccagatgacccagtggaagcagttcttggggatgtgactactgccacggtgacaattctagaccaggaggcagcagggagcctcatattgccagcaccacccattgtggtcacacttgctgactatgaccatgtggaagaagttaccaaggaaggagtcaagaaatccccctccccaggctacccactggtctgtgtcaccccctgcgaccctcatttccccagatacgctgtcatgaaggagcgctgcagtgaggccggcatcaaccagacatctgtgcagttcagctgggaagtggctgcccccactgatggcaatggggcccggtctccctttgaaaccatcactgacaacacaccattcaccagtgtcaaccacatggtcctggacagcatttacttcagccggaggttccatgtgcgttgtgtggccaaggctgtggacaaggtgggccatgtggggacccccttaaggagcaacattgttaccattggaacagacagtgctatctgccacacaccagtggtggctgggacatccagaggcttccaggctcagtccttcatcgcaaccttgaaatacctggatgtcaaacataaggagcatccgaacagaatccacatttcggtgcagatcccacaccaggatggaatgctgccccttatctccaccatgccgttgcacaacttacattttctactgtctgagtccatctacagacaccagcacgtctgctccaatttagttaccacctatgacctgagaggcatctcagaggcagggttcctggatgatgtggtctatgatagcactgccctggggcctggctacgatcgccccttccagtttgaccccagcgtgcgagagccgaagaccatccagctctacaaacacctgaacctgaagagctgcgtgtggacctttgatgcttattatgacatgactgagctgattgacgtctgtgggggctctgtaaccgctgacttccaggtgagggactctgcccagtccttcttgacagtgcacgtgcctctatatgtgtcctacatctatgtgacagcccccaggggctgggcctccttggagcaccacaccgagatggagttttctttcttctatgacactgttctctggagaacaggaatccagacagacagcgtgctctctgcaaggcttcagataataagaatctacattcgagaggatggccgtcttgtcattgaattcaagacccatgccaaattcagaggacagtttgtgatggagcatcacactctcccagaagtgaaatctttcgtattgactccagaccacctaggaggaattgaatttgacttgcagctattatggagcgctcagacttttgattctccacatcaactctggagagccacaagctcttataacaggaaggactactcaggagagtacaccatctacctgatcccttgcacagtgcagcccacacagccatgggttgacccaggagagaagcctttggcctgcactgcacatgccccagaaagattcctgatacccattgcattccagcagaccaaccgccctgtgccagttgtgtattcacttaacactgaatttcagctctgcaataatgagaaggtgttcctaatggatcccaatacatctgatatgtcactagcagaaatggattacaaaggagccttttcaaaaggtcaaatcctttatggccgagtactttggaatccagaacaaaatcttaattctgcttacaaactccagctggagaaagtctatctttgtacgggcaaggatggttatgtgcctttctttgatcccacggggacaatctacaatgaagggccccagtatggatgcattcagccaaacaaacacctaaaacacagattcctgctgttggaccgcaatcagccagaggtaactgataagtacttccatgatgtgccttttgaggctcactttgcctctgagttgcctgatttccatgtggtcagtaacatgccaggtgtggatggatttactctaaaagtagatgcactctataaggtggaagcaggacaccagtggtatctccaggtcatctacatcattggccctgacaccatctcagggccccgggtccagcgctctctcacagctccactcagacgcaaccgaagggacctggtagagcccgatggccagctgatccttgatgattccctcatctatgacaatgaaggagaccaagtcaagaatggcaccaatatgaagtccctgaatctggagatgcaagagttggcggtagctgcgtccctgtcacagactggggcgtccattggcagtgccctggctgcaatcatgcttctacttctggtgtttttggtggcttgttttatcaacaggaaatgccagaaacagaggaagaagaagcccgcagaggacattttggaagaatatcctctgaataccaaggtagaagtgcccaagaggcacccggaccgggtggagaagaacgtgaatagacactactgcactgtgcggaacgtcaacatcctgagtgagcctgaggcggcttacacgttcaaaggtgctaaagtcaaaagactgaatctagaagtcagagttcacaacaatttacaagatggaacagaagtttaatggaggagacctatgtgtatttttttctaaaatcatttttataaaatggggggaaatactggtatttttataatctcgcagataaaaaagggaaaactatagctttgagtggcagacagcacacatcacatgcatcaactcacaactgagctacctcattcagcaaagaaccactgagaaccccagagtattacagttatttccgtagatccctttaatagtgtcaacaactgtacacagctccttctgtaaggctggtcttagaaaacaagtactttagtatcaggacaggagttgaacaattaggttagcagatggagatgagaggactgggtagagtaccatggcagatctcagagagaagaagtaggtacgggcctttggttccctcccccagccccagctttctcctacagggcttttcctgagtccccagacagcagagtatgaactgctgacacccagattccattaaaaattctgctaatcgacacaacacatatatttgctcatgatttcacttgacagcgtatgctccttggcctctaattgtactttgcttttccagagccctttttacctggggatttcagtgtgcttaagtaaaatcctctgaaaaccacgggagcctctgcctcctcagccacagagaactccctcctacaaagggggagactgaaacccgagttaaggaggggcctggcaggcgtatcagagcacattagtgatgcccttcaccccagggaggtgtctgttcccaactagtttatgtggcactgagacatccatccctgaccaaggatgctgcgaaacaggatcaatgtactacggccttttaattcaacattgccataaatgctttaaagaaaacccaccacactttcctcctactccggtctttgcccgttcctgtaacagacaatcccatgtcctaggtatggttttttattctgttagtgcttcgggaaagtaagtgattcatttgaataaggcaaattaggagaaagcccaggttggggtgaaatcagacttaacagatacatgctggttctccttgctgtgtgtgacacagcagacagaggcactattcctggtgcagtatttcagggatttctctttgaggggttcttttctggtagctcaggcaattatttttaccatatcagcacatgacaaggccatgaacacatggctctaaaataatttagtgttcaagtatcagcttaactattttgtgtaggctacacacagcttgcttttgtttctcttctgtttctgccttattggcggaaacataagcgtgcatgccatgttgttttgaattggaggcacaatttcattattcgagagtaaaagacatgtcctcttctgatgcatggcacaccatagtcaccaagcaaataacagagccttcacattgtgtaatatttgtatgagaatgactcaagctctttgagaacattccaaactagtaacatttcgctactaaaagctagaaaggatgaactgtgaaaggttctaggcagctctgtgagactccaagctccttgaaagtaggacctttgtgagccacgcctttcattcttcaacagtgccttgcatgtaacaagcactccagaaatgtttgttgaatgaatgaatggtgtcatgggtgaatgatggggagtaaatttaggaaggggaagtgagagagtatggtggcaatatcacaagggaggagagaggaaaacaattatcttctctacttggattatgagataaccttttcttggaggaaagaaacaccgctttacaaaggcatgactctggcggtggtcctaaggaagcatgagcagaaaattcataaaaatgtatcatcagcaggagatgagactatgaattggcatccagaacaggagatttagagcaaaatctaatttagcattctgagatgagtgtcaggttttcaggagagaatgagttggggtgagcccagagtctgaaactcctgactggtcaggtgctacttaagaccagcttgggcaattcagggcagaactcctgtatcagcctcatggacacccagaattggtatctcatggctggagagctgatcagccaggcacagaatctccagaacaacctagagagtgaatgctaatttgtagagcgaacttccatttggcccattatttgtaactgtgtaactgctccaagtgccagaatgcttacacgttaaagcagcacctttccatttgcccacatattcttcttgcacaccccttccattactgctgaataggacattgcatgggaagagtacagaggtggcagaatgaagctagagtgggaaggactaaagactgagccccagagtgctcccagcaaccgccacgtacaaggtctgaaatgacaagggcaagagtgagataggaaactgtgtgtgaaaggaaagcccttgcagtatttctgcctccctttctttctgcctttcaccccactaaatgtatgttattgaatgccagtacttctctagtggatgcacacttgttaaatagtgttaagagatgtggagatgagatatacccctttgatgtagaattattcatttggtttgtttcatacttcattataggaatcaagtaatttgatgactaatgtggattatatttcagtcaaagctctgctttcaatttctctgatttgctcactaatgccttgtgtgtgttttactaaccttttatatcttgccttcaagtgagaaggaacaaacaactctcagtggttactacttgcttttatatgctggctgtgaaggttaaaagaaagaatggtctgtaccattctgctttgctgcccttttattgtaccccaggcctcctagaggactcctgcagattctattgttgggtgggaaatagtgttggaatgtgtttgcacagtcttatgatattcagtctcagtctgctataggtatttgttattcttggatactacacacctgctcagactgagtaaacatttgtggtgctgtcaacctgatttcttgactctcaaatgatttttgtatttccaatatgaatttgtgtgttatgaatttctgatttctccaatagtatatgccactatataaatttgtattaataaatgacagtcttgttggtttaaaaaaaaaaaaaaaaaaa

SEQ ID NO: 943 - DNA, 7857 bp, Homo sapiens
ctgggcccaaaacttgggtggaaggcagaggcctccgggaccctccccgccccctcctcccccccgccggctcccccgccctctcctccgcgcccctttaagctatccagcagacggagacagagttgatccaggaggggctggcagagtgctggagggggaaggctgggggcggagggaagggcggcaggagcccgaccggtcccacccctagctacaaccccgggcaggaagagctcgtcgcggtagcagcggtcgaaggggaccaagctccagagggcgggcgcccgagccgtgcggggagcgggcggggcagccatgctcctgtctgggggcgatcctccggcgcaggaatggttcatggtgcagacaaaatcgaagcctcgggtgcagcggcagcggctgcaagtgcagcgcatctttagggtcaagctgaacgccttccagagccgcccggacaccccctacttctggctacagctcgaggggccccgagagaacatgggcaaagccaaggaatacctgaagggcctgtgcagcccagagctgtggaaagaggttcgctacccaccgatcctgcactgtgccttccttggggcccaaggcctcttcctggactgcctctgctggagcacccttgcctacctggtgcctggcccccctggctccctgatggtgggcgggctgactgagtctttcatcatgacacagaactggctggaggagctggtggggcgactgcgctggggccctgcccctctgctgaccccccgggggatctgggaggctgaggtgacccgggcctttggggccctggtctggatccgtggtgaccagcatgcaggggacctactgcagctgcccccagcggtccaggagctgctgctgagcctggtgcgggatgctgcgggcaaggaagacatcatcgagtggctcagccgcttcggcatctctgactcccactccgatccggaggttctaatctgccctccccagcagcagaaggaagccccagccatggtgtccgtgggagagagtcctggaccctttgtggacatggggaccctccagaacaggggcccagaaaattcaaagagattatctagcctgggagccactgggtccctgatcacagcccagagcacaccgcaggaggcagcaaaccagctggtacgggtcggttccaacaaccaagatggtatggacagtgctcaagaggaagggacagtgcaagccaccagcagccaggactccacgaaccacacacaagccttgttgaagcaaaggcaggtccagaagatagaagataaactcctcttccaacctccagtatcagccctgggtgtgtgcccaccctggaaggcctggaccccggggccagcctttgggccattgtggccgggggctattgctgcaaccttctggaggatcaatgagctgcattctctacatctggcctggctcctgtcccaggcgtgcttcaatttccccttctggcagagacctctgggccccattcagttgaagctgccagggcagaatcctttgcccttaaatctggagtggaagcagaaggagctggctcctctgcctagtgcagaaagcccagctggtagaccagatggggggctgggaggagaagcagccctgcagaattgcccaaggccagagatttccccaaaagttacgagtttattggtggtccctgggagctcagatgtaaaagacaaagttagctcggatctcccacagatagggccacccttgacctctacaccccaactacaggctggaggtgagccgggggatcaagggagtatgcagttagattttaagggactggaagagggacccgctccagtgctgccaacagggcaagggaagcccgtggctcaaggggggctgacagatcagtcagtacctggagctcaaacagtgcctgaaactctcaaagtgcccatggctgcagcagtgcccaaagctgaaaatccctccagaactcaagtgccatctgcagctcccaaactgcctacatctcgaatgatgctggcagtgcacacagagcctgcagctcccgaagtgcctttggctccaacaaagccaacagctcaactgatggccacagctcaaaaaacagttgtgaatcaaccagtgttggtagctcaagtggaacccacaactccaaaaactccccaggctcagaagatgcctgtagcaaaaacatcacctgcaggtcccaaaacacccaaagctcaagccgggcctgcagctacagtttccaaagcacctgcagcttccaaagcacctgcagctcccaaagtacctgtgacccccagagtctccagagctcccaaaacacctgcagctcagaaggtgcccacggatgcagggccaaccttggatgtagccagacttctgagtgaggtccagcctacatcaagggctagtgtctccttactgaagggccaggggcaggctggaaggcagggtccccagtccagtggcaccttggccctcagcagtaagcaccagtttcagatggaggggctcctgggggcttgggagggggccccaaggcagccacctcgccacctgcaagcgaacagcacagtgaccagcttccagaggtaccacgaggccctgaatacacccttcgagctgaacctgtcaggggaacctggaaaccaggggttgcggcgagtggtcatcgatggcagcagtgtggccatggtgcatggcctgcagcacttcttctcctgccgaggaattgccatggcagtgcagtttttctggaaccggggacaccgagaggtcactgtgtttgtacccacctggcagctgaagaagaaccggagggtgagagagagccactttctgacgaagctacactcgctcaagatgctttcaatcacaccctcccagcttgagaatggcaagaagatcaccacctacgattataggttcatggtaaagctggcagaggagacagatggcatcattgtcaccaatgagcagattcacatcctgatgaatagttccaagaaactgatggtcaaagatcgcttgctgcctttcacctttgcggggaatctcttcatggtgcctgatgaccccctgggccgtgatggccccaccttggatgagtttctgaagaagccaaacaggttggacactgacattggcaacttcctgaaggtgtggaagacccttcctcccagctcagccagtgtcactgagctgagtgatgacgctgactctgggcccctggagagtctgccgaatatggaagaagtcagggaagagaaggaggagaggcaggatgaggagcagagacaggggcagggcacacagaaggcggctgaggaggacgaccttgactcttcgctggcgtcagtgttcagggtggagtgcccgtccctttcggaggagatcctgcggtgcctcagcctccatgatccccctgatggggccctggacatcgacctcctgccaggggcagcttctccctacctgggcatcccctgggatggaaaggctccctgccagcaggttcttgcccacctggcccagctcaccatccccagcaacttcaccgcactctccttcttcatgggcttcatggactcccacagggatgccatccctgactatgaagccctagtgggccccctgcacagcctcctcaagcagaagcctgactggcagtgggaccaggagcatgaggaggccttcctggccctgaagcgagccctggtgtctgccctctgcctgatggcccccaactcccagctgcccttccgcctggaggtgaccgtgagccacgtggccctgacggccatcctccatcaggagcactcagggaggaagcaccccatagcctatacctcaaaacccctcctccctgatgaggagagccagggcccccagtcagggggtgacagcccctatgctgtggcctgggccctcaagcatttttcccgctgcattggagacaccccggtggtcctggacctttcctatgcctcccggaccactgcggaccctgaggtgcgggagggccgcagggtttccaaagcttggttgatccgatggtccctcttggttcaggacaaaggcaagagggccctggaattggccctcctccagggcctgctgggggagaaccgcctgctcacccccgcggcctccatgcctcgcttcttccaggttctgccgcctttctctgacctgtccacgttcgtctgcatccacatgtcgggctactgcttctaccgtgaggatgagtggtgtgctggctttggtctctatgttctatcgcccaccagcccccctgtctccctttccttctcctgctccccttacacgccaacctatgcccacctggcagccgtggcctgcggcctggagcgctttggccagtccccactcccagtggttttcctcactcactgcaactggatcttcagcctcctgtgggagctcctgcccctctggagggctcggggcttcctctcctctgatggggctccactccctcacccaagcctgctctcctacattatatccctcacctctggcctctcatcccttccgtttatctaccgaacctcctaccggggctctctgtttgctgtgacagtggacaccctggccaagcagggtgcccaggggggtgggcagtggtggagtttgccaaaggatgtgccagcccctacagtgagtccccatgccatgggcaagaggcccaatttgctggcattacagctgagtgacagcaccctggccgacatcattgccaggctgcaggctgggcagaaactgtctggctcctcaccgtttagttctgcctttaactcactcagcctcgacaaggagagtggcctgcttatgttcaagggagataagaagcccagggtctgggtagtcccgacgcaactccggagggatctgattttctctgtgcatgacattcccttgggggcccaccagaggcccgaagagacctacaagaagttgcgtttgctggggtggtggcctgggatgcaggagcatgtgaaagattactgcaggagctgcttgttctgcatcccccgaaatctcataggcagcgagttgaaggttattgagtccccatggcccctcaggtcgaccgccccctggtcgaacctgcagatcgaggtggtgggcccggtcaccataagtgaggagggccataagcatgtacttattgtggctgacccaaacaccaggtgggtggaggcattccccctgaagccctacacacacacggctgtggcccaggtgctgcttcagcatgtgtttgcaaggtggggtgttcctgtgaggctggaggcagcccaggggccccagtttgcccggcacgtccttgtgagctgtgggctggccctgggagcccaggtggcctccctgagtcgggacctccagttcccctgcctgacgagctcaggggcctactgggaattcaagagggccctcaaggagttcatcttcctgcatgggaagaagtgggcggcctccctgcctttgctgcacctggccttcagggcctcctccactgatgccacaccgttcaaggtcctgaccgggggtgagtcaaggctcacggagcccctgtggtgggagatgagcagcgcaaacattgaagggctcaagatggacgtcttcctgctacagctggtgggggagctgctggagctccactggagggtggctgacaaggcgagtgaaaaggccgagaacaggcgtttcaagcgggagagccaggagaaggagtggaatgtgggtgaccaggtccttttgctgtccctccccaggaatggcagcagtgccaaatgggtgggtcccttctatatcggggaccggctgagcctgtcactctataggatatggggcttcccaaccccagagaagctggggtgcatctatcccagcagtctgatgaaggcctttgccaagagtggcaccccgctgtccttcaaggtcttggagcagtgagcgggagcagcgggggtgccccctgccccagggccgtgggtttctgctgctaggcctccccctgtcccagcagtgctctcagtccactgggggccctcagttgtgccttttgtagagaacttgcttcataaagctttgctgaattgccttgaactagggaccagcatccccatggaaacatccccagtttggggtacttggagaatttgccaaaggctgtcagatatgggtccctggcagttttacactgggaaatggagtgctcctctaggctataccaggctcagtgtcttctccccaagtatcctctttccccttcacatgtaggtgtgtggtggtgtgcacacacactcacgaaagaatctatcttggccatgaaactgtggctgttgaccttggaattggaaccacagtcctttcccatacagaaaccccaaatgtgggctcctccctccaacctgttcttttggggaccctttgcccttagagctgtcacagatgacataagcctgggcaggctgtggggaggccgctgcctcctagcctcacggtcagctttctcaagccaggtgtggcctgcacagctctcagggcagggctggccatcctcccaggcctcaagggcagtgtcttggagtgggaggatggccagccacaagccaccagcttgtcagcatgggaagggcaagggggaaatgggttggcctacctcatttgactccagccaatggagacaattcctgacccctgctttgatggtgttgaccccacaggaatcaaggatcttgatgccaagtgtggcatctctatctgaagagctgcttctgttagacccaggggccccggcctctgttttaagggggcagggcgtctgcaacaggagtggcacacggtgaagtgctggcatggctctacctcccaacccctcccaaccccatcccaaagcctacagtcctctgctccttctacctccactgtatcctgcatcccagaccctacagattgtgtgattgcttcatctgtatcaccccccgagtcctgtggacctgccttctgtgtagagcaaaacccaggctccctcacagccattctttgcagagatcacccttgcagtgagtgtgagttccttccaggtgtgtgcgcgtacactcaccctctgaattgctgccgctgccaaggaagtgggctccaggtgaaggccagtgccacgtcactctggctggccttcttagtagtttcatttctccggaagctgagccagtctcctggtctagcccaggttgccagaacgcttggcattgcagagtgctagagccagtggagaacttgccaacttgattgttttacagcagaggaaagaggatcacagagggaaaatgattcacccaaagtcacacagcaagttcatggctgagctgagaccaggattaagcttcctgactcccagttcaccatgaaaagggttctggcaacaggttcaagctggagaatccttcaaaatgctacacccacattctctccaactcttcatctccctgatcttccagacaaactacctggatgttgcccttaaaccatttctagctgttaaccctgtccagaaaaatgattgagtgatagctgagaagtggaaagtgtgggatttttggcaggtgctctctttcctccgccccccgcgccattctttctcttcctcctctctgtaatggtatgtccagcctcactctccctccctggtgctgtatgcgttccccctgttagctacatttgtgatcacatacccttcttttaagtgaatttttttcatttgatttgtcaataaacgaatcaaactggagctga

SEQ ID NO: 944 - DNA, 11479 bp, Homo sapiens
gagtcccaggattccggggactggagggcagcgccggcagccaaggattttgacacttcatgacatgtcattatttagagcaataatgaatattgacctgttttggattagttgatgaccttcggaaatgatccaataatatctactatagagaagctgaatatactccatttggagtgaacagcccggattgttacagaattttcaagatgacagatccaatgatggacttttttgatgatgccaatctttttggtgagaccttagaaggtttgtcagatgatgcatttgtacaaccaggacctgtttcactagttgatgaattgaatttgggtgcagaatttgaaccgttgcacatagattcactgaaccatgttcaaggtactccaacacatcagaagatgactgattttgaacagttaaatcaatttgattcaataaaatttcaccatgttaatcaatcttttggtagcccagctgaacatgtgttatctccacactctcagtttaattgttctccaatccatccccaaaaccaacccaatggtttgtttccagatgtatcagatggcagtccaatgtggggccatcagacagctactaccatttcaaatcaaaatggatctccttttcaccaacaaggacattcacactctatgcatcaaaataaaagctttgtggcacaccatgactttgccttatttcaggccaatgaacaacaaacacagtgtacttcactacgctcacaacaaaacagaaataatctcaacccagggcagaattctcttagccagtctaaaaattttatgaatgtttctggtccacatagagtcaatgttaaccacccaccacagatgactaatgcatctaattcacaacagtctatttcaatgcagcaattttctcaaacgtcaaatccttcagcacacttccacaagtgtagcagtcatcaagaaggaaattttaatggaccttccccaaatatgacttcttgttctgtcagtaattcacagcaattttcttcacattattccttttccagtaatcatatatcaccaaacagtctacttcagtcctctgcagttcttgcatctaatcatacaaatcagactttatctgattttactggaagtaattccttttcacctcatagaggaatcaagcaagaatctactcagcatatcctaaaccccaatacatcattgaattcaaataatttccaaatattgcattcatcacatcctcagggtaattatagcaattcaaaattatctcctgtgcacatgaacttcccagatcctgttgactcaggaactcaaatgggccatttcaatgatcatgtagaaactaatggcttttcatctttagaagagaatttacttcatcaagtggaatctcaaactgagccattcacaggacttgaccccgaggacctccttcaggagggtcttcttcctcactttgatgagtcaacattcggacaagataattcaagtcacattttagatcatgaccttgatcggcagtttacttcgcatctggtaacacggccttctgatatggctcagactcagttgcaaagtcaggctcggagttggcattcatcattttctaatcatcagcatttacatgacagaaatcacctatgtttacagcgacagcctccatcttccaagaagagcgatggttctgggacatatactaagttgcagaatacccaggtgagggtcatgtctgagaagaagcagagaaaaaaggtggaatcagaaagcaagcaagaaaaggctaatcgtataatatcagaggccatagcaaaagcaaaggagcgtggggaacgcaatattccacgagtaatgagccctgaaaactttcctactgcttcagttgaaggaaaagaggaaaagaaaggtagaaggatgaaatccaagccaaaggacaaagacagcaaaaaaacaaaaacatgttctaagttaaaagagaagacaaaaattggcaaactcattattacattgggtaagaaacaaaaaagaaagaatgagtcttcagatgaaatatctgatgcagaacagatgccacagcatacattaaaagatcaagactctcaaaaaagaagatcaaatcgacaaattaaaagaaaaaaatacgcagaagatatagaagggaagcaatctgaagaagaggttaaaggttctatgaaaataaaaaagaattcagctcctttacctggtgaacagcctttacaattgtttgtggagaatccgagtgaagaagatgctgcaattgtagacaaaattctatcttctagaaccgtaaaaaaggaaatatcacctggagtgatgattgatacagaagaattttttgtaaaatacaagaattactcctatcttcactgtgagtgggccacagaagagcagcttttgaaagataaaaggatccagcagaaaatcaaacgattcaaattgagacaagcacaaagagcacatttttttgcagacatggaagaagaaccatttaacccagactacgttgaagtagacagagtattagaagtctctttttgtgaagataaggatactggtgagcctgttatttactacttagtaaaatggtgctcattgccatatgaagatagtacttgggaactaaaagaagatgtagatcttgcaaaaatagaagagtttgaacaactgcaagcttcaaggcctgacacaagacgtttggaccgtcctccttctaatatttggaagaaaatagatcaatccagggactataaaaatggcaatcaactcagggaatatcaactggaaggactcaactggctcttgttcaattggtacaatagacgaaactgcatcttagcagatgaaatgggtcttggcaaaactattcaatcaattacattcctctatgaaatccttctgactggtataagaggacctttcctgattattgctccactttctactattgcaaactgggagagagaatttcgtacgtggactgatattaacgttgtggtttatcatgggagcctgattagcagacaaatgatacagcaatacgagatgtacttcagggattcacaggggcgtatcattcgaggagcttacagattccaagccatcatcaccacttttgaaatgattcttggaggctgtggagagcttaatgcaattgaatggcgatgtgtgattattgatgaagcacataggttaaaaaataaaaattgtaaactcttagagggcctgaaactcatgaatctggaacacaaggtgcttttgactggcacccctctccaaaatacagttgaagaactatttagtcttcttcactttcttgaacccttaaggtttccttctgaatcaacatttatgcaagaatttggggatctgaaaacagaggaacaggtacagaaacttcaggctatcctgaaaccaatgatgttgagacgattaaaagaagatgtggaaaagaagttggcacctaaagaagaaaccatcattgaagtagaacttactaatattcaaaagaaatactaccgggctatcttggaaaagaacttttcttttttatccaaaggagcaggacaaactaatgtacctaacttggtcaataccatgatggagctcaggaaatgttgtaatcatccatatcttataaaaggtgctgaggagaaaatacttggagaatttagagatacttacaatccagctgcttctgattttcatcttcaagcaatgatccagtctgctggtaaattggtccttattgataaattgcttcccaaaatgaaagccggaggtcataaagtgctcatcttctctcaaatggttcgttgccttgacattctggaggactatctcatacataaaagatacttatatgagcgaattgatggcagagtcagaggaaatcttcggcaagctgctatagatagatttagtaaacctgattcagatagatttgtttttctcctgtgtacccgagctggtgggttgggcatcaacttaactgcagctgatacatgtataatttttgattctgattggaatcctcagaatgatcttcaggcccaagctcgttgccacagaattggtcagaacaaagcagttaaagtctacagactggtaactcgtaactcatatgagagagagatgtttgaccgagccagtttgaaactgggcctagataaagctgtgttacagagcatgagtggaagagaaagtaatgttggtggtattcagcagctttccaaaaaggaaatagaagatctgcttcgaagaggtgcttatggtgctattatggaggaagaagatgaaggctctaaattctgcgaagaggatatcgatcagattttactacgtcgtacaaaaactattacaattgaatcagaaggacgtgggtcaacatttgccaaggcgagttttgtggcatctggaaaccggacagatatttctttagatgatcccaacttctggcaaaaatgggctaaaaaggcagaaatagatatagaggccatcagtggcagaaacagcttggttattgacactccaagaattaggaagcaaacaagaccttttagtgccacaaaagatgaattggctgaattatctgaagctgaaagtgaaggagatgaaaagcccaaactccggagaccctgtgaccgttccaatggctatggaagaactgaatgctttagagttgagaaaaacctgctagtttatgggtggggccgatggagagagattctatctcatggccgtttcaaaaggcagctaaatgaacacgatgtagagataatttgccgagctctcttagcatattgccttgttcactaccgaggagatgagaagattaaaggtttcatatgggatctcattactccaactgaagatggacagacacgagagctacagaatcatctaggcctatcagctcctgtacccaggggtcgaaaagggaagaaagtaaaaactcaaacaagctcatttgatatacaaaaagcagaatggcttcgaaaatataatcccgagcagctccttcaagatgaaggctacaaaaaacatataaaacaccactgtaataaggttttgcttcgtgtgagaatgctgtattatctaaagcaagaagttattggaaatgagtgtcagaaagtatttgatggagttgatgcaagtgacattgatgtttgggtaccagaaccagaccactcagaagttcctgctgagtggtgggattttgatgctgataagtcactccttattggagtttttaaacatggatatgaaaaatataacactattcgagcagacccagcattatgcttcttggaaagagtgggaaaacctgatgagaaagcagttgctgctgaacagagagcgaatgattatatggatggggatgtggaagatccagaatacaaacctgccccagccatctttaaagatgatatagaggatgatgtttcctcaccaggagatcttgttatagcagatggagatggtcaactgatggagggtgataaagtatattggcctactcaatcagctttaaccacacgtttgaggcgtctcatcactgcataccagcgtactaataaaaacagacaaattcagcagatacaaccgactttctcggtgcctaccagtgtaatgcagcctatttatgaggaagccactcttaatcctaaaatggcagccaagatagaaagacagcaaagatggacaagaagagaagaagctgacttttatagggttgtatctacatttggagtggtttttgaccctgacagaggccaatttgattggacaaaatttagagctatggctaggctacataagaaaactgatgatagtttggaaaaatatttgtacgcattcatgtccatgtgtcggagggtttgtcgtcttccttccaaagaagaattggtggatccaaatatttttatccagcccatcacagaagaacgtgcttctaggactttgtatcgcattgaacttctaaggaaagtacgggaacaggcccttcgacatccacagttgtttgaacgcttgaagctttgccatccaaatccagatttaccagtctggtgggaatgtggccctcatgatagggatttgcttattggtgctgccaaacacggggtgagccgaacagactatcacattcttcgtgatcctgaactctcatttatggcagctcagaggaactacagtcaaagtaagatggctcattcaaggacttctaccccacttctacagcaatatcaagtagcactttctgcttctcctcttacctctctacctaggctcctagatgctaaaggtattattctagaggagatgaaagttaaaagtgaaaaccttaaagaggagcctcagtcttctgaagaagaatctatgtcttctgtggaaaccaggacactaataaaatctgagcctgtaagtccaaagaatggtgttttaccacaggctactggagaccagaaatctggtggaaaatgtgaaacagacagacgcatggttgcagccagaacagaacccctaactccaaacccagcttctaagaaaccaagagtccacaaaaggggatcagaatctagttctgattctgactcagattctgagagatcatcttgttcttccagatcatcttcttcctcatcatcctcttcttgctcccactctcgatcaggctctagttcttcttcatcttcatcttgttcttcagcatcttcttcatcctcttcctccacctcttcctcctcctcctcctcttcatcttcatcagaagaaagtgacagtgatgaagaagaagcccaaaaacgagaaagtactactcacatgaaagcctatgatgaagaaagcgtcgcgtcactgagcactacccaggatgagactcaggatagttttcagatgaacaatgggacaccagagtctgcttatatcttacaaggtggatatatgctggcagcctcgtattggccaaaggatcgtgtgatgatcaataggttggacagtatttgtcaaacagttctgaaaggaaagtggccttcagctagaagaagttatgatgctaacacagtggcttctttctataccacaaaactgctggacagccctggagcagctacagaatacagcgatcccagtgtacccactcccccaggtgccggtgttaaagaagaacatgatcagtcaacacagatgtcaaaggaaggtggtttgaagttgacatttcagaagcaagggcttgctcagaaaagaccatttgatggtgaagacggtgctctggggcagcagcagtacctcactcggcttcgagagcttcaaagtgcatcagagaccagcctcgtcaatttcccaaaatccataccagtatcaggtacttccattcaaccaacccttggtgccaatggtgtgatattagacaaccagcctatagtcaaaaaaaggcgaggaaggaggaagaatgtagaaggtgttgacatcttcttttttaacagaaataaaccacctaatcatgtttctttaggcttaacctcctcacagatttccacagggataaatccagcactatcctatactcaacctcaaggaattcctgatacagaaagtccagttccagttattaatcttaaagatggaacgagacttgcaggagatgatgcaccaaagagaaaggatttggaaaaatggcttaaggagcacccgggttatgtggaagatttgggagcttttattcctagaatgcagcttcatgagggaagacccaaacaaaaaagacaccgttgcagaaaccccaataaactagatgtgaatagtctcactggagaagaacgtgttcaactgattaacagaagaaatgctagaaaggttggaggtgcatttgctccccctttgaaagatttatgtagattcctaaaagaaaattcagaatatggagtagctcctgaatggggagatgttgttaagcaatctggatttcttccagaaagcatgtatgaacgtattctcactggtcccgttgtgagagaggaagtaagcaggcgggggagacggcctaaaagtggaattgcaaaggccacagcagcagcagctgctgcatctgccaccagtgtttcaggcaatcctttgttagccaatggactacttccaggtgtggatctcacaactcttcaggccttacaacaaaacctacaaaacttgcagtcactgcaagtaactgctgggttgatgggaatgcctaccggccttccttctggaggagaagctaaaaacatggctgctatgttccccatgctgctgtcaggaatggctggattaccaaatctgttgggcatgggaggactcctgacaaagcctacggaatctgggacagaagacaaaaagggaagtgactctaaggagtcagaaggaaaaacagaaaggacagagagccaaagttcagagaatggtggagaaaactctgtgtcaagttctccttccacatcctctactgctgcattaaatacagctgcagctgccaacccattagctcttaacccactattactatctaatatactttatccagggatgcttctcactccaggccttaatcttcatattccaactttgtcccagtccaatacttttgatgtacaaaacaaaaacagtgacttaggctcgtctaagtctgtagaagtaaaagaagaagattccagaattaaagatcaggaagacaaaggaggaactgaaccaagtcctctcaatgaaaacagcacagatgagggttcagagaaagctgatgcttcatctggatctgatagtacatcgtcgtcatctgaggattcagattctagtaatgaagactgattcccagactctgcacttaaaatatgaactgattttggattttttctttaataattaattgtaaataccccagtgttgagtgcatcaataacttactgaccgaacatttcagttatttgtttagaagtgcaaactgctttcagagactttttgcatgtaatatttcttaagattcataagtttctgaactcgtatgtactatcaaatacataaaggtgtaaaattacaacaaaaggcattataattttgttgggggttaattttatgaaaattatgctcaataagagttgtatatttaatatatttgcagtgaacacagaatactttatgcatattactgatttaatttgaatatagttttacagcctccttgacacctataatttacagatcaaaactcagcaataatttgggcagctaatgaatgtcatgaaagctgtagaatctacatcaccatccattgctttaattacatgaaaatgctctagtgttgtgatgcactgctgatgtttccaattcaggtacaagtatgttttaaagaagaaataagtttcccaatcagccaatttaactggctacctgttacctcagctgagttagtttaggaagtttacattcgtttctaattctatacttgttttcaggggttttttaaacacatcctatatatcatgtcaatctggcaagaaatatgacttgctttttgctgagcttaattcagatatcagtaaaattaagtcataaaataatcatgtgtcatgtgactttggcaccctatagacatacttagttttaacttttcaaagtttggcctcctattagaaataatcatgtctcagatgagtaatgtctgtttccagggttcagaaaaggcaaactcatgaaatgccactgaaaagaactttcaacacagcatacttcatgtaaaagaaattgtttgtttgctttctttgtgtagatttctatttgtgttttatgtcatggaaatattccagaattaacagataatagtggtaaagtaatatgcagatagtctaaattcattttgagtttctaggtgtaagcagactaaatgttgcccagaatcagtgttgggttatcagtttatattaaatatactgagttgcccgttttgaaaatgcactttgaataatctcaaaaagatgtacaagttatacctgtaaaccacaaaagtgaagcctgaggcttctgttcaatttcatagactcctttaccatgtaaaatttgtctgatatttgatttgtgatacaatttctcctgctaaagctgctattattctgacaaggtagaggtccaggttcacctttatatatatttaaaacaattagtactgaattggacataaaaatattgacattctaaggagagatatatgttagcatttttctggtactcaaataagttagtagtaaagtctgcaagggcataaatttagggggaaaaagtgtcccagttctctcctacagaaaaaatactttcagtatgttttgataaaactgttgctttgtcatgagttagtcaattgtatcaggttttccaagacctttaccagtaaattatgtttctgtatgtaaaataaccccttattagagagacagtgttatatgtatttacaaaattatataagttccattgggattgtattgattttgtattttcccaaaatagtactttgaattgatagtcctttatgcaatgtcttagcaatagtctctataatgcccatccaggagaagtgggtagtaattcttcatcatgaaaatgatatattacatatttagtatcttccctttgcagtattgcacttttgtttaactagaatacacctatgagatagccaaagtttcaaacacagttatcttagtttaccggtggagtatttcaacaccaaccacatttcccttcctccctctaattctacccacatgatctttattccttcctttcgccaattaaaaaaaaaaaaaaggaaaaaaaatctgtagatcttgtcactaaaatctaatttatatcaaatttatgagagaaagtattttcctaattatggtcaaataaatttggttaacatcctagtgattctctttctatataataaggcaattacagttttcaaagcattaagtctaacataactttaaacattctcttaggtttcaagacacttctatttaatattcattggggaaaagttgtccagctatcagctaagaaaacacatgcaaatatggttgtgtaaagttaagggttataaggaaaaaaaaatcagtagaattacataatactaaagttgcagttgaaagaatatccaagtatgtgttggtagttactaaaagaattatagctgttattgccttgtatttatagcccttgtttcaggttttatgattcaagtcttagtccaatctttcttttggacatttgcaatatttaccagttgtgttttgtgtagtctgaatttgctttctgtagttgagcaaacgtcttaaaaagtcatttgtaatttattaaattactttctatgatgttctatagagcaaatggaagtttaattattttttattaaacatattctttgactacccatgaaaaaaaaaaaaaaaaaa

SEQ ID NO: 945 - DNA, 3045 bp, Homo sapiens
ggtttgcaggcggaggctacagctagggctgctcagtaactgccccaaccactaccacgtccccaagtgcaacgggacccacggaactacagggtcctgctgagctcaggagctgcacggaatggtggcagtcaccttgccagtgcagcaggcatggatcagactgcaagctaggggcacgaggcatcagttgggaagaggggacgcacagctaggcttgaggcctcttcatcgggatgtccccaggccccccagcccaggcccagcataaaggccgtgttggggggcccccctgacccaaggggggcttcatgcgccacgtgcaggcggagccgtctccatcctcagagccggaggctggcccttcacagcctccagtcaggcagggggccctccagggtggcctgctcatgggctacagcccagcagggggggcgacatcccccggggtctaccaggtatccatcttttcccctccggctggtacctctgagcctcatagggccctgaaacgacaagccccatccactgagggtccccgggagctgaagagaggccctgggctgggggccagagagggactaccccctgaagaaccatctactgtggggctcttaggcccagagggaccggggctgggactaggtgtggccagccagcatttctcccaccgtggcctctgtgttgtggaacagagaagtagtgtcacctcatcttggacttcaggggcctggagtcccccctgccccccatcaaatgcttcctgcaatactttgcacaccagagactgggcctccccagatccagggggacaggggtccctgggggagtccccagggccagcccctccaggccagctgcacacacttgacactgatttgcacagtcttgcacaaatagggggtaagagcccagtggctggggtgggcaatgggggtagcctctggcctagggagtcccctggcactgccaatgggcacagtcccgagcacacaccccctggccctggacccccaggcccctgccccaccaagcgaaggctgcttcctgctggagaagccccagatgtcagctctgaggaagaggggccagcccctcggaggcgccggggatccctgggccaccctactgctgccaacagttctgatgccaaagccacacccttctggagccacctgctgcctgggcccaaagagcctgttttggacccaacagactgcggtcccatggggcggaggctgaaaggagcccgtcgcctgaagctgagcccccttcgaagcctccggaaggggccaggcctgctgagcccccccagtgcctcccctgttcctacccctgctgtcagccgtaccctgctgggcaactttgaggaatcattgctgcgaggacgttttgcaccatctggccacattgagggcttcacagcagaaattggagctagtgggtcatactgcccccagcacgtcacgctgcctgtcactgtcacattctttgatgtttctgagcaaaatgccccggctcccttcctgggcatcgtggatctgaaccccttggggaggaagggttacagcgtgcccaaggtgggcaccgtccaagtgaccttatttaaccccaaccagactgtggtaaagatgttccttgtgacctttgacttctcggacatgcctgctgcccacatgaccttcctgcgccatcgcctctttttggtgcctgtgggtgaggagggaaatgctaaccccacccaccgcctcctctgctacttgctgcacctcaggttccggagctcccgctcaggccgcttaagcctgcatggagatatccgcctgcttttttcccgccggagcctggagctggacacagggctcccctacgaactgcaggctgtgaccgaggcccctcataatccacgttattcacctttgccctgattgccagcactctgaacccatgcgggctaatgacctgcccatcctgctccatcttagagaacatatatggagagacagcaagagacccttcaggcttgaattaaagccctcaccatgctcacgcccaaatggattatttgggtgtttaaagcttctgattcttactacaccctgccctacttcgggtactccatgtgcctgtcccctcccttgggtttcccaggccagcttaggtagtagggaggaactggagctaccctgagattttctcaagttcccaggcaagttatgccagcgttgcctccctgtcctgggcaggggccacttgttattttatttatttttaatttataatttattcaaattggattgccttggtaacctcccacacctgataattggcatcactcctccccgcttcccactctcagatattgctccaacctcaggagttgaagaggcttatgcggtgggggcaggaggagaactgctttccctcagctgagggaagaggggctattccagagggactgagtcagtagccaaagactcagcttcccctgtccttccccagtcccttcacttcccctaccctctgacctatctctgaaagccaagttatgcgtatgtgtgtgtgcacaagcttgtctttgtgtggtatgtgtgtgtgagtgtgcatgtatgcacacacacaggggttaaccacccctcacctagggctccagactccagttgtccctctcctcctacctgtgtctccttgttttggggtcctgactgaagaaggtgtccagggggcagagtcagggccaagcactggggtgcctcctctcacctggccagactctgacccacctacctcagctggggtgaggggcacccctcaaactcagtcatgtggttccaaactaccccattccccactccagactctgacccagcctcagtcctaactcctggggctgggctgaggggaacaagcatttgctgaaacttgaaaaaacaaagcaaatcaaaaacaggaaaaaattgtacctggtacttttttttagaaaaaaagattaaaaaagaaagaataaattcttgtttggaaacttgaaaaaaaaaaaaaaaaaaa

SEQ ID NO: 946 - DNA, 6670 bp, Homo sapiens
gttggggaggcggtttcctagactacgacaccggaaagctgggggaggcgctccgggatactgagggcggagggcggtggcagcgctggcgctggggaccggcttggtggcttcgggaaacagtttggcgccggcggccgtccgtgttactccgcatcccgccccgtctcggcacggctagcagccccctggccaccagcgtccagcaatgtgtctcaccggccgggcgtagcagctgcgcgtgcgcggaaccgcggggccatgagcgaagccggcggccggggctgtgggtccccggttccccagcgagcgcgatggagactagtggcggcgacggccgcgttctgcctggtgtcggccacctccgtgtggacggcgggggccgagcccatgagtagggaggagaaacagaagcttgggaatcaagtactggaaatgtttgatcatgcttatggtaactatatggaacatgcttaccctgctgatgaactcatgcctttaacctgtagaggtcgagttagaggccaagagccaagtcgcggtgacgttgatgatgccttgggaaaattttctctgacactgattgattctttggacactcttgtggttttaaataaaactaaagaatttgaagatgcagtgagaaaagttttaagagatgttaatttagataacgatgtagtcgtatcagtctttgaaacaaacatcagagttcttgggggtcttttgggtgggcactccctggcaatcatgctgaaagaaaaaggtgaatatatgcagtggtacaatgatgaacttctccaaatggcaaagcagttaggttacaaacttttaccggctttcaacactaccagtggccttccttatccaagaattaatttaaagtttggcatcagaaaaccagaagctcggacaggaactgagacagatacctgtacagcttgtgcaggtaccttgatccttgaatttgctgctttaagtcgattcacaggagcaacaatatttgaggaatatgccagaaaagctcttgattttctctgggaaaaaagacagcgaagtagtaatttagtgggcgtgactataaatattcatactggagattgggtacgaaaagatagtggagttggagcagggattgattcatattatgaatatctgttgaaagcctatgtcttgcttggagatgacagttttctggaaagatttaacacacactatgatgccataatgaggtatattagccagccacctcttctacttgatgtgcatatccacaaaccaatgctgaatgctcggacttggatggatgctttgcttgccttcttcccaggcttgcaggtgttaaagggggatattagacctgctattgaaactcatgaaatgttatatcaggtgattaaaaaacacaattttctaccagaggcatttaccacagatttcagagtacactgggctcaacatcctttaaggccagaatttgcagaaagtacctacttcttatataaagctacaggagatccttactaccttgaagtagggaagacacttattgaaaatttaaataaatatgctagagtgccttgcggatttgctgccatgaaggatgttcgtactggaagtcatgaggacagaatggattctttcttcttggctgaaatgtttaaatatctttacctgttatttgctgataaagaagacattatttttgacatagaagattacatctttacaacagaagctcatctgttacctctttggctctctactacaaatcaaagcatctctaaaaagaacacaacctcggaatatacagaactggatgacagtaacttcgattggacttgtccaaatactcagatcctctttcctaatgacccattgtatgctcaaagtattcgtgagcccttgaaaaatgtggtggataagagctgtcctagaggcatcatcagagtagaggagagtttcaggagtggagctaaaccccctctgagagccagagatttcatggccactaaccctgagcatttagaaatcctgaagaagatgggggtgagtttgattcacctcaaagatgggagagtccagttggtccaacatgcaatccaagctgctagttcaatcgacgctgaagatgggttgaggttcatgcaggagatgattgaattgtcaagtcagcaacaaaaagaacagcagctgcctccacgagctgtacaaattgtttcccacccattttttggcagggtagtattgactgctggaccagctcagtttgggctggatctgtctaaacataaagagacaagaggatttgttgcaagcagtaaaccatccaatggttgttcagagcttactaacccagaggcagtgatgggaaaaatcgcactgatacaaagaggacagtgcatgtttgcagaaaaggcacgcaacatccagaatgctggagccattggtggcattgttattgatgacaatgaggggagcagcagtgatactgcccctctgttccagatggcaggtgatggaaaggatacagatgacatcaagatccccatgctgttcttattcagcaaagaaggaagtatcatactggatgccatccgggaatatgaggaggtagaagtgctcctctctgataaagcaaaagatcgagatcctgaaatggaaaatgaagaacaaccatcctctgaaaatgattctcagaatcagagtggtgaacagatttcatcaagttctcaggaggttgatttggttgatcaagagtcttctgaggaaaattctctaaattctcacccagaatcattatctctagcagatatggacaatgctgcaagcatttccccttctgaacagacttctaatcccacagaaaaccatgagactacaaatcttaatggtgaatgtacagatttagataaccagcttcaagaacaatcagaaactgaggaagattccaatcctaatgttagctggggtaaaaaggtccagcctatagactccatattagcagactggaatgaagatatagaagcatttgaaatgatggagaaggatgagctatgacttgctaaacaatctgttggtaggtatttaaaaagaaaaggtaaactgtgtgtggttaatagacatcctaatactaagcaggctttctaatgggaggctttaagtatggtgatgaacaaccacgttctgactggcgtagttatcgtaggaatctggagcatgctgtgttagaattgaccttgtttaaaactgtcccatcaaaaatggaaatccacagttcccccttcaaatgcagcactgcaccaccctgcaacacctcaggccagggaaagattactgagcattcctgcgaaccagatttctgttgtctctggatagacaagaaacaaaattcatttagtagtggagtggggaataggagtttggatagccttctaattaaaggaagctcgcctttcttggttttgggggttagaggctcttttgggaagatgcatccgagtattgtggcattctgattatgctgccttcacaaaacactctaagtgacctaagtggttatgaagcaaatgcatttatggtgaaaacagtctttgctcattgctttctcttgtttcatttagtgacaaatgatcaagatgacttgattttttttccttcttaacaatgtcttttttatttaaaccaaaggtgaagccagtgtactttctcagtgagttctctgcataaagactaatcagtgggaccaggtaaaaaggtcatataatacattgtggagattgcttacttaatacttctgaaaaatggagtaagggagaaactgtaatgttgcaatatgaacctcccattgggccttccatagggaaagctgtgactactctgaaatggaacctagcattatatccttgtagggtagattataaatcatttccagttcatttctcttagaggtgattacctctagccatcagccttactccatcccatgtttggtatgcaatttgagccacaaggctcgtatcgccaacagctatatacattttgttccatttttctgtcttacagagccatgatagaactgtggttagtgagttaaaattcctggagtaactactgtttttctcctttgaaacttaggtttctaaagttgcacctaaggaatctgtcacattttctgttgaatcatggtttttgtttttgtttttaacagatattccttctgatacggacttgaaaattagtgtatggtgacctgtgtttaaaaaaaaaagtacaatacaactacatatagctatatagcttaatgagacttccaccccccccctttttttttttggtttgttgttgttgtagtagtctggtgctggccacatttaagtcttaaaaatttttaaattttgttgttgatgtttgtagacagccctgttgttgaaatcatggctttattcattttatttattttttaaacttgcctgaatttgttctaaaggaatatttaagagacataattttcttctctttaccataacattacacaaaactttttcctaaaacacggttgtgaggtactgatgaggtgtaagtggagctgttaaaaacagcagtgctgtattgcagttatgtatattcgtgtacagtatgtttagatcccaggtaaacatattcttttctgagaggataaatacctgcattcagatattccaggtaaatataattgagtcagggagtagtaaatctgatggagaattcactttggggaggggaaaaagaatagtatgcaagacccttattggcttttaattatacctgaaaccaaaatggatatttttagtctctctgcatgtgagatttggtgtaacaagatagaactataatatatacagtatatggaaggatagatatagtgctttgttcattttaattgcaaagctgccaaaatagttgaagcttaattacttgacttgccttgatttataggactggggcttggagaaaatgagcagatgttcctctaagacatcgattacagaagccttatatacatggatttgattttgtatttgtagctgaaagtcactgttgtctaaaactaacttttctaagttatcaaaacaacctaatttcttttccaacaaggagaacttaatggcatgaaggattgtgtgacacattggaaaagccagcttactgccactctcttcctttggccattagagggaggtgttgcctttcattgacgcttagaagcaaattgttcacttgttaagaaaagtaaatccttaaaaaaagaaaaggaaaaaatttaaccaatttttcttaatacccagaaggaattatactcaatatttccctagttaagaaaagaggagataatgttcgtctaaaaaactccaacgttgtaattacaactctacattcatttacttacttgacatactgccacaaagtagtttttgagttcattaaaaattccaaaggcattagttgttttttttttttttagtgttttgttttttagttaacttttatagacattttagtaacttgctaaagattcaggggattctatgaaaccccgaatttagaaacatctggtctacctcagttaaatgttgactgcttagaaatatagctgaagtgatcaccacagccataaaattgtttaagaaagatttatataatgtttacaaatctggaatcaaggattttagctgaaatcctttaagagatattagagcaagtatttaattcaggtattttcaagttttaaaacttaacctgtttacctactaaaaataaaatagctagtttttttctgcatataaaagttcattgaaatgatatgcccttatttgcaatacttttcccataaagttttaagtgtgaaagaattgtaatttactagatatgtttggtatgggatattttgttaggcaagttttcttttttcttcttaaattgcaataggcttccaaaaagagtataattgtttcagaacaaattaactcttggcattatacgtctccctttttctttacagtattagtaaaaagaaaaattgtacactttctgattttaacttcactaatgtaattactctctcaagaagcttttaaaatttaaattaccatcacacaaccttttttatagtaaagccaacatttgttctctcaccaaaccccatgccaaattcatcatgaagaaagctcagcataagtaattcaaatactgcttataattttagaggggggtagaatttagtaaatattccagccggtcgttttatgcacaaggcttcagtcagaacatagaaaaaaaaaacattctgtgaatgaaatattgtatgttcagattttataaaagacatttttaaaagcccaatttacagccgtatattttcttatgatgtaatttatgaaaaagatgtctgtactaacaggtgctgtaacactactgttgttggattttattgtttggtgataaatgtatacaatatttctaagggaaactatgtactgtgatgtaaaagtctgggcaaaatgtatataatcctgtatataattatgtatttgattataattactgattgtaaagatttaataaaatatgtaaatattccagtttagttttaaaaaaaaaaaaaaaaaaaaaaaaaaaaaaaaaaaaaaaa

SEQ ID NO: 947 - DNA, 3649 bp, Homo sapiens
aaggaggagtgcactggccgggatcggtgcagcgctcacactcactcacagtcactctctctgagcgcgtctcgctcgctctcatacacgcccggagcccaggagcgctcaggatcccgagcgccgcgaaaaagttcccccggcttttgctggagactcatcgctttgggaagtgcatttgcttcgtggctccgccgagcctgctgaatcctgtcctcgcggctcgggaccccgggatcgctgaccgctgccgccgccgcctctgcctcccggactatcggcagcctcggcaacaatagtggcggccgcccccagcgaggctccgggagcccttgcctgcgggggtccggggactcgagccggcctccgcctcccggacgcacagccagcgtggtccccgcgtgcaacgcgagcgccggggagtggctcctgctttgcccctcgtgggggccgagccaagaccagtctgcaaactccatcccgccggctggaagaagtcgcggagccggcaccaaacccgcagcgtcttcccgcgcggatcccgggacttaaaaagccggggccaccccggcccaggacgggatgcgggtcggtccggtgcgctctgccatgagcggcgcctcgcagccccgcggcccggccctgctcttcccagccacccgaggcgtcccggccaaacgcctgctggacgccgacgacgcggcggctgtggcggccaagtgcccgcgcctctccgagtgctccagccccccggactacctcagcccccccggctcgccctgcagcccgcagcccccgcctgccgctccgggggccggcggaggctccgggagcgcgccggggcccagccgcatcgccgactacctgctgctgcccctagccgagcgcgagcatgtgtcccgggcgctgtgcatccacactggacgcgagctgcgctgcaaggtgtttcccattaaacactaccaggacaaaatcaggccttacatccagctgccatcgcacagcaacattactggcattgtggaagtgatccttggggaaaccaaggcctatgtcttctttgagaaggactttggggacatgcactcctatgtgcgaagccggaagaggctgcgggaagaggaagccgcccggctcttcaagcagattgtctccgccgtcgcccactgccaccagtcagccatcgtgctgggggacctgaagcttaggaagttcgtcttctccacggaggagagaacccagcttagactagaaagtctagaagacacacacataatgaagggggaagatgatgctttgtcagacaaacatggctgcccagcctacgtgagccctgagatcctcaacaccactgggacctactccggaaaggctgcggacgtttggagcctgggggtgatgctctacacccttctggttggacgataccccttccatgactcagaccccagtgcccttttctccaaaattcggcgtggacagttctgcattcctgagcacatttcccccaaagccaggtgcctcattcgcagcctcttgagacgggagccctccgagagactcactgcccccgagatcctactgcacccctggtttgagtccgtcttggaacccgggtacatcgactcagaaataggaacttcagaccagattgttccagagtaccaggaggacagtgacattagttccttcttctgctaatccccaaaacctcagaaacctcataattcttaacacctggcatttccatttctaaagatggacaggccctttggcgtggtaccaaccagataatgactgcatcaggatgaaagctgctgaactcggcatggcgcctcctcttctctgttgggatgagtgactttattgatttgagcagcatatgctgtgattggctgccctgcaaatttgtttcccttaaggaaccctcaccaactatctctgctggatttgggagttccgcatcttttgtggagggcagagtatggacatcttacacccggtggtcaagtgtgtaataaacttgagcattcgaatgggagaaaaagcaaatcgcacaatgacatattttgagtaataaccgtatttttcacagggtgacaaattgggccaataaatctgccatctttgaactcatctttggtggctagactgctacggcagcttctctgatgggaaagttccttttttggcttaacactcaccctttcttcacactcacatttaccaatgactctgctccgtttttggagcagactgttttaagttgctcaggagcctgatggaaccatgaaccgagactcttctctgtttcctgccaagacctcatctgcactaatgccttctccctgaccttgacacttccccctttagctataaaagcacttaccagccgaacgtggaacagtatcacaaaagattccatctcccaacgatttcagaactctgagctcagagagactccagattttaaaaaataatttgagtgcttggaaactattagctttttaagttccttccaaatatgttagtacctaccctttactttttccccaagaccatctcagggtggagcattctgtctaagagaagaaagataaggaggctcccacccacctctcccaagagcagacattaaacatctttgtgctttgaagagagtgaattttggatagtcttgtgattctcagactaacttccagaattatactttaacccctcccagatatggtccgcctttggcattgtgtgtacatctgcagttttgcatggtgggttgttaatatttcaaatgtgtggtttatgaatacgtctgtataatcggcttctggagtgaaacagcaaaccccaaatcttcaaagttggaaggaactttaaaaatcatccggtccaatctctttcctctttctgccacctcccaaggcagaaatcccctcttcagcttcttttgtaggtgggaatccagcctctgttagatatgtccagagatggaaactcactcccctacaaaagatggagcttaatggagaaattgcaactttcattaaaaaacaaattcagatgaaatatcagtaactgtcttggacagtgctgaaatcaggtggttaaacgggtaaacaaaatatactgtattttgagaaatggcacaaaaacaggcagtcatctttaagggctatgcctaggcaaactactaacatgcattgtgagaatgccgtgtatacctcacgtactgtgtactttgtacatatattttaccttttatacctatgttcgattttgttttgttttgttttgttctggctttgaggcttgttttgttgtctgtgtctgtctgaataacctgcgtgtctaaaaccacgtgaaatgtgaatgattattggcaatattaccttgacagaatcatgggactttgagaagagggaggacagaggcctctgtcgcactaacgctctcgtggttgctcgactgttgtatctgtgatacattatccgactaaggactctgggctggcagggccttctgccgggaaagctagaaacactaggttcttcctgtacatacgtgtatatatgtgaacagtgagatggccgtttctgacttgtagagaaattttaataaacctggtttcgtaaataaaaaaaaaaaaaaa

SEQ ID NO: 948 - DNA, 2315 bp, Homo sapiens
ccgcgccgcatggaggccggctgaggagcgccgctgcctcgcctcggtacgccgcgcggcgcggacggcgcgctccccacaggtgcaggaagccgccgcccagccatggacggggaggagcagcagccaccgcacgaggccaacgtggaacctgttgtgccgtcagaggcttcagagccggtgcccagggtgctttctggagacccccagaacctgtccgacgtggacgccttcaacctgctcctggagatgaagctgaagcggcggcgtcagcggcccaacctgccgcgcactgtgacccagttggtggctgaggacgggagcagggtgtacgtggtggggacagcccacttcagcgacgacagcaagagggacgttgtgaagaccatccgggaggtgcagcctgacgtggtggtcgtggagctctgccaatatcgtgtgtccatgctgaagatggacgagagcacgctgctgcgggaggcccaggagctcagcctggagaagctgcagcaggccgtgaggcagaacgggctcatgtcggggctgatgcagatgctgctgctgaaggtgtctgcacacatcaccgagcagctgggcatggccccaggtggcgagttcagggaggccttcaaggaggccagcaaggtgcctttctgcaagttccacctgggtgaccgacccatccccgtcaccttcaagagggccatcgcagcgctctccttctggcagaaggtcaggctggcttggggcctgtgcttcctgtcagaccccatcagcaaggatgacgtggaacgctgcaagcagaaggacctactggagcagatgatggccgagatgattggcgagttcccagacctgcaccgcaccatcgtctcggagcgcgacgtctacctaacctacatgctgcgccaggccgcgcggcgcctcgagctgcctcgggcctctgacgccgagcccaggaagtgcgtcccctccgtggtcgtgggcgtcgtgggcatgggccacgtgcctggcatcgagaagaactggagcaccgacctcaacatccaggagatcatgaccgtgcccccgccgtccgtctccggcagagtgtctcggttggccgtgaaggccgccttcttcggcctgctgggctacagcctgtactggatgggccgccgcaccgcgagcctggtcctgtcgctgcccgccgcgcagtactgcctgcagagggtgaccgaggcccggcacaagtaggagactgctccccgcccgctcgggcccctgaggagccagtgcccccgcggcacttctgggtgccaggtgcatcctagcccgcccgaggcccctgccaccccccatgggggtctgggcccggcctcgcctgccctcctgggccagtcacccctcccccagcccacccaaataaaggattatttaactgtctgagctcaggcctcccggcagcccctcccctcccacactgcaggggccgttccccagcttctggacaagacacccagctccgagggggcaggggcttataggaggggccgaggcgtgcgctgccctctcagccctggtggcaggcgggggacaatggccactgtccctacctcactgtgccttcctgtgctccggccacaggagcgtcggcccaggggcggctcctgggggctccagggcaggcgagactgggaaaggcccagccctggagctccagccgaccccaccgtgcccctggcatcctggccctggccgccacctccctggcaccgtctgcctgcagggattctgtgtttttggcttttttaatgtcttaaaatcttttactcaggtaattttaatttcagagagaaaaactgaagtaaatgtcaaaaaacaccagccttaaatccaaagggagagaattcgtgttcttgggtctgtcccgagtgggctcgcgtgcagccaaacatcagctctgggtccaggcgtggcctcagctgggagcctgtgtcctgagcccccggagcgaaggggtgcctggggcatcttggccctctctgggcagacaatgtgtgcacctatgtggaaggccaaggacatgggctgtggccaggcctgtcccgctcaggccccctgcccggcggccgtctgtgtgcggggcctccctcctggctgtccaggacacagcccgtgcagccccagcctggacccaggccatctctggttgtgtctgtgccgactcggtgttgaatcaaatcaggtgtgcgtcaggagccggctgtgtccttcctgccacactcggggattcattccttagaaactgaaataaattctaattttggaaactc

SEQ ID NO: 949 - DNA, 1363 bp, Homo sapiens
ggcacagcaaacatggcggctccactagggggtatgttttctgggcagccacccggtccccctcaggccccgccgggccttccgggccaagcttcgcttcttcaggcagctccaggcgctcctagaccttccagcagtactttggtggacgagttggagtcatctttcgaggcttgctttgcatctctggtgagtcaggactatgtcaatggcaccgatcaggaagaaattcgaaccggtgttgatcagtgtatccagaagtttctggatattgcaagacagacagaatgttttttcttacaaaaaagattgcagttatctgtccagaaaccagagcaagttatcaaagaggatgtgtcagaactaaggaatgaattacagcggaaagatgcactagtccagaagcacttgacaaagctgaggcattggcagcaggtgctggaggacatcaacgtgcagcacaaaaagcccgccgacatccctcagggctccttggcctacctggagcaggcatctgccaacatccctgcacctctgaagccaacgtgagcaaagggcagaggcagttggcctatgagtgggctgatgcgtgaggttggccacacattccttcctgtggacttgacattttggaagaactctttgccagataatgagttcattttagttttatgctcccattgaaaaattttccactatttttataagctgttaatttcttgagtactttataacatgtctgtagcttggataaaccaagtaagtattttttttttgtctttagcaaagtttagactgtgaatatgatgacacagattcttttttatggtggctttgcttgttttaaatttttgcatgacttttcatctttttatgtgtgtttcctgtagtttgatccgaaggaaaagagtatagtagcctgagaatcaggagatgggagttttagtcgtaggccttatgataattaccccgcggtggtgtgtagaaaagtatgtaaatttgctctgttttaagactttgaactacctcaagaagaggaatctaatacaatatttgtaatgtttccagagctctcagaatgaggatttttttgtaaataggtcagaagacgatggaactgtcctgggttagtatagtaatcttacagtaggatccttaggttgatgctgacttctgtttggggtatgtttatattttatgtggtgtttactttttttttttgacataaaaggatatagtgggagcagtgatacgctaacattcattacattctgcagtaatgaatctgaaaaaaaaaaaaaaaaaaaaaaaaaaaaaaaaaaaaaaaaaaaaaaaaaaaaaaaaaaaaaaaaaaaaaaaaaaa

SEQ ID NO: 950 - DNA, 2322 bp, Homo sapiens
agagcctgtgctactggaaggtggcgtgccctcctctggctggtaccatgcagctcccactggccctgtgtctcgtctgcctgctggtacacacagccttccgtgtagtggagggccaggggtggcaggcgttcaagaatgatgccacggaaatcatccccgagctcggagagtaccccgagcctccaccggagctggagaacaacaagaccatgaaccgggcggagaacggagggcggcctccccaccacccctttgagaccaaagacgtgtccgagtacagctgccgcgagctgcacttcacccgctacgtgaccgatgggccgtgccgcagcgccaagccggtcaccgagctggtgtgctccggccagtgcggcccggcgcgcctgctgcccaacgccatcggccgcggcaagtggtggcgacctagtgggcccgacttccgctgcatccccgaccgctaccgcgcgcagcgcgtgcagctgctgtgtcccggtggtgaggcgccgcgcgcgcgcaaggtgcgcctggtggcctcgtgcaagtgcaagcgcctcacccgcttccacaaccagtcggagctcaaggacttcgggaccgaggccgctcggccgcagaagggccggaagccgcggccccgcgcccggagcgccaaagccaaccaggccgagctggagaacgcctactagagcccgcccgcgcccctccccaccggcgggcgccccggccctgaacccgcgccccacatttctgtcctctgcgcgtggtttgattgtttatatttcattgtaaatgcctgcaacccagggcagggggctgagaccttccaggccctgaggaatcccgggcgccggcaaggcccccctcagcccgccagctgaggggtcccacggggcaggggagggaattgagagtcacagacactgagccacgcagccccgcctctggggccgcctacctttgctggtcccacttcagaggaggcagaaatggaagcattttcaccgccctggggttttaagggagcggtgtgggagtgggaaagtccagggactggttaagaaagttggataagattcccccttgcacctcgctgcccatcagaaagcctgaggcgtgcccagagcacaagactgggggcaactgtagatgtggtttctagtcctggctctgccactaacttgctgtgtaaccttgaactacacaattctccttcgggacctcaatttccactttgtaaaatgagggtggaggtgggaataggatctcgaggagactattggcatatgattccaaggactccagtgccttttgaatgggcagaggtgagagagagagagagaaagagagagaatgaatgcagttgcattgattcagtgccaaggtcacttccagaattcagagttgtgatgctctcttctgacagccaaagatgaaaaacaaacagaaaaaaaaaagtaaagagtctatttatggctgacatatttacggctgacaaactcctggaagaagctatgctgcttcccagcctggcttccccggatgtttggctacctccacccctccatctcaaagaaataacatcatccattggggtagaaaaggagagggtccgagggtggtgggagggatagaaatcacatccgccccaacttcccaaagagcagcatccctcccccgacccatagccatgttttaaagtcaccttccgaagagaagtgaaaggttcaaggacactggccttgcaggcccgagggagcagccatcacaaactcacagaccagcacatcccttttgagacaccgccttctgcccaccactcacggacacatttctgcctagaaaacagcttcttactgctcttacatgtgatggcatatcttacactaaaagaatattattgggggaaaaactacaagtgctgtacatatgctgagaaactgcagagcataatactgccacccaaaaatctttttgaaaatcatttccagacaacctcttactttctgtgtagtttttaattgttaaaaaaaaaaagttttaaacagaagcacatgacatatgaaagcctgcaggactggtcgtttttttggcaattcttccacgtgggacttgtccacaagaatgaaagtagtggtttttaaagagttaagttacatatttattttctcacttaagttatttatgcaaaagtttttcttgtagagaatgacaatgttaatattgctttatgaattaacagtctgttcttccagagtccagagacattgttaataaagacaatgaatcatgaccgaaagaaaaaaaaaaaaaaaaaaaaaa

SEQ ID NO: 951 - DNA, 3232 bp, Homo sapiens
agcgataaggcggtggcggcggcggtggctcggggaccactggtagcggcagcagctcgcgcccgcgccctcctcgtacccgtgcgcccccggagaccgatcccgccccgcggcccaggccgggcctgaacccagcgggtgccgcttctccacccgaggcttccacctccaacgagccatgttccaggctgcaggagccgcccaggccaccccctctcatgacgccaaaggcggcggcagcagcacggtgcagcgctccaagtccttcagcctgcgggcccaggtgaaggagacctgcgccgcctgccagaagaccgtgtaccccatggagcggctggtggccgacaagctcattttccacaactcttgcttctgctgcaagcactgtcacaccaagctcagcctgggcagctacgccgcgctgcacggggagttctactgcaaaccccacttccagcagctgtttaagagcaaaggcaactacgacgaggggtttggccgcaagcagcacaaggagctctgggcccacaaggaggtggaccccggcaccaagacggcctgaggcctctgtaaccttccaccccctctgcggaaggcctggagccggcagggggaaggtgggaaggaggtcgagctgggcttgcgtgggggccaggtgggaaggggatgaggcttgctcaggcgtaggggaccagggcagggctctgctccaggactccttccttcttccttctcccgcagccggtgagggtttggaaaccaggattggggtctgcccaccaccctgcttcctgcttcgttcagcctccctccccacctcaccccaggaccccctgggaggcccccaagcccagctcccctatctaggtgccttttctccagcaaggagtcagcatgcccccctcagggtcccaagctccctcactgccaccggagactgtgtggcccccacgtctccccatctacctctacccttaacctgtttctgagccacggagacagggaggaaggagcgcgacagtgccacctgttgggcatcataaatgcccctgcagcccatgggggaggagatggggaagtggagccaccctgcctctgcagggcaaggcagggcctgccccagtggggcttgggaccatctcgaaccaccagcgtggagaagcagaagcaaaagcactcgccaggctgcagcctcaggcactggcaggggctggtgcggccccactcccctcccccgctcccatttgtgcccatcctgttgtgaccaaccccgttttaaacatgtttcaatagatccagattctctattgtgtggcctgctgggggatctgtcacaggaagggtgcagactcaccatggggcgggcatggggggacagggccagccccgactacctcggccctgatgggggcagggagctagaagtgggtgtcagttccctgacacaccattgagaaatgggagggctcctcttcacagcgagggcttcatgctgtcacacccacagtggttttggaactgaaactccacctcacccctcagttctgggttggttcagacccaccaacttaccatatgcaccccattgtgaagaggcctgagagcgggagggccaggctgccagtgggtgatggcgcctgtcctcgctgcacttcagtgcctggggtgcaagctgccgcgttccctggctggttccagctgtctagctccctcccttcttcccagccctttgacctggaagtaagttagcgaagaatggcggtaaccagcagacccagcaagtgctgcccaaggttttagtgacccctggattgtcccccctcatcattacccctcgctgctgtcatcatccccttgccttttcaagctctgcggaggtgcagtcacagctactgtctcaggaaatccaaagagaaactacctctgcttctctgaaaacccagggacaatgagggatgagttcacagcagagcaaaccaggcaagttgggaggacctgagggcgccccggtgggacacaggcagaagtctgggttgtcctgctccagattcaacttcctgatgtctccagacatgggatcgatgagaacagagactcctggagggtttgctgccaccacaccatacaactgcctgagttcctaagtggcctccccgtggaacagggcagggagctgggccacaggctccagtgtcacataagtcactatgctgaggcaggcactgctcctcgagggagcagagcgaatactcagcagagatggtgccccggcctggatcctcccaagtgtgaagtgagcgcctcagagcctctcagggcaggccaacttcctgcaccagaggtctcagatggcaaggatcatcttggttcggttaagcaacagtagcagatgaccacaagggggtactggagaggtggctcttggagacacctgacccctgccctgcaaagatgggactgaaggaagtcctctgggccaggaagaccctaccaaatatcatgaaagctccgggaactcagccactggtgacgttcaggttgtgagggccagcagtgccaccctggtaaatcagccctgttgggaccaccccagtggagctcctggaggggcaactggaggaaaggggcagacacctctggactgacaatggtatcagccagatcaccccaggacccctctacttggagtcaagttctcttctgcttgaaaggcccaggctcgttgccaggcaccatacctggcccctgctaagcaaaaacctacctccaccccccacaactgaaagcactgccacaggacccctctgatataaatgatcccttttattgtaagtaatgcgcaacactggcctggctttgcactgcaagccctcggtcaagatatagtcaaataactatggctgcaggttccacagttccacaataaccatggctgcacgatccacaattcagacacagacatagagctggggtgggtggaaggggcaggagggtggcagagtgcggactgtccccagccctggcctctccatgcagagttggcccaggcagacacaccccatggaatgatgagaaagtgacggcacggccccttcccacagcaagcctggggctgccaggaactgcccttcagaacctttgggcccaggtcaccctgaagccccacaactttttatctggattagttattaaaaaacaataaattaagcaacaacttggtcctgaaaaaaaa

SEQ ID NO: 952 - DNA, 7769 bp, Homo sapiens
tttccagctggttgtcatttcactcggctcggtcctgaggagaaggactcagccgcggctgcgggacccgggcaccgggaggcggtggcggcggcggcggcggcagcagcggcgacagcagaggaggaagaggaggaagaaggaaagaaaaagaagaaccaggaggagtcctcaacaacgacagcggggactgcgggaccagggtaaagcggcgacggcggcgacggcccagcaaccgtgaggagaaacaaaagccttctaaattatagtttaaaaaaaaattctgggggaaaagagagagaaagccgaggggggaggcccttctcctttaaaataactacggtagtgggtttttcctttttttcctcttttttccctctctgcggagaatcgaactgagggaactgaacaaaccgcccctgggtcccatgagggaaaaaaaccccggagccgcagagaggggaagaggcagaaaccgcaggaccttccaggtcgccccctcggtccccgcacccccaggccgcccgctcaccctcgtcgagtctcgctaatccctcctgatcgcgacccccgcaagagggagaaacgggtgtttccaacccctttcatgggggagaggaagccgcggggagcccaggaacagcgaccgcagcaagatctgcacccggagcctcaggaacagccccagaggccaaaactgcaccctgcgaaagagcagaaaacaggaccaggaacagcagaaacctccctgcaatcatctttccattagtcaatgctgatttcctctcccgaaaccaggaattcacttcccaccccagataacctaatataatctatatatataaatatataatatataatgttcttaaattattcctgatttttttttaaccaagctgccaagaaaagaacgtattcccctcttagtcctattctaatttttatgtgagtgaatctaaactgctgaggaaaaccatatgtgattgttaaattatatatatctatatttttactccgcgcaaggcttattcttctacatccatagatgcttgagaagctctgtttttgtcattcatgtacattttcctttggaaaaagaaagcgcctattttactaaccaaagacttgatttttaccctcttcatttttattccctcctaaaaataagcccaattggatccaagtcaatgttttaagagatttttttaagagttgttttttctttcagagaccagaattccaaatcagaacaatttaaggtgataagctgcgatctttgagctagctataaataagacatttcaagcaagcaagcaaacaacttaaatttggggtagaggaaaaaaaaggcgtgagacatcaggttgtcattttttattgtgagattctgctcctaaagataataaatgggggattacgggtttggagtgctagtgcaaagcaatactgggaataaatctgcttttccagtcagattccatccacatctgcagcctccacaccatcaccaaaatgccacccccagccctgctgcttttataaataataacacagctgccaatggcagcagtgctgggtcagcttggctttttcctgctccagctacccataacattcaggatgagatcttggggtcagaaaaagcaaaaagtcagcaacaggaacagcaagaccccttagaaaagcagcagctttccccaagtccaggtcaggaagctggaatactgcctgaaacagagaaggcaaaatcagaagaaaatcaaggggacaattcttcggaaaatggcaatgggaaggagaaaataaggatcgaatctccagtgttgacagggtttgattatcaagaagccactgggctaggtacttcaacccaacccttgacatctagcgcatcgtctcttactggtttcagtaactggtcagcagcgatagcgccttcctcctctacaataatcaatgaagatgcaagtttctttcaccagggaggggtccctgctgcttcggctaataacggtgctctgttgtttcaaaatttcccccatcatgtcagccctggctttggaggcagcttctctcctcagatcgggcctctctcacagcaccacccacatcaccctcatttccagcatcatcacagccagcatcagcagcaaaggaggtctcctgccagtccccatcccccacccttcacacatagaaatgctgcttttaaccagctgcctcatttggcgaataatcttaacaaacccccctctccgtggagcagctaccagagtccgtcaccaacaccctcctcttcctggagcccgggcggtggtggatatggtggctggggaggttcccaaggccgagatcaccgcagagggctgaatggtggaataacgcccctgaactccatctcgcctttgaagaaaaattttgcaagcaatcatattcagctccagaagtatgctcgccccagctctgcctttgcacctaaatcctggatggaagatagcttgaacagggctgacaacatttttccttttccggatcgccccaggacattcgacatgcactcactggagagttcactcattgacataatgagagctgaaaatgataccattaaaggtcgtctaaactattcatatccaggatccgatagctctctgcttattaatgcaaggacatatgggcgaaggagaggtcagtcttcactgtttccaatggaagatggattcttggatgatggccgtggggatcagcctcttcatagtggcctgggttcacctcactgcttcagtcaccagaatggggaaagagtggaacgatattctcgaaaggtgtttgtaggcggattgcctccagacattgatgaagatgagatcacagctagttttcgtcgctttggccctctgattgtggattggcctcataaagctgagagcaaatcctattttcctcctaaaggctatgcattcctgctgtttcaagatgaaagctctgtgcaggctctcattgatgcatgcattgaagaagatggaaaactctacctttgtgtatcaagtcccactatcaaggataagccagtccagattcggccttggaatctcagtgacagtgactttgtgatggatggttcacagccacttgacccacgaaaaactatatttgttggtggtgttcctcgaccattacgagctgtggagcttgcgatgataatggatcggctatatggaggtgtgtgctacgctgggattgataccgaccctgagctaaaatacccaaaaggagctgggagagttgcgttctctaatcaacagagttacatagctgctatcagtgcccgctttgttcagctgcagcatggagagatagataaacgggtggaagttaagccatatgtcttggatgatcagctgtgtgatgaatgtcagggggcccgttgtggggggaaatttgctccatttttctgtgctaatgttacctgtctgcagtattactgtgaatattgctgggctgctatccattctcgtgctggcagggaattccacaagcccctggtgaaggaaggcggtgaccgccctcggcatatttcattccgctggaactaaaggataactgcagtgctcattttcaggcctcagaataagtgcactcttctgttcattctgaccccttcctcaacctcttcacgctggcatgtccttttgtagcagtctgtaacttaactatagtataatgaaaagaatgacctataatataggtgttttgtagattcttgtgtcactgcaaacaatatgaactcctttttcgtattgccatcgggttgcatggaagttttattctcttgttttgctggaaaccaagaggatccaaacttcctgcaacattttcttagaggagagagagaaatattaaaagagaaatgaaacaatagagtattttgggtttttaattaaattattgttaataatataacatataagaatacttttattaaaataaccatgcaacaataacactatcggtctatctgacagtttttcccccagggaagtgcttttgccttttcctttcttttttttttttttttcatcttttttgtctctctcttttttccatccctttttaatttttttaacagcaatggaggaagttaacaatttttaatggaaagagcatgttagagcaaacaaatgcataagcaagactgagcagcattataattaattttcagggttttgaggctgaacataatttcattatccctcaaaaagttaccaccacatcagaaaaaataaaaaaaaaatagtaaagtaggcagagctaggtttattttctcttaaacaatttttaaaattcagaatgtaaaaattgggtaaatttactactgaggggagtgcacttatttatttaacttacttatctggtcaaagccccaggaaacctaccaaagctagaattaatgacaactggtgggaaacctagcatttcctctcctgaagaataaatgtataaatgttatttttgatgtttatatataaactctatatcctaatttactaatactcatcagatgtcagcctttgctctccattttgacgttaaaaaacaacaacagatctagagatacctcaaggatatcatttttgattttgtgttacagtacacttgtagccaaaactggaagacaaaaccaatatataatttggctgctgattggcttacttttagatttaaagttactttgggtatcctgtaatttagttgtaacatagaaaatgaaaaaacagttaaaaaaagtgaagtagttgcaaagtgttttgcactgttgaactaagtaactgtgtaaatctgtgcaaaggtacgtatgtttatcttactcttcctataaactaaaataacattacagtttccgaatttagcatgggacatagtcagtgtttgaagtgccaacttcatcaagtaatgcatgctttattataaataaaattctagctttgaaaggcgttatgtgttgaacagtatgcttcaggggtaaatttaaaatagtctcttgaagccctagtcatggaagtaacttttattttaattgacattctcttattaaatgccctatccatcattaaaaggtttattatcagtgggcaaaacatgaaataatatgatcgaatggcaatcttgctagttgcgctacctaacagtaccatcttggatccttcaaaaccaaagacttgccccagcactgctgtggaaccacctggcttatgacccctatggatgatctttaggaaaagcagccctttacttttaatacaggctttaatgaactatacctgttaagttccaaaggtcaaaatggaggcatttgctgtctaatattcaaacatagaaagggagctgcttttaaagaattccctgcaaatactgaaagcagtcatgcgaatggagggtgctcttgtgtagctggtcagggacttttttttcttttctcctgaactacatgattctaattggaatgttcatttgcctctttttactcttttaaatgcttgtaggtggcttggggtgtgctatcgtgctgttcctactcagtaaacaggtgtgatgagttaacaagaaataacactgtttgagaactagctttgaataataatttttccctttgtacatgacctgctgaatttcggtacagtgtttttgtagctaacttattttgtcatgcacataatgtatatttgttatgcactacttttgtatatcttgtttttccaacagtgaacatttttaggcacacttttcactgacgggatatctctttatgcaatacctcaatttttcatattgcaaagagtagctttttgtacttttattactgagagatcttcatatacttcattttttaatataaataattttaataaattttattttcttatattctgctttttatacatttcagtgctctgcatacattttaaattatgaatgtcgtgcactggcaatgctattttagagtctgcagagaagagaaagcatgttgcttaaacatccttccccagcaccagctattggtgtacctataatttaagaaatagtctatgtaaagtcacaaattaatgaaaaaaattcgcatgaaaatgacagataacactgtagttcctaaaaaaaaaattaaatgcataagcataaggtagaaattaaaataacaaaattgtctacagcttcttactaagtttttaaaattattcataaaatgcagacatttttggtgaatgtttagccatttttaatattaataaattgatgttaagtgtttgattcagagatgtctgctcttttaaattatatataaggaaaaaaaatagcctgccttgggacaggtgtgtaatgttagtgtgcatgactaatgtaagaaattgttattctactaatatttacttgtgattgtgtgacaagtgtgtttacagattattggttacacttcaatttacagggcataaacaatgattatctattactctgaactttatgattacatgttcttcagattacatgggattgtagttgggagttaccatgtaactcaaacataattaacatgtaattagtttacagattgtagggcatcacttcaattcaccaagcatgtagttctagcgcactagcatggcgccagccatgtacttacaatgtagttacagagtaattacatggtgatttttgcaatgtaaaataaagtgtttctgattattttctatgtaaaggaaccctctcctttccccttctggtccctgcgctttggtataatatatatacttctccatacacagacctctgcagaatgcaaaataaaacttgcagtgaatgaatttagcattttatgagagtgctgttggaaagacttgataattcaccccttttgttttgaagagttgaatcttctgttaaaaggtgatttaaaacttgaatgtgatgaattgtggcaagttaacttcaagttatgtgcaatacttatttcaaacttttgaaagatctttgcagtgtaattctttgtttttaattgcagacatttaaaaatgtcattttctactgttaagagtaatcctctttcttgctggtgtttctaaagaaaagaatcagaaatcaatctttctactaatgtaaatttgagattatttttaaaaatggaataaaagaggttttggtcatttgctttattttattattttaaagctactgtgattgatagcattgtaagaatcgggacaatattgtattcaactgttttattttttatatttttaaaatttaaagtataattagtttttataattttcatcagatttttgttatattttttggaagtgaaacttttagcaagtgggtgtctagtttttactaatccctaattttttttccagtgtattgctcatattatcagaaggaaaagttatttaagtatgtcagttaattgtactacttggctgaatttccatatagtttttactgtgtatggggaggttgtagtatttattatagcattttaaataagggtaattcattttttattaaagtcattttcacgttaagttcctatttttgtatgttctactcttaagttatataacacagttccttttttaaaagagttcatttgttgaagtgctagtgaaaaattaatgttattaaatagtttgcaaatgactatttataccagtatgcatataatttttaaatatttgtaatgtgagatgttgaatgaataaaacttttaactcaga

SEQ ID NO: 953 - DNA, 6312 bp, Homo sapiens
gtttttaaacgattattaccacctctctctcccccccaacccccactttcacaacgcggccccccacctttacctccctaagttcttcatctctttcgacattttttttgaaggctgatgggggggagggtggaagagaaagagtgaagaaaagttgcgagcgtctcctctcttcctaagcctcccgccccaacccacccctcagagaaggagaagataatatactgaaaagaagaggaggaggagagcgacgggacgggacgcgagcgggagcgcagccgccctctcggctccgcggcggcgcctcgcaagtccgggaggcgaggggggcccgaggggagacgccgtgacaactttcgtttccctctgagggaattgggaggtcggcggccccaaaagctttcagtccagtgtaaagctgttggagcgcgggagcaaaggtaaagaatgatgtaatgcgctggctgctccaaagcatcttttgttgtggaatggttattccagtcatctctttatgaatcaaatgtgaggggctgctttgtggacggagtcctttgcaagagcacatcaacgggaaagagaaagagacattcacttggagggctcttgctgaaaatgggtttaactctccttttgccagtcaccaccagcctgacctcatacacttttagtacaatggagtggctgagcctttgagcacaccaccattacatcatcgtggcaaattaaagaaggaggtgggaaaagaggacttattgttgtcatggcccatgagatgattggaactcaaattgttactgagaggttggtggctctgctggaaagtggaacggaaaaagtgctgctaattgatagccggccatttgtggaatacaatacatcccacattttggaagccattaatatcaactgctccaagcttatgaagcgaaggttgcaacaggacaaagtgttaattacagagctcatccagcattcagcgaaacataaggttgacattgattgcagtcagaaggttgtagtttacgatcaaagctcccaagatgttgcctctctctcttcagactgttttctcactgtacttctgggtaaactggagaagagcttcaactctgttcacctgcttgcaggtgggtttgctgagttctctcgttgtttccctggcctctgtgaaggaaaatccactctagtccctacctgcatttctcagccttgcttacctgttgccaacattgggccaacccgaattcttcccaatctttatcttggctgccagcgagatgtcctcaacaaggagctgatgcagcagaatgggattggttatgtgttaaatgccagcaatacctgtccaaagcctgactttatccccgagtctcatttcctgcgtgtgcctgtgaatgacagcttttgtgagaaaattttgccgtggttggacaaatcagtagatttcattgagaaagcaaaagcctccaatggatgtgttctagtgcactgtttagctgggatctcccgctccgccaccatcgctatcgcctacatcatgaagaggatggacatgtctttagatgaagcttacagatttgtgaaagaaaaaagacctactatatctccaaacttcaattttctgggccaactcctggactatgagaagaagattaagaaccagactggagcatcagggccaaagagcaaactcaagctgctgcacctggagaagccaaatgaacctgtccctgctgtctcagagggtggacagaaaagcgagacgcccctcagtccaccctgtgccgactctgctacctcagaggcagcaggacaaaggcccgtgcatcccgccagcgtgcccagcgtgcccagcgtgcagccgtcgctgttagaggacagcccgctggtacaggcgctcagtgggctgcacctgtccgcagacaggctggaagacagcaataagctcaagcgttccttctctctggatatcaaatcagtttcatattcagccagcatggcagcatccttacatggcttctcctcatcagaagatgctttggaatactacaaaccttccactactctggatgggaccaacaagctatgccagttctcccctgttcaggaactatcggagcagactcccgaaaccagtcctgataaggaggaagccagcatccccaagaagctgcagaccgccaggccttcagacagccagagcaagcgattgcattcggtcagaaccagcagcagtggcaccgcccagaggtcccttttatctccactgcatcgaagtgggagcgtggaggacaattaccacaccagcttccttttcggcctttccaccagccagcagcacctcacgaagtctgctggcctgggccttaagggctggcactcggatatcttggccccccagacctctaccccttccctgaccagcagctggtattttgccacagagtcctcacacttctactctgcctcagccatctacggaggcagtgccagttactctgcctacagctgcagccagctgcccacttgcggagaccaagtctattctgtgcgcaggcggcagaagccaagtgacagagctgactcgcggcggagctggcatgaagagagcccctttgaaaagcagtttaaacgcagaagctgccaaatggaatttggagagagcatcatgtcagagaacaggtcacgggaagagctggggaaagtgggcagtcagtctagcttttcgggcagcatggaaatcattgaggtctcctgagaagaaagacacttgtgacttctatagacaatttttttttcttgttcacaaaaaaattccctgtaaatctgaaatatatatatgtacatacatatatatttttggaaaatggagctatggtgtaaaagcaacaggtggatcaacccagttgttactctcttaacatctgcatttgagagatcagctaatacttctctcaacaaaaatggaagggcagatgctagaatcccccctagacggaggaaaaccattttattcagtgaattacacatcctcttgttcttaaaaaagcaagtgtctttggtgttggaggacaaaatcccctaccattttcacgttgtgctactaagagatctcaaatattagtctttgtccggacccttccatagtacaccttagcgctgagactgagccagcttgggggtcaggtaggtagaccctgttagggacagagcctagtggtaaatccaagagaaatgatcctatccaaagctgattcacaaacccacgctcacctgacagccgagggacacgagcatcactctgctggacggaccattaggggccttgccaaggtctaccttagagcaaacccagtacctcagacaggaaagtcggggctttgaccactaccatatctggtagcccattttctaggcattgtgaataggtaggtagctagtcacacttttcagaccaattcaaactgtctatgcacaaaattcccgtgggcctagatggagataatttttttttcttctcagctttatgaagagaagggaaactgtctaggattcagctgaaccaccaggaacctggcaacatcacgatttaagctaaggttgggaggctaacgagtctacctccctctttgtaaatcaaagaattgtttaaaatgggattgtcaatcctttaaataaagatgaacttggtttcaagccaaatgtgaatttatttgggttggtagcagagcagcagcaccttcaaattctcagccaaagcagatgtttttgccctttctgcttcactgcatggatacagttggtaaaatgtaataatatggcagaattttataggaaacttcctagggaggtaaattatgggaagattaagaaaggtacaaattgctgaggagaagcaggaaacctgtttccttagtggcttttatcccctcggcatgcgatggggctgatgtttctatgattgcctcagactttcacatttactagtagggctgagagaggctttagtgaggaaggaatattcagaataaaacggttgagaaagctgagaagaccattgagttttgatcagttgtgaatagagtgcaaagccatggccaagctgtttttggaaacgctggccggcgtgtcttcagtggaaaaagcaaatcaaaatggagcgagagcaaaggggcgtcctcagtcctcaacctacaatcactgtatggaatcggtcctggcagctgaacataggaggtcactggaacaagtgatagtgcagattggctttcaaacatcctcctggcttgagttttatcagctacaatgtgggtcctcttttgaagccttaattcacaacagcagctttttgggggtggggctgggcgggtgttgtcattgttctttcccttcctgtaagtgtcgctagttgctgcctcgtatctcaggtttttctctgtttttgagaaatggacagttttttgaccaggatgtgacttcatgtttcctatggtgacttctaaaaccagcacagaatgatatgactcaacacagaccgacttggttatggggatgatgagccgcacagacctcactagttgtgcacaaataatgtgctatgatggggtgtaaagtgaaggcagaagagggtcagccgcattgttatgatactgggaaagtgctggtcaacgatttgagttagtttttagatatacattgaaatctttaatcagacattctcaagtttcacacagtagtttttgatgttatgtacacacacaccaaatgtgtaacagttcaccacttccagagtgtggtcatgcccaaaacatgtttaagaaaggaaagcagtagctccttgctaacgatgtttcaggaggtttgggggacttggttttaatgagcttctgtcatttagggcttctcttggccatggtcccccttccttctggaactgtgatgtagtcacatcctacagcctttagtgctggttcactagtgtcagataatcagttcttggaatcgagactgccgtggcgaaggggtggcctcggaggcaggctctggagctgcttggatgtctttaggtggggtggtggctggctctcttcagcatgtaattggggaaaccctcgcgtctactaggggtgatacagatggtgattttaaagagcaaaactagacttctatgtgagaagtgctggaaaatgatttaggacatgtgtaaagttagatggaaagactgtaaatgtttaatatgaatatagtgttcttttgaagtaaggccagctgttgaacggttaaactgtgcatttctcattttgatgtgtcatgtatgttaatgtatgaaatgattaaataaaatcaaaactggtacctgtttatacataaatacgagaaaagacctatctttgcagccataaactcggtgggaacaccaccactcaagttgccaaaggaggcagtggtgaaacctgtcctgttctcacttaaatgaggatttagctcaaaataaagtggtggtgtcatcaggtttattccgtgttctgtcattcacatggaacaccggatgattagctaacagtttagtgccagccttcattctttactgtgtacgttaaatgcacactacagtgaaaaagcctaagacacttggtaaatattttctagctgactgattccagaacacacaagtacatggtaggaaaaaaaaggccagctacacacacatggcccatttcgatataacatgtaaatgatgttacgattcctacaggaaaaacaggaagggcaattgttgaagagctgtcctttgtccttgccacatacatctcaacaacctctctgctcatgacactagatttgatgacttatgagactagaaacttagtctcatcagtttcataaaaattaggcattgaaggaataaagcttcagtgcaaacagatggaatattgactacagaaagaatcacaggtgaccttgaagttggttgagttgaagttacatttaagaaaatttataagaaagattgggccgggtgagctagactagaagagctatcttggccaggaccctgcagaaaaagaggtggaagtgagatagaggaataaagggaattagaataaatcagcctccagagatagagggtaacaggaggaacagttgtttcagtgagaggcttccaatgagaagatgcagatcttgggagagcctgaagttcaggccagttgctgacagtgctcggagccccttcatgaccagcctcagcaggctattgttggaggactggtttggatgtgacaactacaattagaccaggaattaaac

SEQ ID NO: 954 - DNA, 10308 bp, Homo sapiens
ccctccctcgctcgctcctcgcaagctcccgctcgctccctgcccactcccggggggacgttccgtgccgcggccgccgcggccgctgcttctttcacactttagttgggagctgcgcgccgcgctcagttactggagagctggccgcgcgccgccgcctcccgcacgcttgcacgcgggcccggcttcggggttttgggttcttactccaagcggcggggaggagggggagccccggacacactgtggggaggaggaggaagaagaggaggagggaggaagaaaaaagacgaggaggacaggggcggggggcgggaggcttgccaccttcagcccccccgcgaacgcccaaggtgcacacatcttgaccaactcagcagcaaggtggattttctttgtgtttaaagaaaaaaaatgtccctgtgtctgtagagatgatttgcagttcagcccggctgaagctgaccgaatgagactatgggctgtgcctccgccaagcatgttgccactgttcaaaatgaagaggaagcccagaaagggaaaaactaccagaacggagatgtgtttggcgatgagtataggatcaaaccagtggaagaggtcaaatacatgaaaaatggggcagaagaagagcagaaaatagcagccaggaaccaagaaaacttggaaaaaagtgccagctcaaatgtaagacttaaaactaataaagaggttccgggattagttcatcaacccagagcaaacatgcacatctctgaaagccaacaagaattcttcagaatgctggatgaaaaaattgaaaagggtcgggattactgttcggaagaagaggatatcacatagcaccaattttaccactcaaaccaggagctactactgtgtaaataggttacaccccagttgaaatctttgcaaaggtcggttctattcagcgaacagcactatagcaaaagaagatcgttccatattgtacgccccattaaattacagtgtttcttaatgaacttgcaaaggaatattgctaaaaacaaacaaaaaaaactgttatcgaactttctttgttgctgctagttaaaacttgttgcaacttttcacttctcttgtgtccaggtatgcagcaaaattctgcaatttcaccttaaagatactgttggttttacagatgctctccaacctattttctataagatgaggtagtggtgaactcagataacaaacttctcttctaaactggttctgcttctaagacaagcatctcctgccctctctccttcctccccatctctcgcacgcagtctagagatggactgagccttgcttctcactggcagtgttgagctttggagatgggatggttgctatgccaagccttgtttctctgctcagaagaagtagagaagctattatcaattaaaagcatgctgtgatgtgactcctggaagtgacgtaggagtgagtggcaggttgtttgatttaataggtatcttaatcaagaattaagcttgcaacattggctttgctcagatgcagatggaagtgtgatcacaatcattttgaatccctcttcctcacttttttttctaagaaaataaacattttactgtttttatggatccttgtcttctcccattcatccagctcagtgttttaagatgatcctgggtgcagaagttgagccctcctttgcattgacactgataattagcctatagggctccctacccttccattaagaatctaccaagcattagcaaggctgaaagtggtctaagaggtgaggggacatcctatgactttttaggaaggcctgaaaccaccttgttacctttcattttgttagcaaataaaccatcctattttgtaactctcccccttcaaaatgctacatgagccttgccacttcctttttctcttacttccagcacactagacatagcaaaagtgtttgcctactcaaaaacataatacttttatgctgatgatggtatttggagatgtgaaagccaaaagcccctggcagtggtggggaatgttgactgagtgttcagcagagtttatttttccatactatatgaagagaatgatctcttctcaaagacagaagtgatatttttaacaaatattgtcacaagtaaatagcaatcaaaaggagaaaataacttttgtatttttttaatgtgtttgatagctttgacgagggttctctttgttactttcaggggagggcatcctattaaatgccacgccagcagtccgggtctgggtttgtcccacaaaatcacaggagcactgtatgttcctctcttttggagttgtgactttgaagggcctcaatattagccacactgccgcctgcagaaggtggagagttaagatgttctatgtcaatttgctcttgccgaaaagatgagcctcgattttaaaatctatccacatccaactgatggcaccattgatgtgcaaataatgagattccctatctccttttagacctgggacggcaaaagggaagggaaggaaacttagcagagtgctattgactatagattcacatattagcaacaaaatcccgtaattcttttggccaacagcagctattttggggagcagctgtggctgttacataaatagagatgcagccaaaattttaggccttttatcctgcttctagcagaaaaatgcagggagagtcaagtagtctagggtttcaggttgcctcccctcatatggtttttggccaagtgactaaaacagttttccacaactgtaaacaaactgctaagccccacctcaaacttgttcactggggactttgcttaccgttctgtgggtgaccttttccgggatttcttgttcttatcaagcaagaattaagcacatgctaaacgtcttccatttgacttctctactcggtgtctcagacagtgtcttcccagaaaaccaccaccctctacccaaagatgaaacatgctcatgtcatttttctcatggtcacatttaacagttttgacatgttatacttgcgcatagatccaagcgtttcttgggaacctgacttttgagtgtttaataaagccggaagtggtgttgccctgaaccagcagattttcacctgggttctggctccggtgtttaacactggatacatctttgatgtgcgaaagtgagttcatcttcagacacatttggtacatccagaaatagatccaagaaatggggtggttgagtgggtccgcacgaaatgcttgattatgtcagcaacacccaacactgtctgttttccatttgttggttttaatcataaaattgtcaagtgattcgtgtttgtactttatttttttgtgccttctgaaaggatctaaaacaaaaatattttgcctttttttccccacgtgtatctgaacattaagcagattggctcagacacaatgaaaaggataatccaatgtacgtgctggtgcactctgctagttgttatctctgtagggctcaggaagctggaaggaggaagggagggtaagtggcctggtgagtggaggtagaaaaatgatgagaaatgaactgagagcattaagcagagagggttgataggctggccgtgtccggggtgaaattggaaatccagctgcctagtggccagtgggtggggcaagactgtcaacgagatttacagctggcttacacatgccttatgtcctctgagttgtagagttgtaaaagttcagcagtgtgtgcacagctttcttttggttggcagagattcaggatcatggagtactgctctcataattgaagacgtgtttgttattggcagagaaccttaaaaaaggcctttacctcagcgatgcttcctagccccaggcttgcagagaacacagagtggtgttgtggtctatttagggacaaagaaggtataaagtccagagatgagaaaactgggtcagccctcagaaactgcagcagccacgcacacagaagcctgctggaagacaggtctctctccgtccacagtgcccatcatctgagcctgggctgggatgactcaacttagcaaagacggacccaggaggagtgctggttcttcagtctttgtactggccccatcctctcctcactgtaatgtgaggaagcacctctgtgtcagggctcacctgggcatccaaagcggccacgcccacaatccgacagcccccaggagcaggtccagggatgatgcagcccccttcttggtcccatgtgatgtcatcctgctttgttatcttcttataactttatcctgctataactttatcctcttcccagcctcatccctgtttttctgttagggcaagactcttccataagcctgctaaaaaacagagatgatacctcttacaaactttacctcatagcctgtgaagcaggttggcatgtggattacaagtcctgctttgacactgggcaagaatttaagattgttctatctctactagtcatagaaaagaaacattgttaaacatgttgagttttaaaggaagaaatattttcaaattcttaatccaagaaaatactgagttggaatcttagacttcgggactctgacacgttctttatgaaaggcaaaataattggtatctaaagttctctccttcctgcctcccctaaagaaaaaggatattagattgcacactataattttacataagatctgccttccacacttccctgctggaaggcattctcagagctttatgtcttcgtacctctcagagattggactttttcttgtttaaaaccccaaccaaaaaaaataataaggcatgattggtggggagggaatgtgtatttaggggcataataaaaaggtggctcgaagcaggaactttggcctcatggtgtcatgggtggatgcctggactccagtgtgcctgtgaggggctgggttaggcagtcggctgtcacactcacatgtgcctgcaataaaccttttggaatttcatgaacgaggtctatgaattgccttttgccaatgaatggatgtatttttccaaggggggaatagtatccttgactttggcagtcacctttttgtatgtctctagaaaggggtcaaaaaactatggtaaagatgaggcttatgagtgaatacctctgggacaaaccttaggactcacaagctatgccatgtttttcaggagactcttgtaccttatctggaatctaatcttgggagaagaggaaaaaggagctaatatttgtcatttatactcactctgtgccagatactgtgctaggcattttataattgttttgtgtcatcctcatgataatcctgtgaagtagatctattacccccgtgttctaaataatagatcttaagtgtggaatgcatctatccaacataaatgcccatgttgaaagaaggaaagatgtcattcaagtatttttcaaattctttttattatgactatgcccttcgcaacactgtgaaaacaacccctgggggcatctgccttccagaatctctctctggcttctcaccagcttggtttcctcatggggagtgttttatttggcctcccctatctgagctgcacacacaccaggggaggccactggctaacagtaggacttcagtgccctgaggaaaaggctttgggaatttaggcacacgtttctctccttggaatccttctagcatctggaaaaggaacctggtatttctgcagttagataccagatgcaaccagaacaggctttcgagtgctgtgatttctttcctgggttcccaagtcttgttgtttcatcacaaactgtatctttttaaggttaaaagtcttgaccttcatgggggtctgggacaatccgatctccaagcatggaggaaaggcaatgcctggaccactgacttgcattgaaatcctttcttgtgggctagggtttgatgtctctttttcatctttggactggggatctgcatcttccaggtccatttaagcactgaaactagatgcaaatctctttcgagaccttacatgttttagatagtcatgtaatgacttggatagacatttaaataacttgttccaaggtcggaagagcccaagaactcctcagagttcctcttcttgcttcttgaatcacatcctctaaagatgactcatgtctccatagcaactgttaaaggtgctgcctagacgggacccgctcccacctttacttactttgctcgaaggaaccaaaacaatgtccttgtgtaaaggggctgtcatatccagttttcctttgaaatctggcccccaagatcctgcttctttctaacctggcagctgtcatgtcccttcaagatgatgtgggaaatggcccttacaacttgggaaccacagaaattgctgtatttcgggaagattcacctctaaactgaaggcttcattctgatagtgtctgccctctctaccctgatttcgcccttctttgcttccatttttagcccaaggctttgaatttgattgagtaagacttagaggcagtataaagaacaccataaacttaggcagaggtcccttagggtctctagagttgaaaataattctacagccttagggggacctcttggcattgactctaaagggagagaatagcccctgtgtcctggcatttcagtctagaccttcaaggactgttctctcttgacaggcaagcaagcaaagaaagttttgcaatagatttcaagccagtttttccattcaaaccaagatgcaaattcataaaattactcttttcctggaatagatccaggcagctgccttattagaactttagattcggatctattttcttaacacacatacacatacacgcgcatacatacatatacagagagatacgtggagaaaggaaatttactctatcattgcaatacttcaagaaagagctgtattttgcctttctgtaatctccaagatagtgtctaggaaagtaatagtataactatagggataccgaaacaggaaaaaccagccatcactcttgagaaagtttgagttcgactcacatgggagaatcgaggtctgctactcgtcttgctttgtgccccatctgtgcctggatgccctactacatctgcttgactcgtctgggctgctagccggggtgttgtggctgacatcctttcctggccttacacacataatagacacatccctaacggcgtgtgcctggtccagccacatacagccaccacatgtgtcacacactgtccccctcatccatgtggacttgactggcatttcagcagctccactgggatgctctaaccccagtgtgtggagttggggtcccttcatctaggttgacccaggtatagcatttttagcattgcctttccagtcttgatgattcattcattgaactcatttatttctggagcccctggtacactccaggcactgcgctaattgccagcaaagcacaactgaactaaatccaccttcaaggaacctagccataacgagggaggcagcatggaagtaccctacaggggaaagtcctgagtgctgtgggagcatctcaccgtggcagccagcccagttttggcaatcaggggcttcctgaaagaggtgacatcaaagcccggatgtgtcagaggactgagggagagtgttactaaaggactttcaggctgagaggatagcacaggactcagcccaaaggagggccagtgtggactgtccagggccagcctgcagtacagaggctggagcttggacttgtagagggagagagaagagcaagggacgtggacggggcagtgagccaggctagccacagagggttcccggggctttgctggggattcagggagcataaataagagctttaggtggtgctgtgtcctctgcagcccactgctgaggtcctccagacaggtaaggtgtggtcacaatcagggccggggtttccctgctcactgcggcagtgcaggggtgcttgctgagatgattcatcccagggtgtcctctgtcccttacccagccccaactcctcttcctctgccaaaagctatttgaattcaaggactttaacctgggccggatctggtttggagacaaaggggacagctctgggtcagcatgaccttctttagagccactaaggcgaaaaataccgtttgggaccaggctggcctagacccagggatgagaatgcaccctaaaataaatatacgggaagcagcagagggcttccctgtctagtgtgtgatcctaactaaaggcagctctcttggacagccttcccctggattaggtcacatacacctggtggccaagcctctgctgggtcccaaatacacacccgagtcctgccaaagaaaggagatttttaaaaagcacagacaaattgtatgcaagtggaaaatacccataggcctagacagctgtggagggaagacctcgtgggtacctggaggctgccagagctgggagctctgcaggtatgagtcagggaaggctcagagacaagcagaatctctctatggagacaacttgcagtgccttttaggttttccaaataacctcggagttcagagcattgggtttttttctcccctccccacccccagaaaaataattagaaaaatgtttaggagaaaggaaaagaattagatgcatcagaataccagctataagccaacactgtttccagaaactcaagaaaaagctcaaacagaagacagttcccctgagaggctggaggcgttggtgctgaaggcaattttcctagctaaggggcactgggccttgctgcaccttggggctgaccttttttgcaaaacacccacccctgccctcctggcatactcaacagcaacgccagctttctggacccttggaaagatgttagctcaaacacccactttttccagatcttcctcttgctcttcactgaggaatttgtaattctgaggctagcgatgcccactcggatattccgcaggcccaggtgtttagattagaatttgtccagcggtaatcctgatgctggaaaccaacaaacatttggcctcatattcacccatttaaaaactagagcccctggcaggtccccttagggccatgtgttcatggaatataagccaagtttgccttaggcttgttcatggaatataagccaagtttacctctccccattttctgccctggcccacttcccactcacctccacctcattgccaggaagggatcaaaatgcctccatgccagttgttaatggctacatatttgcccttcccaagggtatttgcattttatttaggaacatggccttatattcaaggaaaatctagcatcaagattacgaggcatcacctctcaatcaggtctgggaggtatcttggggcattgctcttctgaacacctgcagaggcttcctcaggtgagtgtgggagcccggaagggtggcctccctaaccactctgcctgcacatgaattctccaaagcagtgggcccccatctgtttcaattacacatgcctgtcagcaaaaacttcgtgagatgcactctctctgtgtgtttattaatttatttaaagcatatatccctttacttttgtactactatattaggcacattataaaaagtatacagcatagaaactttaaatgaataagacacaaaatattataaacagaggttctggcattttctctctgaactcctgagggggaccttgggcacctcctggtatgtgcacaccccactttgaacacccttgctttagtgcaaatcagcacgcctaaatagcatcccaaaccactgtgcgacatttggcctgcagaataagaaagtcctaaggcagaatccccaggaacttcaaatctgggagatgaggaaagaaaactcactcacaaacaacataaatgtaaataattcaaaaccctaaaggagagctgtccctagacagtagtggctacaggtgctaagcaaaagtcaggtacactggacagagccatgcgattgattgttcatcttccctctctgggtctccagaaaaggacactggcaatatccccagctctctcctgattggaattctttgaaccctcgaagtgctccagcagtactaccccccacgtagcagtgggcccatgtcgcttgaatattatttttgatttgaccaccaagatgtaatgatgattctattccattttgaaaagggtctgagaaagtgtacaggtctaattatatatacatatttatacatgtgtatttttgtttattgttacattttgacattggactttctattaaataatttttaagagttgg

SEQ ID NO: 955 - DNA, 2956 bp, Homo sapiens
ggggctgagtgctcagtggagagcggggagttgtgtccaccttgccgacgtcgctagccgtggggctgtcctgggaaggcggacggcgagcgcccggtgtccgcactcggccgcctgccgtgcccgtctgcgcccgtgtcatcctcactcgggacgcagggaccgtttttaaatcacaggggcgtgtgtcagcctgccctaggacttcatgtctatatatttccccattcactgccccgactatctgagatcggccaagatgactgaggtgatgatgaacacccagcccatggaggagatcggcctcagcccccgcaaggatggcctttcctaccagatcttcccagacccgtcagattttgaccgctgctgcaaactgaaggaccgtctgccctccatagtggtggaacccacagaaggggaggtggagagcggggagctccggtggccccctgaggagttcctggtccaggaggatgagcaagataactgcgaagagacagcgaaagaaaataaagagcagtagagtccctgtggactcccatgggtcataccagccagcatctgttcctgaactgtgtttttcccatcatgacggaagaagagagtgagccgcaattgttctgaaaatgtcaaacgaggcttctgttttgcacctgcagatcaccgagttggttttcttttcttttcttgcctttttttttttttgaaatttgccgagcagtggagccctctgacaatttgcaaggccctctgagaaaggaagctgcttagagccagggggttagtgggtgaggggagcgagtgctgtttttgagatcattatctgaactcaggcagcctagtagaggcagtggtgggattccaatgggtcttggtgggtgggaggtggggcatgtgcaaagcaagcaaggaacatttggggtaagaaaacaaacatgaggcaaaagaaaaaatacatgtttttaagaaaacattgagcagagaactgcagccaggatgcgctcagcagacattcactctggctgctgggacatcagaaaacaaagtcttcatctctctctccagtttcacccaccccaccctttgctttcatttcaggtgtgttggtctatatgacagggaggagagtaaaggagagcaggagcaattggctgcctgcaaagccagctggaggtgaagtgcaggaaaggaaaggtcaccccattctactccatggcctctctgctcccagctgtggtaggctcacatagccagtgtgatcggtttttaagaggcagtgcttttcagcttttctccctgatatatccattttgcttcccagcactttttaggagtagtgagagcacttcctgcccttgttggaagccccagggtggacactcagcacgaaggtctctcccttaactgctgcccttccaagacttgctcccgagatggagtgggcgtggtcttccaggctggcccttccttctcctcaccgccaccttccctgccccagccccagcagccatgggtacatgggtccccagctcacctatggattcccgccagtctgcccagctgcagtactcacgccccatgggggatcttggtctgtttttcttgtgggagcctagtggagagcagacgtggctttttatgtgtcttgttggggaggtgacttgcatggtggggacaaggctgtcgtggcaaccttgggatcgagtttgagactaaaggatgtcatgagatccctggcttctccccatgttgttcccggacaagggcagaagggaggcatggcaagggacctctgctgtccttactcaacagtggtcctcatccctccccacctcccactgcttcctgcaagggcaccagttgtatgagaaagttggcctttggacttaggatttcttattgtagctaagagccatctgaagcagcaggttgcaggacaaatgcttcagtccgccgagagcagtaccgtgtggccaagaggtggactcagagccttccttgagctaaactcggccaaccaaggcacgcagcatgtcccctcaggtctccagtcagtccaggttgaccctcagttctggacgtgtgtatatagctgtatttaatacctcaaggtcattgtggctctggggatgccggggcaggaggacgagggtgcgctgtggacacagcagtccgcggaattccgttctgggaagccaatggtcgccggcaccccttgcttcctccctctgttgtctgcctgtgtgacacacatcaatggcaataacttcttccaactcctcgcagaagtgggagaggccggcagcctgcaccgagaggggctttcctctctcttgctccccgcttcgttctgttttggctgcagagagtggttcatccatactctcattccctcgcctccccttgtggacgggggtcttgccttttcaattcctgtgttttggtgtcttcccttatctgctaccctgaatcacctgtcctggtcttgctgtgtgatgggaacatgcttgtaaactgcgtaacaaatctactttgtgtatgtgtctgtttatgggggtggtttattatttttgctggtccctagaccactttgtatgaccgtttgcagtctgagcaggccaggggctgacagctaatgtcaggaccctcagcggtggagcctgctggggggacccagctgctcttggacaagtggctgagctcctatctggcctcctctttttttttttttcaagtaatttgtgtgtatttctaactgattgtattgaaaaaattcctagtatttcagtaaaaatgcctgttgtgagatgaacctcctgtaacttctatctgttcttttttgaggctcagggagaaactagcatttttttttttccaaactactttttgtcactgtgacagttgtaaataaagtttgaaaatgctttccactctgaaaaaaaaaaaaaaaaaa

SEQ ID NO: 956 - DNA, 1588 bp, Homo sapiens
ggaagtcaggtggttgtcggattttagaggaaggcgctcggttacattggagaactggagtggtctggagttccacggtgtagtggaccagaggccacctctcctgggcttctcagtgtctcgccggcggggttcggcctgagctggattgacatagcccttggcggatttaaacaacctaaacattaagcagtacagctgcctcaaacctttgggattttcagaatgactgacactgccgaagctgttccaaagtttgaagagatgtttgctagtagattcacagaaaatgacaaggagtatcaggaatacctgaaacgccctcctgagtctcctccaattgttgaggaatggaatagcagagctggtgggaaccaaagaaacagaggcaatcggttgcaagacaacagacagttcagaggcagggacaacagatgggggtggccaagtgacaatcgatccaatcagtggcatggacgatcctggggtaacaactacccgcaacacagacaagaaccttactatccccagcaatatggacattatggttacaaccagcggcctccttacggttactactgatagaaatgttggcagcttttagtaaaagcatttactctgttaccatgagaaaagtttgggtgtcttctgttggtcatagttttacatctgattttacagaatggattattgattttttggaagttgagactttaaaaaaaatagatcttacttgcgaaatgcgatggttgctgggaatacctgaaactgtggattatattgcttgacttctacctcagaatcttctttgtttcatgacttaatagtgctttaagtttggtatattatttgacctctaggaattctttgttttacacagaaataaaaattttaaaatagaaaatgcttttactttgtaaggtaagagagtatccatatgcttagatgtgctcgtttctaaaattctagaggttgatataatcagctcatgaatgcacagctatgctttttgtgatagattgtacataacatcagcagttgaaaggtaaaacaattgcttttttttttttttgcatttgttaagtgactatggtactttgtgattccttaatctatagatgagtcagctccacacttgagtctctttttagagggaaatcagtaataaagctgtaaaataaggaaggaatcattgtcagtttgtgtcttgatctggtggtggttgggataagggtacacatcattttatacaaacactaaagctttttgctaacaacatagcaggtcaaaattcacacataagaaagtttaactctgtactgttcacactttttaatcctgtaaataatgctgcattttgatggttcttacttttttggtatttaatgtgggctgattttacaatgttatattcacttccagatgcatacctctgctgctttctctcctataaatagtgatgctataaacttcctttcacagagatcattctatttcaaatcactttaatgattattacaatgatttcattcaaataaaaattttaaaatatttaagcatcttcactcccaaaaaaaaaaaaaaaaaa

SEQ ID NO: 957 - DNA, 2087 bp, Homo sapiens
ctggatttggacttcattctggacagcatatgacaaggacgaggacccctattctagccagttaaagctggacagaatttttaaaagcaatgaagccagttccttggatatatccacgggctttgctttgagaaggaactgagtaggcagtgagaagagtcgagtgaagcctggcccgtgagtgcctcaacaactgagatgaacgtcgactcgcttgcaggcaagttgtcactcagcagcgatctgaactatatcctgggttccagaaaaggcagaggttcttaccgaaagcaggggaggaagccgcagcccaaggaggtcgtcacttgccgggaaggtggctcgggccaggctgcactcaaaacccgtgctctgtccacactgctacggggccagagccaaggaagcttccacttcttcccccagacagccccaacagcggctaccccaaggagccagcagccttgtgtcctgggatccccagcccctgcagaatgacccaccaggatctgagcatcacagccaaactcatcaatggaggtgtagcagggctcgtgggggtgacctgcgtgttccccatcgacttggccaagactcgcctgcagaaccagcatgggaaagccatgtacaaaggaatgatcgactgcctgatgaagacggctcgggcggagggcttcttcggcatgtaccgaggggctgcagtgaacctcactctggtcactccagagaaggccatcaagctggcggccaacgactttttccggcggctgctcatggaagatgggatgcagcggaacctgaagatggagatgcttgccgggtgtggggctgggatgtgccaggtcgtggtgacctgtcccatggaaatgctcaagattcagctgcaggatgctggacgcctggccgtccatcatcagggctcggcctcagcaccctccacctccaggtcctacacaactggttcggcttccacccacaggcgcccctctgccaccctcattgcctgggagctgctccgcactcagggcctggctgggctctacaggggcctgggtgccactctcctcagagacattcctttctccatcatctacttcccactgtttgccaaccttaacaacctggggttcaacgagctcgccggtaaggcgtcctttgcacattccttcgtgtcaggctgtgtggcaggttccatagctgcggtcgcagtgacgcctctagatgttctgaaaactcgaatccaaaccctcaagaaaggcctgggcgaggacatgtacagtgggatcaccgactgtgccaggaaactctggattcaggagggaccatctgccttcatgaaaggcgctggctgccgggcactggtcatagcacctctctttgggattgctcaaggggtctattttattgggattggagagcgcatcttaaagtgttttgactagacagagctggaggtcaagtccctgcgcttgccgccctctctctagctgtttcacttagcctagagggggcaagggcaggtggggccactctggcctgcctggtcctctgcgttgtagtgctacctcaatctcgggagaaacagccctatattctaacaagttgagcacagccttcttccccttcgtgtctacactcgttttcctttgtgggcacagctaccaggggcttttggaagcccctaaccacctacttttcaacaaaaatggtactttcgttgtattaattgcaggaccttaacaggtagtcacaatagaagggttgtttctgtattttaacatttctatttcacagtcaaactcggcattcttcagtcagcttgaggatttagcattgttaatcttggactccataacttatgagtcctagcactgattttgaggaaaaggaggatcagaagttcaagggaccgtgaaagccctcagagtcagcacctagtttgagaccaagcaccctttcgaatccctggatggctgagggggctgaggccggctctgactgggcagcccagcccctcccccagagcccaggctcttgcacacccctccctgtaaccaaggaacactctgaaataaaggtgaatggct

SEQ ID NO: 958 - DNA, 4057 bp, Homo sapiens
ccccgcctccgcccccggctggcgtgagctgggtgtttcctgcctctctcagtccgggtttggagactcctgcgtcctccgacttttcatggaagagatgtcaggagaaagtgtggtgagctcagcggtgccagcggctgctacccgcaccacttccttcaagggcacgagccccagctccaaatacgtgaagctgaatgtgggtggagccctctactataccaccatgcagacgctgaccaagcaggacaccatgctgaaggccatgttcagcgggcgcatggaagtgctcaccgacagtgaaggctggatcctcattgaccgctgtgggaagcactttggtacgatactcaactaccttcgagacggggcggtgcctttacccgagagccgccgggagatcgaggagctgctagcagaagccaagtactacctagtccaaggcctggtggaagagtgccaggcggccctacaaaacaaagatacttatgagcctttctgcaaggtccctgtgatcacctcatccaaggaagaacaaaaacttatagcgacttcaaataagccagccgtgaagttgctctacaacagaagtaacaacaaatactcatataccagcaattctgacgacaatatgttgaaaaacattgaactgtttgataagctgtctctgcgctttaacggaagggtcctgttcataaaggatgttattggggatgaaatctgctgctggtccttttatggtcagggccggaagattgctgaagtctgttgtacctccatcgtctatgccactgagaagaaacagaccaaggtggagtttcccgaagcccggatttatgaggagaccctgaacattttgctgtatgaggcccaggatggccggggacctgacaatgcgctcctggaggccacaggcggggcggcggggcgctcccaccacctggacgaggacgaggagcgggagcggatcgagcgcgtgcggaggatccacatcaagcgccctgatgaccgggcccacctccaccagtgagcaggcaagagaccgagccgccctcctctcaccgcccccactccctgccgtgctacacccagatcctgtgcaggctgccgggccccttctgcttcccttggagcctggagatacttttgtaacaagccagatgattattttggtattgcttgacaaggcaaattgattgtcttgacccaggcgtatgacccctgtcgttgaacaagctgtgtctaagatctctacttttcatgagaatctgagactctttggagccaggctttctcggttctcagaggaaaagtatgaatgagtgtgaagtgtatgtgagaacttttgtttgcaatatttatttttgtgggtgtcgacttcctatgtgggctttttgggtgacactcccttaagggttcagtttgacaattctgagagttgtcctgcagttggaggccaccagaggtatctgagctccctgcttcctatttcataatcctccagccccagcaggtccactcctggttcctgtgtgtttggcccgggcacaatccccactgctttgctagacgtgctttctgccatgtggctttgggcctagagcttgttgataattgcagcttgtggcagtggaaatatggctgaatgagcgtctaaatcgttgagaccagtgcaactttgggtgcaaggctttgtttagggatcaagccttttgccaccttgggctggtctttggcctggtgctcactgggaccccatatgtctgcgtaggagcagaactttccatggcagtaagtgtccagctctgtttctggttctttccccaactccagccccgtccagttgttctcctgattgacccgactccactccaggaaggccatctgaccctgtgacaggcatagctcataaactacccctccctgggatcccgctcctcttcagcctccttccccatgaagctgggctaactttctaagtcattttgcttagaaattcagtgtggcccataccctttgtcctcccagcctggcatccaggcagggacaccctcacaccaccagccccagggagcttccctgctataaacacagacccccttgtctttgcctctgatttttacacagtgtagagtggccagcagtgaacaggttgaggatgtgcgggtagatagataactttgggtctggtttgtgtctgtgttcatgtttgtttaagggatatgtgtgactgtgggtggggacgtgtgcttgtggggcacaggtggcggcccctgctggagcccggctgggcgcagcgcctatgtaggacgggtgttctcagtgacctacctcccaggctcctctgcacctgcaaaggaacaggagtgagtcgtgactgacaggggtggttgagactagactaggtagagtagttaccaggagatgtgaatgtgcgtcaggtgatggatgggtttgtcaagggaatcgttaccgttttataccaaaggtattaacatgggcagcctttgacacatgtattccaaaaacgagtttatattttcaaacggtttttacagcttagactttgtacttactgccctgcctgtgacagttgtatgccttcattttgtatccaacagcaaagtctacaataaaactttaaaacaatcatgactgaatgtcaaaatcgtgtattgggcagatgctttttaaactgtcgtgtgagaaacttttatattaggccatttggattttattaagtgctaaggaaagagggcttacaaaatgtttcgtaaatattttatactgtttaagtgttaaacaccaaccctgtctttcttttgggttgagcttttttagaaagtcgaagtgaatgttggccaggaaaatggaaaagccattgtataaatttttttttgaggcggagtcttgctctattggccaggctggagtgtagtggcaccatctccacttaccacaacttgtgcctcctgggttcaagcgattctgctgcctcagcctcccgagtagctgggattgcaggtacccatcagcccatgcccagctaattttgtatttttagtagagatggggtttcaccatgttggccaggctggtcttgaactcctgaccctgtgatccgaccaccttggcctcccaaagtgctgggattacaggtgtgagtcaccacacctggctgcatagtgttttaaatgtttgtgtgaagaatgagtttgtggaacaatttgatttgctgtggcctctatgcctaatgagctagtgtttctggcagctctctctacccaactttgcacttgtagttttgagtctttgtctctctggaatatgaacaggtttataaaacattccatggtgaacaattctgtcggctgcattatagccatgagtgaatagacagcattggctggtccaagctctgttattgagtatacaaggaactgatttttcttatgttagcactaagggcaaaaaccaatatttataatgtaagcactatccaggtaaaacactggcccaagatttggtaaagagatttcattgcaatgtaataactacagttttttacaaattggaacagctttggtgtgtcgtaatcaagggttttttttgtttgtttgtttcaaataagccatctgattgtggtgactggggcccatgtccaagacaattcctggcatattctgtcaccctcccgtggggcgatcactgtgtggggaccccattccccagttaaagtgtgtctctgtaccttacaacagcgattcaggacccaagtgtgaacaacactcagcccgccctctggagcgtgtgctgtctttagggccctacccaaagtcactgtaacagttaagtgtgtcattaacctttctgtctctttgcgccataaaaaaatgctcaaagttttagatgtagccactgtatgttgtacaaacgttggcgacatgtaaaataaaagtcataaaatgctaaaaaaaaaaaaaaaaaaaaaaaaaaaaaaaaaaaaaaaaaaaaaaaaaaaaaaaaaaaaaaaaaaaaaaaaaaaaaaaaaaaaaaa

SEQ ID NO: 959 - DNA, 1755 bp, Homo sapiens
gagcgagatgcgagctgtgtgcgtcgacgtcagcgtgctgacgtcacgggccggaggtcccggggctgctgggtgcgggcggtgggctgcgcgttgtccgctggactgggtcccggtcacgccccgccaagccccgcccctcaggccggggcgcgaccgcggatccgcagttcccgggccagcctggggcggccggccaggaaccacccgttaaggtgtcttctctttagggatggtgaggttggaaaaaggctcctgtaaccctcctccaggatgaaccacctgccagaagacatggagaacgctctcaccgggagccagagctcccatgcttctctgcgcaatatccattccatcaaccccacacaactcatggccaggattgagtcctatgaaggaagggaaaagaaaggcatatctgatgtcaggaggactttctgtttgtttgtcacctttgacctcttattcgtaacattactgtggataatagagttaaatgtgaatggaggcattgagaacacattagagaaggaggtgatgcagtatgactactattcttcatattttgatatatttcttctggcagtttttcgatttaaagtgttaatacttgcatatgctgtgtgcagactgcgccattggtgggcaatagcgttgacaacggcagtgaccagtgcctttttactagcaaaagtgatcctttcgaagcttttctctcaaggggcttttggctatgtgctgcccatcatttcattcatccttgcctggattgagacgtggttcctggatttcaaagtgttacctcaagaagcagaagaagaaaacagactcctgatagttcaggatgcttcagagagggcagcacttatacctggtggtctttctgatggtcagttttattcccctcctgaatccgaagcaggatctgaagaagctgaagaaaaacaggacagtgagaaaccacttttagaactatgagtactacttttgttaaatgtgaaaaaccctcacagaaagtcatcgaggcaaaaagaggcaggcagtggagtctccctgtcgacagtaaagttgaaatggtgacgtccactgctggctttattgaacagctaataaagatttatttattgtaatacctcacagacgttgtaccatatccatgcacatttagttgcctgcctgtggctggtaaggtaatgtcatgattcatcctctcttcagtgagactgagcctgatgtgttaacaaataggtgaagaaagtcttgtgctgtattcctaatcaaaagacttaatatattgaagtaacacttttttagtaagcaagatacctttttatttcaattcacagaatggaatttttttgtttcatgtctcagatttattttgtatttcttttttaacactctacatttcccttgttttttaactcatgcacatgtgctctttgtacagttttaaaaagtgtaataaaatctgacatgtcaatgtggctagttttatttttcttgttttgcattatgtgtatggcctgaagtgttggacttgcaaaaggggaagaaaggaattgcgaatacatgtaaaatgtcaccagacatttgtattatttttatcatgaaatcatgtttttctctgattgttctgaaatgttctaaatactcttattttgaatgcacaaaatgacttaaaccattcatatcatgtttcctttgcgttcagccaatttcaattaaaatgaactaaattataaaaaaaaaaaa

SEQ ID NO: 960 - DNA, 3899 bp, Homo sapiens
gtcacttccgttgtcaggtggcggcgccgcagccatggagggaggcggcggcggcggcggcggcggctcgggtggctgcgctgggaggcggcggtgagaggctcgcacgcctccagcccggccccggccccccgggagggagagccgagcagccccggctctgggctacggactatgggcgaatagctctgaccacccggcgaagtgcacacacccagaagctatgtccttcggcagtaaaagttttacagcacaatatatgtgctctgctctcctcccgcaatcctgctccaagagatcttaagctggaggcaccaggtctgaattccagactcctccccaccacccacacttcacctccaactggagcatgaccacagacccattcagggaggctggcggactcttcatcctggacagtcccttactgtatgtcaagtagagctgagaatgaagcggagagcatcagacagaggagctggggaaacgtcggccagggccaaggctctaggaagtgggatttctggaaataatgcaaagagagctggaccattcatccttggtccccgtctgggcaactcaccggtgccaagcatagtgcagtgtttggcgaggaaagatggcacggatgacttctatcagctgaagatcctgaccctggaggagaggggggaccaaggcatagagagccaggaagagcggcagggcaagatgctgctgcacaccgagtactcactgctgtctctcctgcacacgcaggatggcgtggtgcaccaccacggcctcttccaggaccgcacctgtgaaatcgttgaggacacagaatccagccggatggttaagaagatgaagaagcgcatctgcctcgtcctggactgcctctgtgctcatgacttcagcgataagaccgctgacctcatcaacctgcagcactacgtcatcaaggagaagaggctcagcgagagggagactgtggtaatcttctacgacgtggtccgcgtggtggaggccctgcaccagaaaaatatcgtgcacagagacctgaagctggggaacatggtgctcaacaagaggacacatcggataaccatcaccaacttctgcctcgggaagcatctggtgagcgagggggacctgctgaaggaccagagagggagccctgcctacatcagtcccgacgtgctcagcggccggccgtaccgtggcaagcccagtgacatgtgggccctgggcgtggtgctcttcaccatgctgtatggccagttccccttctacgacagcatcccgcaggagctcttccgcaagatcaaggctgccgagtataccattcctgaggatggacgggtttctgagaacaccgtgtgtctcatccggaagctgctggtccttgacccccagcagcgcctggccgccgccgacgtcctggaggccctcagtgccatcattgcatcatggcagtccctgtcatctctgagtgggcctttgcaagtggttcctgacattgatgaccaaatgagcaatgcggatagctcccaggaggcgaaggtgacggaggagtgctcccagtacgagtttgagaactacatgcgtcagcagctgctgctggccgaggagaagagctccatccatgacgcccggagctgggtacccaagcggcagttcggcagcgcaccaccggtgcgacggctgggccacgacgcacagcccatgacctccttggacacggccatcctggcgcagcgctacctgcggaaataacagcctcagccggggccaccagcactgctgccacttcttccagccccagccaaaggcgtggctgtcagggctgggccctgtagtgctggactctcccgggccacaatagggacagggcagggacagggacagcccaggtcacacgtggggtcagcagaggtaccacgaagctaccttttgggatgattgctcgattgtttggtttttaaatctgagaagcctagataactaatctgcttttaatcacgatgttttaatctacctctgtctctttaaccatgctgtctctggactgagcaagagggaggagggagcctgctcaccccactccagggccttccccagcggccaccaactgacctggggcgctgctccccacagtccaaataagctgaaagtgcagctcgctgcaggccccagagcgagcttcccctcctccctgctctcccaggcccctgccacagcctctttccgtccctctctttctgatccaggcccctcagtccaagctttggaaaaccttcacctcatcttaaaccgaactcaaatatatttatttttttaccataccaacttctctcccatctctaggtggctcagtccatggccactccctgcccccagcctggctggacagcaaggaatccacagcccacacgtgagctccctcctcacccccaggcagggaagcccctcctgccagtccctgtcccctttcagcccaccagtccctctctgctgccggtgatgggaggcctttctagacctggctctttctctcccgtctcagtggcttctctgaggtgctgtacacgcgcgttaacctgttcccttctctatccttccccgtggtactgagctcacgtggactcccagtgcgaaggggcccatgggttgggctgcaggcctggccgtgagcgggggctgcctgcacgctcccctagcctactcttgtgtttaggggatggtgggaacatatcccagtgcccttgcctcataatagatgtggtgactctcccggtagaccctagcaagggtcctccatggtggtgagggactcaggagaattgtagggattgggggaccctgcctgcctggcttgagaacagccctgctgcccttttgagccgagattttgaagtggatgcccgtcttgccagaaatgctgttctcaccagaatgccccctccccttgcccttactggacttggccctgcctgatgccaagcaaagacccttccccagaggcctaccccccatatgtcctcagagaggctgagtgtcccctccaggcagtcatgggccctgaggcccctcctgcctggccctgctccccagtggggaggtgactgtgtttcccagagtgtgagccgctctcctccccctaaaaagctgactcactgtgagtgaccttgggcaagttcccaaacctccttgtgcctcagtttccccatctggaaaaaatggggccacctcttgccagcagtagcagggctgcccacgcccctttctccccatgccccatccagcacttgggcgactcatgcctctgcctcagtgggcctgtgggagcctactggagcccagcacttactccccctgagcagcgagcctgcgtctgtctcagctgtccagcgctgagggccagggtcttgtgctgtggggctgggggatgccctcttttctatatttatttcatagaaagtctcctgcgggagcggaaatgcagtccggcctagggctcccagcccttgactgtcctcctgtgagggcctgaagctgggccagggcccgtcgcagcggagccccctctcagcagcccaccgggtccctccaggctgctgcccgtgcgtggtctttctcctccttttcaaagcaatagccgccgggtctgcaaagccctgtcagacagactgggcccttccaaggtcaagccatgtgtctgatgacattcctggtgaagcaaaggagaggaggatgggtcagccctcactgggtgtcacacactgagagaagtcctattgtaaagaaacggaaaaagtcacaaaaaagtttgtataaagacatatttttgtactacatggggactcttcctgcatgtcagcaataaaacttcctgatctggaaccactgtggaaaaa

SEQ ID NO: 961 - DNA, 5095 bp, Homo sapiens
gtacgtcatcttcgcgcgacgttcggttcgctgtgtgtgtcgccggctccttgagggtccatgtgatttttacgccagtgctgctgaactgtgcagggtagggagctggcacagtccgattaattgtccttgggtcgaggtgtctcgtcggaccctttggggctcagtggagaattaaggcagagtcactgtaattatttctaataccaattccaaaatagtgactcttggacaatagtgcaattatatggaattatggctggttataagcctgtagctattcagacatatcctatacttggtgaaaaaatcacccaagatacactgtactggaacaactataagacccctgttcagattaaggaatttggtgcagtttcaaaagtagacttttctcctcagcctccatataattatgctgtcacagcttcctcaagaattcacatttatggccgatactcccaagaacctataaaaaccttttctcgatttaaagacacagcatactgtgctacttttcgacaagatggtagattgcttgtggctggcagtgaagatggtggagttcaactttttgatataagtgggagggctcccctcaggcagtttgaaggccatacaaaagcagttcatacagtagattttacagctgacaaatatcacgtggtctctggggctgatgattatacagttaaattatgggatattccaaactccaaagaaattttgacatttaaagaacactctgattatgtgaggtgtggatgtgctagcaaacttaatccggatctctttataacaggatcatatgatcatactgtgaagatgtttgatgcacgaacgagtgagagtgttctctccgttgagcatgggcagccagtggagagtgtcctacttttcccctctggaggtcttctggtgtcagcaggaggtcgttatgttaaagtctgggacatgttaaaaggaggacaattgctagtatctttgaaaaatcatcacaaaaccgtgacatgtttatgtctaagcagctctggacagaggttactctctggctcactggataggaaggtgaaagtatacagcacaacttcctacaaagtagtccacagttttgattatgcagcttcaattttgagtcttgcccttgcacatgaagatgagacaatagttgtaggaatgaccaatggaatactgagtgttaaacatcggaaatctgaagcaaagaaggaatcacttcccagaagaagaaggcctgcatatcgaacctttattaaaggaaaaaattacatgaagcaacgggatgacattttgattaacaggccagcaaagaagcacctagaattgtatgacagggatctgaaacattttcggatctctaaggcactcgatagagttcttgatcccacttgtacaataaagacacccgagattacggtgtccatcataaaggagttaaatcgaagaggagtccttgcaaatgcgcttgcaggtcgggatgagaaggaaatcagtcatgttcttaattttttgataaggaatctttctcagccaagatttgcccctgttttaatcaatgctgctgaaataattattgatatatatctgcctgtaattggtcagtcccctgtagttgataaaaagtttttactacttcaaggacttgtagaaaaagagattgattaccaaagagaattgttagaaaccttggggatgatggatatgctttttgccaccatgagaaggaaggaaggcacttctgtgttggaacacacatctgatggatttccagagaataagaagatagaatcatagtgtctgctaaataagacatataagaactctgaagttggaatagatttgactgtattaaatgttggcgagagactctctttgatacattaaaaaaactgtttgcagaagcagttctgtggaagagactggaataattatggccggaaaacaagtacccgttttaagtaagacatggttttccatgtaatattttgaattatagcatcttcacctagaagatctcaattgtcttagtcacagagtaggtttatctgggatggatattaattttaatacaggagtgttctgtatcaacatttgggttggtattcagatgggaattcaaatatgaatcctctctggagagggtccaactgggaatcctgctaaaggagcaaagccttgtattacctctggaagacaacaaaaacaattggcaacaacaaaaagcctctttcttgactttaatcagtgcctttgggatttctaggcccttgcttagcttgcttcctgtctccttgatatctacacttgtcttagatcacatgccctgcttcagctggtaatgggactgcatcggttccaagtgtggcaagtaagttttcggctctgaagaactgacactagctagatttgtattcagagtgtgagagcaagctctacagatagaccttattggactacttttttttttttcttcatgcagcctttctaccaagttttcaccttgtttcaggtcagaggaatgatagaatttgtcatttttcttacaacagcctttcagactattcttcatatgtttcaagctaatcttgtagctaagctacctaatcctctgaaaactgttttctctgatttgtatttagattcctccccccattattcacaatcatattgtatttcggaaccccaatgcagagcagtttgctttgaaaaatagttgtttttaaaagtttaatgtaaataattattttttagaagttttttttttttttttaaagacagggtctcgctttatcgcccaggctggagtacagtgatgcaatctcagtccactgcaacctctgccctcccgggtttaagcagttctcctgcctcagcctcctgagtagctgggattacaggtgtgccccaccacgcctggctaatttttgtagttttagtagagacggggtttcaccttaccgggctggtctaaaactcctgacctcaagtgatctacctgcctctgcctcccgaagtgcttggattacaggtgtgagccactgtgtccagcctgtaactattatttttttataaagagagattcttattttcttggctttttgatgtatctgttcctgatagataatcattggctagtaactcctagtacactggtttcacagttgctacctctcctgcttttctctaattattacgccaactcaagtagttaaaaatcagtaagaaaaatgtcttgagctagaagaacccatagaggaagattttgtaatgcgaatctcctctcataattttagttctgtaaattcagggtttttttttgtttttttgttttttttaagccgaaaaaatgcttaatatgttccagtaagggtattaagtaaaaattaaataaacgtattaagtttaacatattaaattaatttaacatttagactaacattaacatttaaattaatatgttaagtgaatatacttaatatattctagtacaggtatgcttggaaatagggcgtttccttttcatgaattgatttcgtacagcacagtggcttataaggaaccagcagtgtttttccctgagtaattatgaacttagtcaagatcagaagctgggttttggggttgagaagagttcatttatttaaataaagtttctatttaaaaacctttttaaaaagttaacatcataaatattctgataatttgcatagtagtaaaaattagaagttgaaattctacctaaagctgtagttgccgtcaattgtgtaacatgtgacaaaggttttcccatatgtcatttcatttgattctcaccacaaccatccaaggttgatgttattctcatttaacattgagttaacgaaagtagttgattcactctcgaagtccctgagtgtgagctcttcatcctagcactgtgaagtggtttgcctgctggggcctaaactcctcattccctttaacaaagcttcactgagtgctgcagttctcaaaatatgtaacagttaacacatttttcaaacaggttaggaagcaattcccatagccatcaatacttaaattcaggagtacttttttgtttgtttgttttgttttgtttttagagacaaggtctctttctgttgtccaggctggagtgtagtggtgtgatcatagctcactgcagcttctgtctcctaggctgaagctatcctcccacctcagcctcctgagaagctggggctacagggatgagccaccatgcccagctaattttttattttgattttttgagataagaggtctcaccatgttgcccaggcctgaggcaatctcctggtttcaagcaatcttcccacctcagcctccttaatgactgggattaaaggcatgagccactgcgcccagcaggaatggttattatattcattgagataaactgtagtatttgctgtttgaagtatttaaacataattggcatattacaatatgtgacactggccttaagattctaatttaaaatgcttaacagacttttagacttatgagtttcagttgaaaggtattttaaaatgttactaagtctgcaaaagtactgaaatgtttcagagaacttggaaagtcaccgtatgtttaatttattatgtttatgagatttaagcacttgggaaggtttatgctaatggggtcaagcatttgcaatgctgcttaaaagaatcatttttttaaatgtataaatgctattaagttgtttaaaggaatttgaattgtaaatgggattgttaaaacaaatttagtctgttcaactcaatgagggcatttcattttctaggaacaaaataccctcttagacattaaaaagccgcatgcctgttccctcagctatagttaactggaccatggtggtacaactgactcaacccttctctaagcagggatttgtaattgggatttataatgaaattcctgatctgggaaaatgggaggctgggaatgctatgtctaggtcatcagcggagaaagttggtttgtagagaatgaacaagaatgaaacctaagtgcaaagaaaataaagattatcctgctttaatagttcaga

SEQ ID NO: 962 - DNA, 3657 bp, Homo sapiens
ggctggggggccgcgggcgggaggcggataaaaaggccccagggcgcccggggagggagcccgttagcgctgctccgccgcggcgcccgcccagccccggactgtccgcgctccatctggtatcttggcctcagctgtccttgaagtcaccatggcgtggtccccaccagccaccctctttctgttcctgctgctgctaggccagccccctcccagcaggccacagtcactgggcaccactaagctccggctggtgggcccagagagcaagccagaggagggccgcctggaggtgctgcaccagggccagtggggcaccgtgtgtgatgacaactttgctatccaggaggccacagtggcttgccgccagctgggcttcgaagctgccttgacctgggcccacagtgccaagtacggccaaggggagggacccatctggctggacaatgtgcgctgtgtgggcacagagagctccttggaccagtgcgggtctaatggctggggagtcagtgactgcagtcactcagaagacgtaggggtgatatgccacccccggcgccatcgtggctacctttctgaaactgtctccaatgcccttgggccccagggccggcggctggaggaggtgcggctcaagcccatccttgccagtgccaagcagcatagcccagtgaccgagggagccgtggaggtgaagtatgagggccactggcggcaggtgtgtgaccagggctggaccatgaacaacagcagggtggtgtgcgggatgctgggcttccccagcgaggtgcctgtcgacagccactactacaggaaagtctgggatctgaagatgagggaccctaagtctaggctgaagagcctgacgaataagaactccttctggatccaccaggtcacctgcctggggacagagccccacatggccaactgccaggtgcaggtggctccagcccggggcaagctgcggccagcctgcccaggtggcatgcacgctgtggtcagctgtgtggcagggcctcacttccgcccaccgaagacaaagccacaacgcaaagggtcctgggcagaggagccgagggtgcgcctgcgctccggggcccaggtgggcgagggccgggtggaagtgctcatgaaccgccagtggggcacggtctgtgaccacaggtggaacctcatctctgccagtgtcgtgtgtcgtcagctgggctttggctctgctcgggaggccctctttggggcccggctgggccaagggctagggcccatccacctgagtgaggtgcgctgcaggggatatgagcggaccctcagcgactgccctgccctggaagggtcccagaatggttgccaacatgagaatgatgctgctgtcaggtgcaatgtccctaacatgggctttcagaatcaggtgcgcttggctggtgggcgtatccctgaggaggggctattggaggtgcaggtggaggtgaacggggtcccacgctgggggagcgtgtgcagtgaaaactgggggctcaccgaagccatggtggcctgccgacagctcggcctgggttttgccatccatgcctacaaggaaacctggttctggtcggggacgccaagggcccaggaggtggtgatgagtggggtgcgctgctcaggcacagagctggccctgcagcagtgccagaggcacgggccggtgcactgctcccacggtggcgggcgcttcctggctggagtctcctgcatggacagtgcaccagacctggtgatgaacgcccagctagtgcaggagacggcctacttggaggaccgcccgctcagccagctgtattgtgcccacgaggagaactgcctctccaagtctgcggatcacatggactggccctacggataccgccgcctattgcgcttctccacacagatctacaatctgggccggactgactttcgtccaaagactggacgcgatagctgggtttggcaccagtgccacaggcattaccacagcattgaggtcttcacccactacgacctcctcactctcaatggctccaaggtggctgaggggcacaaggccagcttctgtctggaggacacaaactgccccacaggactgcagcggcgctacgcatgtgccaactttggagaacagggagtgactgtaggctgctgggacacctaccggcatgacattgattgccagtgggtggatatcacagatgtgggccccgggaattatatcttccaggtgattgtgaacccccactatgaagtggcagagtcagatttctccaacaatatgctgcagtgccgctgcaagtatgatgggcaccgggtctggctgcacaactgccacacagggaattcatacccagccaatgcagaactctccctggagcaggaacagcgtctcaggaacaacctcatctgaagctgtcactgcacactcctagctgctgccgatacaccagatacctcagcttattggagccatgcccttcacagagtcccaactcagaggaaaagggccagtgccaaggggcaccaagaacctgctcaggaagccttttgatggcaagatcaccaatccagatggtattgctccctcaggatggctctgggcctgcccctaagggcctgtggcctatggaatatgtcctccaggctttgctcagctgagctcctcttctgtaaggaaacccagtcatccctgaatcttgccacagagatccgggattcaggagctctcagtttcttagggatggactatggcccagtcccccatctaagtggtgctttgcaaatgtcttggaggagtataggacagaggaccaaaatacacagcaggtagtgttagctctctgctaggagctcaaagcaacacaacttgtatcaaaatcacaactggcagagaagctggtggatccaatcctttcttcatctgttgttatttagaactcacctctcacactctgttctttagtgtccttacctttatcttaccacacacatgggtgtttctattatccttggaagcacagacctcgggcatccccttattgcctgatgggccaacaccaacagttacggagtgcttgagaaggggcaagtttcacagaaatggccagatagggccttcctacagagcagcaagagtaggccaagcagaaagactgctgaggtaacacggaccccagcccctgtcagggcctctgccaaggaaataatatggaccatttacctggcaggcagtctgctctctctcaggatcaccacgcatctcaggattggtctaaacttcaagtctcaaccaagtgtctgaagtgaactttgcattgaataaatttttgccatggaaagaacatcaaacaagccactcatctctacagagataagaaaacaagtttggcagagcaagagacagaagaccgtggagaaatcagaagggggaacagtcagtttagttaaggatggaacctgggaaaggccaccattcctgcttgatggggctctgatttgctcttgctcaagtggaataaaaccccatggtcttcttgacatgattcttgatcttttctccactgagacacacttaagtgatgatccttacaggactgacaccctaatgccaataaaagttgctcattatggactgctacaaagacc

SEQ ID NO: 963 - DNA, 2680 bp, Homo sapiens
agacggactcgcaggcgtgtggcggcggccgtgcttgctagtgagggcgggagggagtgactcactgagcgtgtgtgagggagggagcgagcgagcgaacgagcagccggcgccgtcctcccgcagcaccagccaggccacgccgccgcctcttcccctgcgccccgcgcccaggccgggccgagccgagccgagccgggtcgggcccgggccatgctgctcaccgtgtactgtgtgcggagggacctctccgaggtgaccttttccctccaggtcgacgccgacttcgagctgcacaacttccgcgcgctgtgcgagctcgagtctggcatccccgcagccgagagccagatcgtctatgcggaaagacctctcacagacaaccacagatcattggcttcttatggcttgaaagatggggacgttgtgattttacgacagaaggagaatgcagaccctcgacctccagtgcagttcccaaacttaccccgaatagatttcagtagtatagctgtgcctggcacatcaagtccccggcagcgccagccaccaggaacacagcagtcccactcatctcctggagaaataacttcatctcctcagggcttggacaatccagccttgctccgagatatgttgctggccaacccgcatgagctgtccttgctgaaggaacgcaatccacccctggcagaagctctgctcagtggagaccttgagaaattttctagagtcctggtggagcagcagcaggaccgagcccggagagagcaagaaaggattcgtctgttttctgctgatccctttgaccttgaagctcaggcaaagatagaagaagatataaggcaacagaacattgaggaaaacatgacaatagctatggaagaggctccggaaagttttggccaagtagtgatgctttatattaactgcaaagtgaatggacatcctgtgaaagcctttgttgactcaggtgcccagatgactatcatgagccaagcttgtgcagaaaggtgtaacataatgagactggtggaccgtcggtgggcagggattgccaaaggagtgggcacccagaagattattggaagggtacatctagctcaggttcagattgaaggagattttttgccatgttccttctctatacttgaggaacagcccatggacatgcttctgggactggacatgcttaaacggcaccagtgttccatcgacctgaagaaaaatgtactcgtgatcggcaccacaggctcccagaccacctttcttcctgagggagagctaccagagtgtgcccggttggcatatggggctggaagagaggatgtacggccagaggagattgcagaccaagaattagcagaagcccttcaaaaatcagcagaggatgcagagcgtcagaagccatgatgcatgtagtgtgtgtgtactgcagctggagtgggccccagaccagagaaaagtggtaaagaatctacctcactgggaatgtcatcattaccaacttcagatgggtttaaccatcccgcccgttcttcaggacagagtcctgatgttggtaatcctatgagtcttgctcgctctgtctctgcttcagtctgccctatcaagcccagtgactcagatcgcattgaacctaaagctgtgaaggctttgaaggcttcagctgaattccagctaaactctgaaaagaaagaacatctttctttacaagatctttctgatcatgcttcctcagcagaccatgctccaacagaccagagtccagctatgcctatgcagaattcatccgaagaaataactgttgcaggtaatctggagaaatctgctgaaagaagcacccagggcctcaaatttcatctccatacaagacaggaagctagtttatctgtcacatctactaggatgcatgaaccacagatgtttctaggtgaaaaggattggcatccagaaaatcagaacctgagtcaagtgagtgaccctcagcagcacgaagaaccagggaatgaacagtatgaggttgcacaacaaaaagcttcacatgaccaagaatatctttgtaacataggggaccttgagcttcctgaagaaaggcaacagaatcaacacaaaattgttgatttggaagctacgatgaaaggaaatgggctcccacagaatgtggatcctccaagtgcgaagaaaagtattccatcttcagaatgcagtggctgctcaaattcagaaacatttatggaaatcgatacagctcaacagtccctagttactttgcttaattcaacaggcaggcagaatgccaatgtcaagaacattggtgcattggatctcactttagataatcccttgatggaagtagaaacatcaaaatgtaacccttcatctgaaattttgaatgattccatttccactcaggatttacagcccccagaaactaatgttgaaatacctggaacaaataaagaatatggccattactcctctccaagtctctgtggcagttgtcagccttctgtggagtcagcagaagaatcttgcccgtctataacggcagccttgaaagaacttcatgaacttttggttgttagcagtaaaccagcttcagaaaatacatctgaagaagtaatctgtcaatcagaaaccatagctgagggccaaaccagtattaaagacctttctg

SEQ ID NO: 964 - DNA, 5914 bp, Homo sapiens
gcccgctgcccgccgcccggctcccggctgctcgcggccccctgctcctgcctggcgctctggccaggctcgggctccggaggacaggaccgcgcgactggccggccgatccctgggccggccgcgggagcagggcccgggatggtgctctccctgacggggctcattgccttctccttcctgcaagccacccttgccctgaaccccgaggaccccaacgtgtgcagccactgggagagctatgctgtgactgtccaggaatcgtatgcacaccccttcgatcagatctattacacacgatgcacagacatcctcaactggttcaagtgcaccaggcaccggatcagttataagacggcgtatcggagaggcctccggaccatgtaccggcggaggtcccagtgctgccctggctactatgagagcggagacttctgcatacccctgtgtacggaggagtgtgtgcacggccgctgcgtttccccggacacctgccactgcgagcctggctggggagggcccgactgctccagcggctgcgacagcgaccactgggggccccactgcagcaaccggtgccagtgccagaacggcgccctgtgtaaccccatcacaggcgcctgcgtgtgcgccgccggcttccgtggatggcgctgcgaggagctctgcgcacctggcacccacggcaagggatgccagctgccgtgccagtgccgacacggtgccagctgcgacccccgcgccggcgagtgcctctgcgcacctggctacaccggcgtctactgcgaggagctgtgccctcctgggagccatggagctcactgtgagctgcgctgcccctgtcagaatgggggcacctgccaccacatcactggcgagtgtgcctgccccccaggctggacgggagcagtgtgtgcccagccctgcccaccagggacatttggccagaactgcagccaggattgtccttgccaccatggagggcagtgtgaccacgtgactggacagtgccactgtacagctggatacatgggggacaggtgccaagaggagtgccccttcgggtccttcggcttccagtgctcacagcactgtgactgccacaatggggggcagtgttcacccaccacgggtgcctgcgagtgtgagcctggctacaagggcccacgctgccaggagcgactgtgcccggagggcctgcatggcccaggctgcaccctgccctgcccctgtgacgctgacaacaccatcagctgccacccagtaactggagcttgtacctgccagccaggctggtctggtcaccactgcaatgaatcctgccctgttggctactatggcgatggctgccagctgccttgcacctgtcagaatggcgccgactgccacagcatcactgggggctgcacttgtgctccgggcttcatgggagaggtctgtgccgtttcctgtgcagcagggacctatggccccaactgctcgtccatctgtagctgtaacaatggtggcacctgctccccagtagatggctcctgtacctgcaaggaagggtggcagggcctggactgcaccctgccatgtcccagtgggacgtggggcctgaactgcaacgagagctgcacctgtgccaatggggcagcctgcagccccatagacggctcctgctcctgcactcctggctggctgggagacacctgtgagctgccttgcccggatggcacatttgggctgaactgcagtgaacactgtgactgcagccatgctgatggatgtgaccccgtcacaggccactgctgctgcctggccggatggacaggcatccgctgtgacagcacgtgtccacctggccgctggggccccaactgctctgtctcctgcagctgtgagaatggaggctcctgctccccagaggatgggagctgcgagtgtgcccctggcttccgaggacccttatgccagagaatctgcccccctgggttctatggccacggctgcgcccagccatgccccctctgcgtgcacagcagcaggccctgccaccacatcagcggcatctgtgagtgcctcccaggattctctggagctctctgcaaccaagtgtgtgctggaggatactttgggcaggactgtgcccagctctgctcctgtgccaacaacgggacctgcagccctatcgatggctcctgccagtgctttcctggatggattggcaaggactgctcacaggcttgcccacccgggttctggggccccgcctgcttccacgcatgcagctgccacaacggggcgagctgcagcgccgaggacggggcctgccactgcacccctggctggactggactcttctgcacacagcgctgcccagcagcattttttgggaaggactgtgggcgcgtatgccagtgtcagaatggcgccagctgtgaccacatcagtggcaagtgcacctgccgcacaggcttcaccgggcaacactgtgagcagagatgtgccccaggaacctttggctatgggtgtcagcagctatgtgagtgcatgaacaactccacctgtgaccatgtcaccggcacctgttactgcagccctggcttcaaaggaatcaggtgtgaccaagctgccctcatgatggaggagctgaatccctacaccaagatcagcccagcactgggtgcagagcggcactcggtgggtgctgtcacaggcatcatgctcctgttattcctcattgtggtgctgctgggcctatttgcctggcatcggcggcggcagaaagagaagggccgagacctggctccccgtgtctcctacacacctgccatgaggatgaccagcaccgactactccctctcaggtgcttgtggaatggatagacgtcagaacacatacattatggacaaaggcttcaaagattacatgaaagaatccgtgtgcagttctagtacttgttccttgaatagcagtgaaaacccttacgccacaattaaggacccacccatcctcacctgcaagcttccagaaagcagctatgtagaaatgaagtcgcctgtgcacatggggtctccgtacacagatgtgccatccttgtcgacatctaataaaaatatatatgaagttgagcccacagtcagtgtggtccaagaaggttgcggtcataactccagctatatccagaatgcatacgacctacctaggaacagccatattcctggtcattatgacctcctcccagtaagacagagccctgccaatgggccgtcccaggacaagcaatcttaagagggataagcttctctcttgcagtgtgctctactgaatattctgactctgaaagaagacagtcccttgacttgaagtaatggtacagactggctccagctgcatgttagttattacgttcacctggaactaaagaagagcgtccaggtgggactgggataattgttcaaggaattgtgttctcaaaggcaaatcctatcacccactcagccccaaatgccctggattatatgatttttaaaacattttaagatacagctactcatcaacatcagctaaatatagctgatatatatatatatatttatctgaaacgtgatattttaaaaacatgtaggtttaacaaaccttcctaggacaaaaaggagactggggagggaagaggattactttaaagcacctgaaacgtatatgtacttttggttgctgttaccatcaacatctgttttattaccgaagacaattagtacacagacatgaactgttcttaaacagaacagtcttaaaatgtctgtacatatctgtctggtccatcaaattacaacagccaagattacagaatctatatagtctaatgctgacaacttctattttaaaaaacaagactttactttcttctgccccctaagtgataggtttaaacacacagagacacacacacacgtttccaaagtgcagcagtgtctctttcagtctacaataagattcctagggcagctttatcaaattttgccaattcaaagttcaaggacattacaagttagtcctggctttgtcatatctacttagtccatccgacacctgaatcattccatgtaaaacagagctctaagatgatcctttaagcaagcagtcatagactggtcgggattaagtaaaagacggctagttggcctcctcattttatttggtcagcatcccttgactcaagagtacttgctttcaagttcttcataaatcttgagattgacgtagtatgaaacctaaaagtatacaggaaattggacaaatgtggatacagcaagtttacactgcttaaagtacattatgctttttaatggaactaaatgatcaaaaaaagaatggactgtaaccagttgctgtaacgtgatgtaaaaacgttactgtaaacagcatgaggatatgaagtccttccaccttctatcttaaaactactacttactgagctagcccaatatgcattacaatgagctaatgctccagatcccagtattcagatgtgtctataccttccactatgaacacagataaactgaggctcagataagtccaaatgaaatgaaatcaactcccaagccctaaagagaaccttctcacaagaattaaaaacaaaaagggcaaacctaggaagctaacggctactcctgtaccactctattcactggtacagtccagccagtaaaaaacacttccaaaaagatacacagaagaggaactaaatgactgcgaagctggaatactgctacaggaagtatgagagttctgaaacccttgatagaaactggaagcctgccatggaacacaatactttgggcaataatcagaaaaagcaaaaaaataaataaatgagtacatctccccttcccacatcactcaaggcataagcagattttactgttagaggaaaatatgtaatacttacatgaatgttgcatgtgtgcatgggagcaactgagtagcaatagtaaatttactttccaaaaaagccttattaaaatataaatattagaaaattactttggagacccaagtaaatatttctcatacatatgtagaaagaaatataggtaagcagcttacctcagtatttcagggcagcaagtgtttgtgaagcaaggatgagcagcatgaagatgtcagatcagcaaggagaaacttcaactcaatcccaggttttctcttcttcccttatcctgcatgtacaataactgctgcctggcaaactgcaaacaagcagcatcactcaagtttgaagtttcgccgcttttgtcaactatcctctgggcaaaggtattcagcaagaggtggaatggctagacactgaatcaagagatttcagtgttactctggtcaagttagtcgccctctctgggctcccttttttcctatgcataaaaaggggagaagcagagagtgggaagacagctctactaacccttcagctctagcagtccatgactttttaaggaaatgtaatacaagtcaaaccaggcaatacagaggagaagggaaaggcagagggtgtgattatggtgacaatagctgccttcccctatcgaacagttatcagtaaaagacatttcaatcttacaaagcaactgttagaaacttctgtctaacaccatcacaaataggttcatggtcagcctaaacatgtatactgtgcattttatgggtgactttgaaagatctgttcaattatttttcagaaactaaattttcaaaaaattaatatgtgtacaattaaaatgaatgaaagaaaaaccattattgtacagaggtattaatgagactatgaaacggcaatacttttttaaatcacagatttgtaatatatgttcactgtgcagagggattgtaccttgtacaaaataaaacaaatttctcaaactaattt

SEQ ID NO: 965 - DNA, 7455 bp, Homo sapiens
cccgcctagcatggtgcggcggccgcgcgcgcggacatgggggagaagctggagctgagactgaagtcgcccgtgggggctgagcccgccgtctacccgtggccgctgccggtctacgataaacatcacgatgctgctcatgaaatcatcgagaccatccgatgggtctgtgaagaaatcccggatctcaagctcgctatggagaattacgttttaattgactatgacaccaaaagcttcgagagcatgcagaggctctgcgacaagtacaaccgtgccatcgacagcatccaccagctgtggaagggcaccacgcagcccatgaagctgaacacgcggccgtccactggactcctgcgccatatcctgcagcaggtctacaaccactcggtgaccgaccccgagaagctcaacaactacgagcccttctcccccgaggtgtacggggagacctccttcgacctggtggcccagatgattgatgagatcaagatgaccgacgacgacctgtttgtggacttggggagcggtgtgggccaggtcgtgctccaggttgctgctgccaccaactgcaaacatcactatggcgtcgagaaagcagacatcccggccaagtatgcggagaccatggaccgcgagttcaggaagtggatgaaatggtatggaaaaaagcatgcagaatacacattggagagaggcgatttcctctcagaagagtggagggagcgaatcgccaacacgagtgttatatttgtgaataattttgcctttggtcctgaggtggatcaccagctgaaggagcggtttgcaaacatgaaggaaggtggcagaatcgtgtcctcgaaaccctttgcacctctgaacttcagaataaacagtagaaacttgagtgacatcggcaccatcatgcgcgtggtggagctctcgcccctgaagggctcggtgtcgtggacggggaagccagtctcctactacctgcacactatcgaccgcaccatacttgaaaactatttttctagtctgaaaaacccaaaactcagggaggaacaggaggcagcccggcgccgccagcagcgcgagagcaagagcaacgcggccacgcccactaagggcccagagggcaaggtggccggccccgccgacgcccccatggactctggtgctgaggaagagaaggcgggagcagccaccgtgaagaagccgtctccctccaaagcccgcaagaagaagctaaacaagaaggggaggaagatggctggccgcaagcgcgggcgccccaagaagatgaacactgcgaaccccgagcggaagcccaagaagaaccaaactgcactggatgccctgcacgctcagaccgtgtctcagacggcggcctcctcaccccaggatgcctacagatcccctcacagcccgttctaccagctacctccgagcgtgcagcggcactcccccaacccgctgctggtggcgcccaccccgcccgcgctgcagaagcttctagagtccttcaagatccagtacctgcagttcctggcatacacaaagaccccccagtacaaggccagcctgcaggagctgctgggccaggagaaggagaagaacgcccagctcctgggtgcggctcagcagctcctcagccactgccaggcccagaaggaggagatcaggaggctgtttcagcaaaaattggatgagctgggtgtgaaggcgctgacctacaacgacctgattcaagcgcagaaggagatctccgcccataaccagcagctgcgggagcagtcggagcagctggagcaggacaaccgcgcgctccgcggccagagcttgcagctgctcaaggctcgctgcgaggagctgcagctggactgggccacgctgtcgctggagaagctgttgaaggagaagcaggccctgaagagccagatctcggagaagcagaggcactgcctggagctgcagatcagcattgtggagctagagaagagccagcggcagcaggagctcctgcagctcaagtcctgtgtgccgcctgacgacgccctgtccctgcacctgcgtgggaagggcgccctgggccgcgagctggagcctgacgccagccggctgcacctggagctggactgcaccaagttctcgctgcctcacttgagcagcatgagcccggagctctccatgaacggccaggctgctggctatgagctctgcggtgtgctgagccggccttcgtcgaagcagaacacgccccagtacctggcctcacccctggaccaggaggtggtgccctgtacccctagccacgtcggccggccgcgcctggagaagctgtctggcctagccgcacccgactacactaggctgtccccggccaagattgtgctgaggcggcacctgagccaggaccacacggtgcccggcaggccggctgccagtgagctgcattcgagagctgagcacaccaaggagaacggccttccctaccagagccccagcgtgcctggcagcatgaagctgagccctcaggacccgcggcccctgtcccctggggccttgcagcttgctggagagaagagcagtgagaagggcctgagagagcgcgcctacggcagcagcggggagctcatcaccagcctgcccatcagcatcccgctcagcaccgtgcagcccaacaagctcccggtcagcattcccctggccagcgtggtgctgcccagccgcgccgagagggcgaggagcacccccagtcccgtgctgcagccccgtgacccctcgtccacacttgaaaagcagattggtgctaatgcccacggtgctgggagcagaagccttgccctggcccccgcaggcttctcctacgctggctcggtggccatcagcggggccttggcgggcagcccggcctctctcacacctggagccgagccggccaccttggatgagtcctccagctctgggagcctttttgccaccgtggggtcccgcagctccacgccacagcaccccctgctgctggcacagccccggaactcgcttcctgcctctcccgcccaccagctctcctccagtccccggcttggtggggccgcccagggcccgttgcccgaggccagcaagggagacctgccctccgattccggcttctcagatcctgagagtgaagccaagaggaggattgtgttcaccatcaccactggtgcgggcagtgccaagcagtcgccctccagcaagcacagccccctgaccgccagcgcccgtggggactgtgtgccgagccacgggcaggacagtcgcaggcgcggccggcggaagcgagcatctgcggggacgcccagcttgagcgcaggcgtgtcccccaagcgccgagccctgccgtccgtcgctggccttttcacacagccttcggggtctcccctcaacctcaactccatggtcagtaacatcaaccagcccctggagattacagccatctcgtccccggagacctccctgaagagctcccctgtgccctaccaggaccacgaccagccccccgtgctcaagaaggagcggcctctgagccagaccaatggggcacactactccccactcacctcagacgaggagccaggctctgaggacgagcccagcagtgctcgaattgagagaaaaattgcaacaatctccttagaaagcaaatctcccccgaaaaccttggaaaatggtggtggcttggcgggaaggaagcccgcgcccgccggcgagccagtcaatagcagcaagtggaagtccaccttctcgcccatctccgacatcggcctggccaagtcggcggacagcccgctgcaggccagctccgccctcagccagaactccctgttcacgttccggcccgccctggaggagccctctgccgatgccaagctggccgctcaccccaggaaaggctttcccggctccctgtcgggggctgacggactcagcccgggcaccaaccctgccaacggctgcaccttcggcgggggcctggccgcggacctgagtttacacagcttcagtgatggtgcttctcttccccacaagggccccgaggcggccggcctgagctccccgctgagcttcccctcgcagcgcggcaaggagggctcggacgccaaccctttcctgagcaagaggcagctggacggcctggctgggctgaagggcgagggcagccgcggcaaggaggcaggggagggcggcctaccgctgtgcgggcccacggacaagaccccactgctgagcggcaaggccgccaaggcccgggaccgcgaggtcgacctcaagaatggccacaacctcttcatctctgcggcggccgtgcctcccggaagcctcctcagcggccccggcctggccccggcggcgtcctccgcaggcggcgcggcgtcctccgcccagacgcaccggtccttcctgggccccttcccgccgggaccgcagttcgcgctcggccccatgtccctgcaggccaacctcggctccgtggccggctcctccgtgctgcagtcgctgttcagctctgtgccggccgccgcaggcctggtgcacgtgtcgtccgctgccaccagactgaccaactcgcacgccatgggcagcttttccggggtggcaggcggcacagttggaggtaactaggatttctacctcaaccgcgagacctatgcaaggacggtgtggaccaactcgcgcccgcggcatggtgcccgccggcctgccgggctcccacccctggacggcagaggcaaggacggacgggagctccactgtgaatcggcggcacgcgccgcaggaggctgggactggtccagtttgtactgtcgatagttttagataaagtatttatcattttttaaaaagtataaacaattctgacttattttattccatctaagtggtaaaaggcaacttattgagaaatataaatatctatatatgagagctctatataaagacacgtgtctgcagggcgggcccgccagcggattcgccacagcctgccccggtgctatctcgtccccaggcccgcgcctgcctccacccgcttggtgctgactagacgctgacaacgccgaaccccgttctcggaaacgccgcccggccggctcccccgacgcgctgctcccgtaccaaaggcaggcccgtcgccaccacattcctcggaggcctccccgcggcctgagccccttcctgagcgccctggcgcctgccctgagctcttcacctttaccccggcactgtgaacccccagactgttcaccctccggggcgtgggttgcgcccttgcatgtgaaggggcctgcgcggtgacgcagctggccatgtgctgcgcgatggtgctgtgaggacggcgcgggcacgttgaacaagtgcatttacttttgtatttctcggctgtccatggctcgcagcatgccctgcgatgcggggcaggcctgtcgtgggtcccttggtgtttctgtacaggagagagtcacactaatgagtggcagtattttatagagatgtgatgagaatttataaatttcatagatttgacagcttttatttttagatggtataatgcacagtgaagaggaaagaaaagcgaggggaaaaaaccttatttattcaaacagtgcacaaaatggccccagcgtcagccccgaccctagacccctcagttgcagctcccagcagcccagacagagctgccggcgcccctgcctgccccacatcccttcctgtcagggccacgcctggcacccatcccttggagcctgtgctggttctcccagctgctgtgggtgtgctggggccagggtgcactgctgaaacctggcctctctggccctaggccccagggtgacgtcggccccccactctgcagccttggcgggtgcctgggactgggtgtggaaggagaggagctgaggccggggtgtagcaggcaggcagggccactccagtgcttctggagccctgagcagtcagggcctgggttgtctgagcagtggtggctctgtgccctccctggaggatgggatctgggagtctgagctccccgcatctggccctgggctgtgtggcacttgctgagcccaccttctcaagtgcttgctcctgtgagatggcatcggggagccccttccccaaggtgccacagatccaccctccagggagctgccagccctgtgttctggttcccaagggcaggatggacacacgtcacatccctaccacgtggcctccaaagggagccacggaggaaaggcttctgtggttgctaggtgggggagtcctgtgtgggagggcctgaagacccctgcttgtgcctggtgaggggggtgctgcctcccccagcccccaacaacctctcagacccccaccctccaacatagctgagttctgaagatggtgctccggacctgtcctcttaagtggtgcccagtgccctccccaccccacgttggtgctctcagctagaaggtgctgtgcctctgcctgagccccaagccccgagcctggccttcaggacaggcagcctgctctgtgtcgccacgggccggatacgccacagggttgatggcagagacggccgagtccctggtctagaacaagacacattctttaaacactgtattacttctgcctccctctaggtgacagtggcagtccgggtgccatcacgggtcctgcagatggccatgcagggctcctgcccacgcaggccaccgtatgttcaggacacgcactgggtctcagagccactggcccaggcagaagtctccttgagcccactgggtcatatgcgtgtcaccacacgtgaactagtgtggtggctgcctgcggacaccctcctgttctgagccctgggcctgtgttcttctcagacactcccagactgaggggtggtgtgtggcgggtggcagggtggctgtggagactggggatctggagcctggtgctggcacctggcctgagtttccgtgggcagctggcggggacctgtgctgctgctgctgactgtgggtgggcgggcggcgcctgggagtggctcttgctcaggaattgataggaaccctaaaaactaggataccccctcctcggcccatgaggcacgcacagtgacttatttaagacttcccccttaatttatctgcccccaggatgcgtcagtctgttcagtggtcagcaggccccccaccccccgccgactgccctcgccatcgtggtcagacccccctcccaacacaacacgctgctggtctgtgtcagcctttgtaacgtgggaggctctgccgtgtcttccgggtgaactgtatttggattgcgcgcattgtcacggtccgcccctgggctgcaggcgccccttcctctgggcacccctgcattctgcatccccacctctagacgctgtaataaacagactgttttcactcggaaaaaaaaaaaaaaaaaaaa

SEQ ID NO: 966 - DNA, 9773 bp, Homo sapiens
cacaaagagcggggcggagaggcagctgcggggggagccggcggccgctgctgccgcccagggctctggggccccgccggccaggcccgccgtccgcggccagtgcccttcctcctcctcctcctctgccgccgcctcctcagtcgccgccgcctcctcagtcgccgccgcccgcgccgcccgcgccctccgcgcgcctctgagcccgcgccgggccgcgccggccccttcccatgcgggcggcgcgggccctgggaggggcgcccggagccagccgcgcagcatgcactggggggttggctttgcttcgtccaggccgtgcgtggtggatctgagctggaaccagagcatctccttcttcggctggtgggccgggtccgaggagcccttctccttttatggggacatcatcgctttccctttgcaggattacggtgggatcatggcagggctgggctccgatccctggtggaagaaaaccctttacttgaccgggggagctttgctggccgcagctgcgtatctgctccacgaactcctggtcattaggaaacagcaagagattgactctaaagatgctattattttgcatcagtttgcaagacctaacaatggtgttccaagtttatctcctttctgtttaaagatggaaacttatttaaggatggctgacttaccgtatcagaactattttggtggaaaactctctgctcaagggaaaatgccttggattgaatataatcatgaaaaagtttctggcacagaattcataattgactttctggaagagaagcttggagtgaatttaaacaaaaaccttggccctcatgaaagagccatctccagagcggtgaccaagatggtggaggagcacttctactggacattagcttattgccagtgggtggacaatctcaatgagacccggaagatgctctctcttagtggtggtggtcccttcagcaacctgctgaggtgggttgtgtgccacataacgaaaggaattgtgaaacgcgagatgcacggccacggcattggccgcttctccgaggaagagatttacatgctgatggagaaggacatgcggtctttagcagggcttttgggtgataagaagtacatcatggggcccaagctttccactcttgacgccactgtctttggacacttggcacaggcaatgtggaccttaccagggacaagacccgaacggctgatcaaaggtgagctgatcaaccttgccatgtactgtgagaggataaggaggaaattttggccagagtggcaccacgatgatgacaataccatctatgagtctgaggagagcagcgaaggcagcaaaacccacaccccgctgctggattttagcttttactcaaggacagagacctttgaagatgagggagcagaaaacagtttttccagaaccccagacacagattttactggacactcactctttgattcggatgtggacatggatgactatacagaccacgaacagtgcaagtgacgtccagcctcactgaccctcttccttgggacctgccactccctgggtcggtccattttcccaggtagcaatccatccgagctgggaggagatcttcgtgcttggcagagttttcacatgctaactggactatagcagccttatttcttttttgtacaaacaaaacacagaaccattcagatgactccattgaaaacaaacaggcaaaaaataatgtcagcatggttcctgaaatccatttttgttttcattagaaaactattaataatattgtgtggtagagcaggtgtaagagctggttgtcagctgatagtttttatgatgatcctcttcaaccctgaggtcttaattgtgagatggattcttgaacctccttcctccaccaggatttgaagtaatgagagatatcatcagaaaaatgttttacggtggctgcttgtactttatgtgtgtatattgtatgttgagacataagtcaaataaaatccacagatattaaacgaacacctactatgtgcaaagcactgtgctaggtgctaatcagtatacattttattctaagccctgccagtgactagctgtgtgattttgagcaaatctcttattaactattgggtgcctcatttctcccacctgtaaagtggggatgacaatactctccacctacctacctcacaggggtgttgtggggattcatgtggtaacattcgtacggcgctttaaacctcttagaagtggtgcgacataaacacagcattttattctttattgcacttcatgcatgtgaagatttgagggcaaaggaattccatatccaggcaaccaccaccacagtcacctgcaaaagctgagcagatgaaatacacacaaaggtacacttaggactttgtcatgattcctttctgtaatcttggctgaatcaaaatcttttgttcaaagaacattggaaatgtttttacaaattatcgacagctacaaacagtcttcaattctaccatgtatttgcagaaaagtggttctttcattgcctgaactcaccctggcatgttctgtgttgactccagagtgttacgttgcctatgtttgatttatttgagaagaataaatctcaggtatatggcaggtttcatagagttgaagggaaagtatttcattgatttttataagcagaagcctgccaacttgtaatgtctttttgaaaacaaaccttgcaaagatgtattgaaaagatgaagtagcaagaggatacttgtatcaaagcactctgtgcagtgttagactatatgcagttttattaatgcaacttttctggtgttttcagccactgcccagtgagaggagagcaatgctgagaacaagtcttaatgtttttgctgtctcatccccgttctctctctctttccctatagtattcgatgaactgttggcttacccatatttgtgaaggcaccctatttctaaagatgaagttgttgttgttgttgttgttttgacttaggacattttccagggaaatatggggcagagatcctgggtgatggctgtgagatttgggctaggagagccaagatttacaattgcaaacaaaactgctttgcttctgaccaacataaggattgctcattatggggttaaagaggcacttcttaaaatacagcaacttctgagaaatccatgcactttacttgaaaaaaaaaaaacctctttttgaatatagcatttgcaaaacaatcttaaaagactgctgtagattcacaaagaggtaaagggaggagagtttttcagactgcttaccacttaagcaattgtgtagggcatatgtaactgggaatacgtgctgagataccctaagttagaaattcttattccatgggaaacttagttgttaatatcttattaaaaccattcttatttaaagggactgtttgatgcctaataagaatgtggtggagaagatatgaatggataagcctgtttgaggctgcagcatcatttgggaggactgtttgcctcccctctctctagcaagtgtgttttaaggccaactggtggcatttctgtgtgactagggagactcctggactgaaaatatgaatataatgaacaggtggactgcagacctgtctccacaaagcatgggttgtccttttcccaccacattttagtagaaaagaaatgtatttgaatttttttctatgaacaatctatcttactgtacagtaccaagtgtgatgtattttctctcaaaggatgattaagttatgagaatgtagattaatatatgtttttaattttatattacttggaatacaagtatgtggagaaccaactttgaaaatgaagttgtaaaataagtcattccatccaggtacctcttacaggggcatgaatggacattgctatctggagtcttgggcaattgcctgacagcatataactgggcatcaacattttgtaggtgttaatttgatttagagccctagaatatgcccctgctttactttcccaaggcgggttatgcaaacaaaataaccaagacaaagtcaccatagtgtgagtctttatccggaaggatttaattttatgtgcttcattcttaagctacccagatttgaaatgttctccaatttcatgaacaggtgctaattataggaaaaaactataagaagttaagggacattttggtcatctggcttcttgttcaagttctgtgtttcctttttgctggaaggtaacttgaagtatgtgatctttaatgttaacagatgcttttggttggacaacagacccataggctattcgttctttttttcctgtcattgtaaaagtaaatcaagctcttgcatccacctctctttgcccatctgtacccccactcaacaagattaatgagcagaatcattgagctttactctccatcagaacagatataaggacaatctatatttatgcaatgatgaactatattgtcagcatttaccaatttgttgttgttacataatgaattgtagaaagtgacactaccaaggctgtgggctacccaggagactaatcacggacctggaacaacttggacttgaatcagactgcagtctactcctcaagtgagccctgcccatgtatactgtggtgttagggtatatttttgtgaaatagctaaggttcaaggaacagacatactaaggattttggccttgtgggtcttgcttagatttgtttgagagataatgtagagtcatagaaatgtatagctgtgctaaaaattagctgtagaaagcaccttattggctcagtgtcacatacatacttatttgaagggcaggaccaaaaactgaggtcaatatggttctttccattacaccacgttgcccttgatggtttctttctattataccaccttgcccttgatggttctttccattataccactgtggctttgttgtcttataaaatgcatgttacctgagaagtcaccctgtgttcagacaaccagcacatctccagccattccctggttggaatcctacttcgcttttgtccatgtcctgtcagcctggtcaagaccaatacaagagacctctcatcagtgcagggtattgctagactctgaagaatagcaagatggattcccaaatcaccaagactcctcatacttccttatgtatcttttaaagaacccatgtccattccctcacttgctgaatatttacagagcacctaccctgtgcctggccctgggatctacactggttgtagagtggcaaatagaacagcatagaactctgatttcagggcatcctcttttgcctagacttctctagcctcttttacgtacttggccatttccctgttccattccatccactacaaatggattaatctttctaaaaagctctttggccctgatggggtgtggcattgcctcagggtgaggggctactccttagggtctggtgttttcacctttgttcaccttgtctccatagctcctccatgggagccatccagtgcagccaggttgatccatttgccattgcctaaaaaagcctcatgtggcccacctctgtgcctctgctcatgccagtccttctcctgaaatgttctattctctgctccactggcccaagtcatgcccatctctcaaggtctgacttcgtcagcttcacatgaaggcttcccagctgattataatctcttcctttgaaaatgaagcactcatcacttccttccctgaaggttgcatgggaaagatgctcagagagtgagtcacataccattaaatagtgaattttcactttttgtttgtcaggaactccactgataatccaacgaaagttctataccctattcccagaaaaacacatatatgcaaatacataaaatgttacatataaattcaggaaatttagagacctcctgaaattatccatggtttcctcagggggttaatggaccccagttaaagagtcttgttcccaagagtctttaaatgttatcattgtgtttgttcttgtttttaacacagccagagagaagaaaaattagtacaggctatgcaagcaaaagtaatctctattatccatgttcagtatgtcttgagtgacagaaaagaagaaagaagtgctcttaggttatttgagaaaattttgttttagaggtttggaattttgaaagtcataggattttgttgttgtccttgtcatttatcttttaaccacccccaaaattgatttatcaaaatgagttcagggccaagtgcgcttcctttcagccctgaaacccaccgcttctgcatggatagggcaaccagcctgggctgaaggtgggagagaagaggctggatttttcttccttaaagaagaaaggtctgcacaatcaggttttcctgtattcatttattcattcattcatagaacaattgttgagtgtattttcaataaaaggttggtggcttttgttgatagggaacaactcaggttattcttctttctttcttttagggttttttttttttttaaacagagtatgttattttattgttcctgactatgacccaggatcctttgttctcctttatatgcagtgctatttaagtcaaactagaactgataaaagtacactcaatgacgaatacttcccaggctaaatgctgggctctgggaacccatctttaacaggtccagggatcaattgcatgtgattgtgaagtgcttgacctttattcagttgcttccagtggtctggatataacttgggaagttcaaaaggattcccttgttgggtgaggagggacgggcctcttacctgtaagactcttgctactgtcaggcgtggatgcgaacatctgtggcatgttttcctcatctgaattccttacccagaaactcagatttttggtccctgactttcaagaatatcttaaggatatttaagtttccttaatctttgagatgagactgctggaaccagcaacgttagccttgccagttagagatgattacagagggcactgaagcatagatttaaaaaaaaggggttcagctgttttggagctgacagggtgacctcctcaaccattctgctttcgccgaagcaaggaacttgtccccagacctagaccctctaaaactcctgctattggctggaccatgacaaactaggatgctcaaatttcataaggatgattgccttaaattgtaaaattggtagacaaataaaggggaccattgcaataataaaacgaataacctacagatatggtctagcagcaccaaactgaccatttcagtaggaaaacaagtaatctggagtaaaagatggatacggtactttggtgttctgtacacaataattttagcaaagaatttaatggccatcatgcatttttgaaacaatccactaaccataaagcaatatatgtgtatcataatcagttaactttataaaaagttgtgctactaaatgtgactaattcacctcccaccccccattggcatgcatttatttttatttatttgtttttatttgtggctctggaatagagtaactttcacttattagtaatgcttaagcttttttccttatttaataccttttttgtttttagttaccccatggcttctaaaaaaataagatccaacttctgaattgccatgttagttaatggtggctaaacagatagcaaagggaatataatataattgttcattgagggctaaaaaagaggaatgctctgaatatttactgtcttcctcctctttaaaaaataatcaatgactttcctcttccattgttcagaatcagaaatgttctttcgtatttgcttctcttctacaagagattatatttggcttattaaaatataaaccatgtccaaatgattgtatttttatctttaacaaattatgcctgggatttgttttttacagaaataaggctaaaggcttctgcttcagtaggggtgacatgtttactcctgtaaaatgattttaatgttactcctgtcaaaatgattttattgcaagtaataagtcttgtgggatcagaacaagcttattgtaaacacatgtttttttcccagtgatctacatcatgccaaatgtctgacaactcaaatgttgatgacagcgatggtttttccatggtgaagtttggaaaactgagggtctgagtccctcatttggtggtattagaatttaactgagtaggaggagagaagaaaacagtaacaaatgtcaaaatttcaagcaaccatgtggtatggctgtggtagagatgtatcaggcaattgaaagttttctaggtggtgccatcttgctaaaataataaaaagtacaggtttataaatcaaaaacaagtgcaatctatgtagggaaggattgtctatggatatacaagtggccagtgcaggaagtgaagtaacatttatctttatcttaatttctatgctcatgtcccccattccccttctgaagccaggcctgggaccttagatagcagcttagagggtctggccctgatacatttactcctttaattttggaatttccttctagtctctcaagagtgtttgtggcatatatttttcattttataaatataaaattgtacaaagtaatgtacattttgttttagagaagtcttttaaatgtttgcagacagcccagatcgtccatccctatttaggcagtggtctccaaacgtttatgtttattcaccctattagtaaaactttctgagcatgcccctccatgtatttatttatgatatatatgtatatatgtatacactgctatatatgtatatactgttttactgatgtaaacattaaaaaccatagcaaacatagacattttaaaagtatattttctggtcctcaatggagtttagagaatgggacaaggagtctttaggcgtagcacccagatgcctgtaattgattagagaatgtgtatataccatttgtggcaaagcagatataaaacaggcatggacgcatgattttaggtcaaggtatttaattatttttacttaaaataggcatttttggttgggaaagagaaggatgaacaatttgatgtcacctttaagactgatgtttttaattctgcttttgggaccacttgatctagaatgccttgaaaattccagaaagatttaacaacacactgaggtaagcaaaacaagaaaagaaagtaggggtgaggtgatacccagataatgcaaatgcaggatgtattgtctgtgaatttcagcatcaatctgaaaaacatgttttgataatgcctgataattcatcatctcactgattacatgtctttttttctatttgtttataatcttgtgtcttcaaatgtgtggaagatgtgcagacttatttttaggtatctgagataggaagggccaatgttggcataatttgaacccacatttcggggctaatgggcggacaccacctggaaacacttacctgcaccctctgttttgcaatcacaatgattagcatcttgctgaatgatgaccccaatgtgaagatggcatttcagtgtttatttctggatctatgagttactttagcagagttattagtagtttataaagccatatttaaacttgtacacttgattgtaagatagatttgaattgtgcactatgttgactactgtatataaatgtggaaattctgtatatttggtcttaatgctatatgtatttgatgtgtaaatgataactaatggatatgaaataaaaaaaaaaaaaa

SEQ ID NO: 967 - DNA, 4625 bp, Homo sapiens
gagggagggagctgcttccccgcctgccgcgccaccagtccgaccctcggtcccgccgtgtgagcagctggtggagtggagctcagcgcggacgccggagctgcggccgccccctctgcaggtgcctgtgaggaggcgcccgggccgcaaccgctttccgagatccccagtcgcgcactcgctccccgcgctcctgaggggccgcccggccggaggaggccgtcgcggggctcggcgttcagcatgaaccgcagccaccggcacggggcgggcagcggctgcctgggcactatggaggtgaagagcaagtttggagctgaatttcgtcggttttcgctggaaagatcaaaacctggaaaatttgaggagttttatggattactacaacatgttcataagatccccaatgttgacgttttggtaggctatgcagacatccatggagacttactacctataaataatgatgataattatcacaaagctgtttcaacggccaatccactgcttaggatatttatacaaaagaaggaagaagcagactacagtgcctttggtacagacacgctaataaagaagaagaatgttttaaccaacgtattgcgtcctgacaaccatagaaaaaagccacatatagtcattagtatgccccaagactttagacctgtgtcttctattatagacgtggatattctcccagaaacgcatcgtagggtacgtctttacaaatacggcacggagaaacccctaggattctacatccgggatggctccagtgtcagggtaacaccacatggcttagaaaaggttccagggatctttatatccaggcttgtcccaggaggtctggctcaaagtacaggactattagctgttaatgatgaagttttagaagttaatggcatagaagtttcagggaagagccttgatcaagtaacagacatgatgattgcaaatagccgtaacctcatcataacagtgagaccggcaaaccagaggaataatgttgtgaggaacagtcggacttctggcagttccggtcagtctactgataacagccttcttggctacccacagcagattgaaccaagctttgagccagaggatgaagacagcgaagaagatgacattatcattgaagacaatggagtgccacagcagattccaaaagctgttcctaatactgagagcctggagtcattaacacagatagagctaagctttgagtctggacagaatggctttattccctctaatgaagtgagcttagcagccatagcaagcagctcaaacacggaatttgaaacacatgctccagatcaaaaactcttagaagaagatggaacaatcataacattatgaaaccgtggtttgaatgttttcagagtgaggatgccatgaggacttgtacatttggctagtttaaaagcatatatacctctgaccagtgacgtggaataggcatgagacgagtaacgttgcaagcttacaatattattaaagtagtagtttgataattgttaatataaactttggtggatcagaggtgaatttaagtccaaaacaaaggggcctttgctgatgaagttacgtgcttttgctgttttgtctgtggagaatcagatgttaaagcacattcttggaactatgtgagaagactagatcatttctgttggaagtggttgcatatttaacctgctgtgcagagcccagttaatttttcctttaactgtatttttaaaattctaatgtgaagtctgattctctcttgtggtacattggggacctcagctcttaaaggtctcatgttcccaatattttattttgattttttttttttttttttttttttttttttttagtgactgggtctcactctgttgcccacactggaatgcagtggcatgatcacagctctctgcagcctcaatcccctgggctcaagcagtcctcccacctcagcctcctgagtagctgggaccataggcacataccaccacatctgtctactttttgtattttttgtagagacagggtttcgccatgttgcccaagttggtcttgaactcctgggcttaagcagtcctgcctcggcttcccaaaatgctaggattagagccaccatgcccagcctattttgatttttgtttttttatgttcctttctaataaattgtaacaaatgatgttctcaagtacatttccagtttcttttcttttctttctttttttttttttttttttttttgagatggagtctcgctctatcgcccaggctggagtgcagtggcgcgatcttggctcactgcaagctctacctcctgggttcacaccattctcctgcctcagcctcccaagtagctgggactacaggcgcctgccaccatgcctggctaatttttagtagagacggggtttcgcagtgttagccaggaaggtctcaatctcctgacctcctgatccgcccgcctcggcctcccaaagtgctgggattacaggcgtgagccaccgcgcccagttgtgcatttctggtttctaagaatcaaaccacttggctgtttttaggagttacttcccatgttataaagctgaggaagctttttttttttttttttgagacagagtctctgtcacccaggctggagtgcagtggtgcaatctcagctcccgggttcaagcaattctcctgcctcagccttctgagtagctaagattacaggtgtgcgccaacacgtctggcttatttttttgtatttttagtagagatggagtttcaccatgttggtcaggtgggtctcaaactcctgacctcaagtgatccgcccatctcctcccaaagtgctggattgcaggcatgagcgcctagccaggaagctatcttttcttgagttatgaaactttgcaacagttgttcaaattggtgtttgtccttcctatagctttcatattttcaaattaattctgtatggctatataatttatgttttaaaaggcaattctcttgactttggaaatatggaagtctctcctttaacctattcttgttcccattcccagtctcatttgaaatcattccttttattgttagtgtgtgtatttttgttggtgtgcttttaatgcatccaagtatgcatcattttggataaaaaatacatccaaattaagatgttttaacacataggacaaacttgtgcactttttatgccaaaaaaaaaaaaaattgggttttccttcatgggatttctagaaacactgcctacactttatgaaaactacatagtattcacctgtgacaggtagagtttatcactattaattttatgaggctatttattactttccaatgcatccacttagaacaagctaagagtaaggctgctaactttaattccttgcctgattttattgtacagtgtgcacaagcacaatggtatgcttgtatatagaaactaaaaatactatgaagtacataagttccctatggcttatggagagttatttattaattaactttatggtagggctagtatgaatacctttttaacaattgtgtgctattacaacaatgaagattcaaatgactccgctttgaaggatgttttctctatatggtaaaatatatatgaagaagtcttgattacgtgaagatcacttgactcagaatacttcaatgtattttgttcacattaccactaagcatattatcagtaaactattaactgactgcacattatgtaatacgttgtactttttgttgaattcaccgaagttcttccatttatatgctatttttaatggcattccggctttaacattctgtgagtcttacaaatttgactcttgaatggcaaaataatgttagtatgtagaaggttaactttcatttataatataagtggtgcaggggttcaacattttaagtaaaaatatttttacacactacctctctctttttttttttaaagttttaacatcagaacttttgggggaaaaactacttcagggcttgactttttgtacaaattttaactgtaaaatacagatttatcttgtacgcattcatggaaatggaaatcaaagctgctattgctttttattttaattatcctgttaagggtatctatcaatggtattttcaagtagatctctgtttcttaaattattggtgaaataattgattactagatatattgtaaaaccaatagatcctggttatacgataaaatatcagctcattggtaggctgaatcaattatttcaagtgcaccttattaacaaaagtatcagtggatccaacataaaattttatagtactaaatgtcaagcctaactgtgaattttgttctgtatcttaagtaaatttatgataatgttctcgagctatcaacaaaatatatgtacttttgtgagctatgaattttctaattaaattttacatgctataacatgatttttacatgaatgatactttgtttataactatcaaatgtcagtattttactacaattttattataaagtgtacattatcactaaatgaacttcgattttaaaaatcaaattagctttagttgtatattattttttacaaataaagatagacttgtataaaggctaaaaaaaaaaa

SEQ ID NO: 968 - DNA, 5195 bp, Homo sapiens
acttcaaaatccgggtcaaagggtgtcgcttcggtctcttctccccggctgatcccagcactctccgtgacagcgcctcctgactcagcccaggaccggcttcttctcacgacctgctggagactggacgcccacacctgacccggaactcggaggcgtgcttcctccacccgccggctagcagccccgggccctgagctcccgccgacgccgctggggggcccgacaggcccctcggcgctgatgctgagtgggatcgagggcccggggcggcggcggagtacgggcctctggcgccttaggccagccgcaggtgtcggttcttaggctctccaggctcgctagctcccgccccggcttggatgggtctccctgcgccataaatgtggctgctgaggcggcggtggccgtggcccgtcgcgctgctgctgcggcgctccaagttcatctccgccccggggctctcctgccccacctcggggctgccgccacccgctccttatcccctggccctggccttgcagcgtggcgacaatggacaagatcctggagggccttgtgagttcctcgcatcccctgcccctcaagcgggtgattgtgcggaaggtggtggaatcggcggagcactggctagacgaggcgcagtgcgaggccatgtttgacctgacgacccggctcatcctggagggccaggaccctttccagcggcaggtggggcaccaggtgctggaggcctacgcacgataccaccggccagagttcgagtccttcttcaacaagaccttcgtgttgggcctccttcatcagggctaccactctctggacaggaaggatgtagccatcctggactacattcacaacggcctgaagctgattatgagctgtccgtcggtgctggatctctttagcctcctgcaggtagaggtgttacggatggtgtgtgagaggccggagccgcagctctgtgcccgactgagcgaccttctgaccgactttgtgcaatgcatccccaaggggaaattgtccatcacgttctgtcaacagctggttcgaacgataggccatttccagtgcgtgtccacccaggaaagagagctgcgggaatatgtctcccaggtgacaaaagtgagtaacttgctgcagaacatctggaaggccgagcctgccacactactgccttccctgcaagaagtttttgcaagcatctcttccacagatgcatcatttgaaccttctgtagcattggcaagccttgtgcagcatattcctcttcagatgattacagttctcatcaggagccttactacggatccaaatgtaaaagatgcaagtatgacccaagccctttgcagaatgattgactggctatcctggccattggctcagcatgtggatacatgggtaattgcactcctgaaaggactggcagctgtccagaagtttactattttgatagatgttactttgctgaaaatagaactggtttttaatcgactttggtttcctcttgtgagacctggtgctcttgcagttctttctcacatgctgcttagctttcagcattctccagaggcgttccatttgattgttcctcatgtggttaatttggttcattctttcaaaaatgatggtctgccttcaagtacagccttcttagtacaattaacagaattgatacactgtatgatgtatcattattctggatttccagatctctatgaacctattctggaggcaataaaggattttcctaagcccagtgaagagaagattaagttaattctcaatcaaagtgcctggacttctcaatccaattctttggcgtcttgcttgtctagactttctggaaaatctgaaactgggaaaactggtcttattaacctaggaaatacatgttatatgaacagtgttatacaagccttgtttatggccacagatttcaggagacaagtattatctttaaatctaaatgggtgcaattcattaatgaaaaaattacagcatctttttgcctttctggcccatacacagagggaagcatacgcacctcggatattctttgaggcttccagacctccatggtttactcccagatcacagcaagactgttctgaatacctcagatttctccttgacaggctccatgaagaagaaaagatcttgaaagttcaggcctcacacaagccttctgaaattctggaatgcagtgaaacttctttacaggaagtagctagtaaagcagcagtactaacagagacccctcgtacaagtgacggtgagaagactttaatagaaaaaatgtttggaggaaaactacgaactcacatacgttgtttgaactgcaggagtacctcacaaaaagtggaagcctttacagatctttcgcttgccttttgtccttcctcttctttggaaaacatgtctgtccaagatccagcatcatcacccagtatacaagatggtggtctaatgcaagcctctgtacccggtccttcagaagaaccagtagtttataatccaacaacagctgccttcatctgtgactcacttgtgaatgaaaaaaccataggcagtcctcctaatgagttttactgttctgaaaacacttctgtccctaacgaatctaacaagattcttgttaataaagatgtacctcagaaaccaggaggtgaaaccacaccttcagtaactgacttactaaattattttttggctccagagattcttactggtgataaccaatattattgtgaaaactgtgcctctctgcaaaatgctgagaaaactatgcaaatcacggaggaacctgaataccttattcttactctcctgagattttcatatgatcagaagtatcatgtgagaaggaaaattttagacaatgtatcactgccactggttttggagttgccagttaaaagaattacttctttctcttcattgtcagaaagttggtctgtagatgttgacttcactgatcttagtgagaaccttgctaaaaaattaaagccttcagggactgatgaagcttcctgcacaaaattggtgccctatctattaagttccgttgtggttcactctggtatatcctctgaaagtgggcattactattcttatgccaggaatatcacaagtacagactcttcatatcagatgtaccaccagtctgaggctctggcattagcatcctcccagagtcatttactagggagagatagtcccagtgcagtttttgaacaggatttggaaaataaggaaatgtcaaaagaatggtttttatttaatgacagtagagtgacatttacttcatttcagtcagtccagaaaattacgagcaggtttccaaaggacacagcttatgtgcttttgtataaaaaacagcatagtactaatggtttaagtggtaataacccaaccagtggactctggataaatggagacccacctctacagaaagaacttatggatgctataacaaaagacaataaactatatttacaggaacaagagttgaatgctcgagcccgggccctccaagctgcatctgcttcatgttcatttcggcccaatggatttgatgacaacgacccaccaggaagctgtggaccaactggtggagggggtggaggaggatttaatacagttggcagactcgtattttgatcctgagagagtccaaaatgcactggtcacgaaacgtctaatactatgactgttaaaatgtcagactataacaaatatctatcttttatttttcattagacccttatacttcaagagaacacactcagtgcttgtttttattttcttgacacatttattaacaaaatgcatcatggaaaaaaaaatctacctcttaaaattccatttgcttttatggttagacatgcttgaccaaaaatgttcagaagaaaatatgtacctggtccctaattaagctgcgttaaatttggtagaagcatttaaatggtctatcttcagttttactgaacaaaaaatgtaatttatttagcattctttataaaagaattgatgctagaggtaaaaaaaaatacttgtttttaaaaaatcctttacgtcttgtgtaattaccccattattaaattcaagtccttgaaaatcaactagagattataaagtctctaaagaaggcaataacaaaatttatcaagatatagtacttttcagtttttgtttagtgtcttcagcatcactgtgtctgtatttcaagtacaaatgtttttaaaaaggattctttatacatatgtgctgaattgattttaagaaagttgcatgatcctgtaggagcaacatttttacctaaaaaatgctaactttatagtatttctaattgttcaaggattttaaaattctatttcagggagtatatcttctgtggttttgaaggaggtgagttctgtatgtgccttgcagtactgtaattcaaaaataggaatctttggctgcaaaattttaatgaaatgttaggaagtaattttcgtgctaacattaaaattataactttttgaaaggtaatagattttccagaagtaaaatctgatggttctaaatcaatcaatgtgatagttcatttttaactcttagaagaattcagaggaaattaacccagctaagtaaaaaatctgtcttgattttgttacttattcctcagaatattaaacattgatcacatatttttagagttttacatttgggttttttgtttgtttgtttcagtcatatgtttggcactgttgtttctattttcgtagttttagataaaatgttaaaatgccaaaccctaccttcctacactttttcttttgccaggaaactggaaacatgtcagttctcctggttcttgattatacagtactcaagagttatcccagttatcccccttcctaaaggttttaacttatccacagttgtgcattgttctgaagattggtctcatatttattttgaaaacactttaaggaaacaatgttcttcgatgatttggggtttatctttttcccaagcttttatgacagtggttaaaaaacagaaatcctcatgtttattccattacctcccattcctaacctgtttccaatcaccaggaagattaggaaggcagattagattaaaaactgaaaattctttgcagatttaatgaaggttctcctccttataaatgaatgaaccagtta

SEQ ID NO: 969 - DNA, 7026 bp, Homo sapiens
aagagggcgtgaggagggaaggagagggaggagagagaggagagagaagggcggagtaggaggcaggggaagggggcggggcggaagagtcacgtgatccggcatggaggcggtggcggcgaccgggaggagccgccggggcagaagccgcacttgttagtgtggggggaggtgggggcgggggacgccgacaccgtcaccgtcacccagggacgccgaggagaaggcgggaggggggtgggggcgagatcaggctccgaccccccgccgaggggatgaggggagcatgggtgccaaggagtcacggatcggattcctcagctacgaggaggcgctgaggagagttacagatgtagagctaaaacgactgaaggatgctttcaagaggacctgtggactctcatattacatgggccagcactgcttcatccgggaagtgcttggggatggagtgcctccaaaggttgctgaggtgatttactgttcttttggtggaacatccaaagggctgcacttcaataatttaatagttggacttgtcctccttacaagaggcaaagatgaagagaaagcaaaatacatttttagtcttttttcaagtgaatctgggaactatgttatacgggaagaaatggaaagaatgctccacgtggtggatggtaaagtcccagatacactcaggaagtgtttctcagagggtgaaaaggtaaactatgaaaagtttagaaattggctttttctaaacaaagatgcttttactttctctcgatggcttctatctggaggtgtgtatgttaccctcactgatgatagtgatactcctactttctaccaaactctggctggagtcacacatttggaggaatcagacatcattgatcttgagaaacgctattggttattgaaggctcaatcccggactggacgatttgatttagagacatttggcccattggtttcaccacctattcgtccatctctaagtgaaggtttgtttaatgcttttgatgaaaatcgtgacaatcacatagattttaaggagatatcctgtgggttatcagcctgttgcaggggacccctggctgaaagacaaaaattttgcttcaaggtatttgatgttgaccgtgatggagttctctccagggttgaactgagagacatggtggttgcacttttagaagtctggaaggacaaccgcactgatgatattcctgaattacatatggatctctctgatattgtagaaggcatactgaatgcacatgacaccacaaagatgggtcatcttactctggaagactatcagatctggagtgtgaaaaatgttcttgccaatgagtttttgaacctccttttccaggtgtgtcacatagttctggggttaagaccagctactccggaagaagaaggacaaattattagaggatggttagaacgagagagcaggtatggtctgcaagcaggacacaactggtttatcatctccatgcagtggtggcaacagtggaaagaatatgtcaaatacgatgccaaccctgtggtaattgagccatcatctgttttgaatggaggaaaatactcatttggaactgcagcccatcctatggagcaggtcgaagatagaattggaagcagcctcagttacgtgaatactacagaagagaaattttcagacaacatttctactgcatctgaagcctcagaaactgctggcagcggctttctgtattctgccacaccaggggcagatgtttgctttgctcgacaacataacacttctgacaataacaaccagtgtttgctgggagccaatgggaatattttgttgcaccttaaccctcagaaaccaggggctattgataatcagccattagtaactcaagaaccagtaaaggctacatcattaacactagaaggaggacgattaaaacgaactccacagctgattcatggaagagactatgaaatggtcccagaacctgtgtggagagcactttatcactggtatggagcaaacctggccttacctagaccagttatcaagaacagcaagacagacatcccagagctggaattatttccccgctatcttctcttcctgagacagcagcctgccactcggacacagcagtctaacatctgggtgaatatgggaaatgtaccttctccgaatgcacctttaaagcgggtattagcctatacaggctgttttagtcgaatgcagaccatcaaggaaattcacgaatatctatctcaaaggctgcgcattaaagaggaagatatgcgcctgtggctatacaacagtgagaactaccttactcttctggatgatgaggatcataaattggaatatttgaaaatccaggatgaacaacacctggtaattgaagttcgcaacaaagatatgagttggcctgaggagatgtcttttatagcaaatagtagtaaaatagatagacacaaggttcccacagaaaagggagccacaggtctaagcaatctgggaaacacatgcttcatgaactcaagcatccagtgtgttagtaacacacagccactgacacagtattttatctcagggagacatctttatgaactcaacaggacaaatcccattggtatgaaggggcatatggctaaatgctatggtgatttagtgcaggaactttggagtggaactcagaagaatgttgccccattaaagcttcggtggaccatagcaaaatatgctcccaggtttaatgggtttcagcaacaggactcccaagaacttctggcttttctcttggatggtcttcatgaagatcttaatcgagtccatgaaaagccatatgtggaactgaaggacagtgatgggcgaccagactgggaagtagctgcagaggcctgggacaaccatctaagaagaaatagatcaattgttgtggatttgttccatgggcagctaagatctcaagtaaaatgcaagacatgtgggcatataagtgtccgatttgaccctttcaattttttgtctttgccactaccaatggacagttatatgcacttagaaataacagtgattaagttagatggtactacccctgtacggtatggactaagactgaatatggatgaaaagtacacaggtttaaaaaaacagctgagtgatctctgtggacttaattcagaacaaatccttctagcagaagtacatggttccaacataaagaactttcctcaggacaaccaaaaagtacgactctcagtgagtggatttttgtgtgcatttgaaattcctgtccctgtgtctccaatttcagcttctagtccaacacagacagatttctcctcttcgccatctacaaatgaaatgttcaccctaactaccaatggggacctaccccgaccaatattcatccccaatggaatgccaaacactgttgtgccatgtggaactgagaagaacttcacaaatggaatggttaatggtcacatgccatctcttcctgacagcccctttacaggttacatcattgcagtccaccgaaaaatgatgaggacagaactgtatttcctgtcatctcagaagaatcgccccagcctctttggaatgccattgattgttccatgtactgtgcatacccggaagaaagacctatatgatgcggtttggattcaagtatcccggttagcgagcccactcccacctcaggaagctagtaatcatgcccaggattgtgacgacagtatgggctatcaatatccattcactctacgagttgtgcagaaagatgggaactcctgtgcttggtgcccatggtatagattttgcagaggctgtaaaattgattgtggggaagacagagctttcattggaaatgcctatatcgctgtggattgggatcccacagcccttcaccttcgctatcaaacatcccaggaaagggttgtagatgagcatgagagtgtggagcagagtcggcgagcgcaagccgagcccatcaacctggacagctgtctccgtgctttcaccagtgaggaagagctaggggaaaatgagatgtactactgttccaagtgtaagacccactgcttagcaacaaagaagctggatctctggaggcttccacccatcctgattattcaccttaagcgatttcaatttgtaaatggtcggtggataaaatcacagaaaattgtcaaatttcctcgggaaagttttgatccaagtgcttttttggtaccaagagacccggctctctgccagcataaaccactcacaccccagggggatgagctctctgagcccaggattctggcaagggaggtgaagaaagtggatgcgcagagttcggctggggaagaggacgtgctcctgagcaaaagcccatcctcactcagcgctaacatcatcagcagcccgaaaggttctccttcttcatcaagaaaaagtggaaccagctgtccctccagcaaaaacagcagccctaatagcagcccacggactttggggaggagcaaagggaggctccggctgccccagattggcagcaaaaataaactgtcaagtagtaaagagaacttggatgccagcaaagaaaatggggctgggcagatatgtgagctggctgacgccttgagtcgagggcatgtgctggggggcagccaaccagagttggtcactcctcaggaccatgaggtagctttggccaatggattcctttatgagcatgaagcatgtggcaatggctacagcaatggtcagcttggaaaccacagtgaagaagacagcactgatgaccaaagagaagatactcgtattaagcctatttataatctatatgcaatttcgtgccattcaggaattctgggtgggggccattacgtcacttatgccaaaaacccaaactgcaagtggtactgttacaatgacagcagctgtaaggaacttcacccggatgaaattgacaccgactctgcctacattcttttctatgagcagcaggggatagactatgcacaatttctgccaaagactgatggcaaaaagatggcagacacaagcagtatggatgaagactttgagtctgattacaaaaagtactgtgtgttacagtaaagctaccactctggctgctagacagcttggcggtgagggagatgactccttgtagctgacatttggcaaaagcgtcactgaaaggcaagctaaatgtagttattttatcctgtggccctgaagcacaaaataaaaattctaattaaaatagttaactttaagagtagtaatcattttattttgaagtctcatacaagctctccgatagagaactttcaggcagatcccaccattagcctgtaaacaaaaggtttggcaccagccacctgggaccaaataagaattcaattgtgcttgtccagatatgaacaaatatgtagtgagtatagagtttaccataatcataacaaatattaaagatttccttggagtcagagtaaaaaacaaacaattataatgttgtctagggacgacatgatatgctacctcctttttcctgaagttttattccattatattgacaagatggagaaagcaagatcacgaaggtgtgcaaatgattcttaaggcatggacgaggatttttcaatttattttttaaactgtttccataccctttctttgtctttcttgctttttgtttttgccgttgtatttatgtttgagacacaaccagtcattggtggcaggggcatatagtggtcagtctgaaagggaggctctcttaagagctgtgtgccttccacccagagccttgtgggagacccagtagaaagaaacagcatcctgggaaatccagctaccatggccctcccagtggaggcatcttacatttaggatacttcaagtatcctcagaaatgtattctgcacccccggccccacccatgctgagggaaggggagcagttgccaatatttgcaccatcttcacatgcacctgttgcaacaagagcttctgggaaggtaagtggcattggagctagatcacgtttcacaattagtggttgttcttttctgtgtttgtcttgcactttaaaaaagagagaacacatgcaaatgaacttgcttgtgtgtatttgatggctctaagggctataaattacaaacaaaacacatcccagacattaggagttcataagtgtatttaatgaaattggtggttttaggaagtcaactttagttttgctttgtttgcatgtccactaatttttttattttgatatttgtcttttttttaaattttacagtagtcatcgaaagttatgtttctttgcttacttcatttttttctctaatcaagactggaacaaaagtataaatattatttatttcaggtagcatttttttcgtgtagttttttaatatatacttgaaggaaatgtttcaccttatttttggtctttgtttattcatttagaccctgcaagttgattctcattaattgtcagattccactaccctttcttcctcatagatagtaattaccaatgtaactaagtatttgtgttctgatatctgaggccagtaactattaatatctagttctcagagcatttggaaaggttatcttaaatggctacctaaattgaaatccttttcagaaaaaatataattgcaagtaggtaggactggcctaaattgtctaatgtaataaagtcagacaaaatgcatactttatagtttcaagattttcagtatataaaatctgtccattcccattaaaaagtggaagattttaaataatttctttacagatgttttatttaagcaggtagctcaatctactaatgttgtttgatctgtgtttgttatactggttgtaattaatttttttaattcatgaactagcagaaaatttattaaattaactattaactacattcaccttgtaaattactgtataaaacttgttgacaatgcactgactttagaaagatgttaatgtacataaatagagtgtaaataaaatagtgttgatgtaccg

SEQ ID NO: 970 - DNA, 3121 bp, Homo sapiens
taggactgatctccaggaccagcactcttctcccagcccttagggtcctgctcggccaaggccttccctgccatgcgacctgtcagtgtctggcagtggagcccctgggggctgctgctgtgcctgctgtgcagttcgtgcttggggtctccgtccccttccacgggccctgagaagaaggccgggagccaggggcttcggttccggctggctggcttccccaggaagccctacgagggccgcgtggagatacagcgagctggtgaatggggcaccatctgcgatgatgacttcacgctgcaggctgcccacatcctctgccgggagctgggcttcacagaggccacaggctggacccacagtgccaaatatggccctggaacaggccgcatctggctggacaacttgagctgcagtgggaccgagcagagtgtgactgaatgtgcctcccggggctgggggaacagtgactgtacgcacgatgaggatgctggggtcatctgcaaagaccagcgcctccctggcttctcggactccaatgtcattgaggtagagcatcacctgcaagtggaggaggtgcgaattcgacccgccgttgggtggggcagacgacccctgcccgtgacggaggggctggtggaagtcaggcttcctgacggctggtcgcaagtgtgcgacaaaggctggagcgcccacaacagccacgtggtctgcgggatgctgggcttccccagcgaaaagagggtcaacgcggccttctacaggctgctagcccaacggcagcaacactcctttggtctgcatggggtggcgtgcgtgggcacggaggcccacctctccctctgttccctggagttctatcgtgccaatgacaccgccaggtgccctggggggggccctgcagtggtgagctgtgtgccaggccctgtctacgcggcatccagtggccagaagaagcaacaacagtcgaagcctcagggggaggcccgtgtccgtctaaagggcggcgcccaccctggagagggccgggtagaagtcctgaaggccagcacatggggcacagtctgtgaccgcaagtgggacctgcatgcagccagcgtggtgtgtcgggagctgggcttcgggagtgctcgagaagctctgagtggcgctcgcatggggcagggcatgggtgctatccacctgagtgaagttcgctgctctggacaggagctctccctctggaagtgcccccacaagaacatcacagctgaggattgttcacatagccaggatgccggggtccggtgcaacctaccttacactggggcagagaccaggatccgactcagtgggggccgcagccaacatgaggggcgagtcgaggtgcaaatagggggacctgggccccttcgctggggcctcatctgtggggatgactgggggaccctggaggccatggtggcctgtaggcaactgggtctgggctacgccaaccacggcctgcaggagacctggtactgggactctgggaatataacagaggtggtgatgagtggagtgcgctgcacagggactgagctgtccctggatcagtgtgcccatcatggcacccacatcacctgcaagaggacagggacccgcttcactgctggagtcatctgttctgagactgcatcagatctgttgctgcactcagcactggtgcaggagaccgcctacatcgaagaccggcccctgcatatgttgtactgtgctgcggaagagaactgcctggccagctcagcccgctcagccaactggccctatggtcaccggcgtctgctccgattctcctcccagatccacaacctgggacgagctgacttcaggcccaaggctgggcgccactcctgggtgtggcacgagtgccatgggcattaccacagcatggacatcttcactcactatgatatcctcaccccaaatggcaccaaggtggctgagggccacaaagctagtttctgtctcgaagacactgagtgtcaggaggatgtctccaagcggtatgagtgtgccaactttggagagcaaggcatcactgtgggttgctgggatctctaccggcatgacattgactgtcagtggattgacatcacggatgtgaagccaggaaactacattctccaggttgtcatcaacccaaactttgaagtagcagagagtgactttaccaacaatgcaatgaaatgtaactgcaaatatgatggacatagaatctgggtgcacaactgccacattggtgatgccttcagtgaagaggccaacaggaggtttgaacgctaccctggccagaccagcaaccagattatctaagtgccactgccctctgcaaaccaccactggcccctaatggcaggggtctgaggctgccattacctcaggagcttaccaagaaacccatgtcagcaaccgcactcatcagaccatgcactatggatgtggaactgtcaagcagaagttttcaccctccttcagaggccagctgtcagtatctgtagccaagcatgggaatctttgctcccaggcccagcaccgagcagaacagaccagagcccaccacaccacaaagagcagcacctgactaactgcccacaaaagatggcagcagctcattttctttaataggaggtcaggatggtcagctccagtatctcccctaagtttagggggatacagctttacctctagccttttggtgggggaaaagatccagccctcccacctcattttttactataatatgttgctaggtataattttattttatataaaaagtgtttctgtgattcttcagagcccaggagtcagtgctggtggttggagggacctgcccccactggttcatttaaccctctgtctcggtgccctcagaacctcagccagaaaggcaaggaggaaatcagagcaggagcctcatactcttggtgatctattcattctgtgacctcaggggtcacatataaggtcagtgtttctcgtccccgccggatctgcactgccaactgggattgggttcgaacagcttcataaacatcttcagcattttgtaccatctgctccccaatggccaaaatcacatcaccaggccgcagaccagccc

SEQ ID NO: 971 - DNA, 7102 bp, Homo sapiens
ggggggtgggcgccagcgccccggcgaacggcaaagagggagccgctcccgctcggggggccgctggagtgcccagcgggaacccgaaagtttgtaagaggaagagagcgcgcggcgagcgagcgagcgggccgggggcagcggcagcggcgccggggaccatggtgctgccggcgcctcctccgcgggcgtgaaggcggcgctcctactccctccccggactccgcggtgtcccagaagcttttgttgacaattccagtttccgaacaaaacatttcggcaatggtgagggcttcgatcccttctctgatttgctgtcagccatgaacggatggatgtgatgcctgctagccaaaaggcttccctctgtgtgttgcagtcctgtggcattatgcatgccccctcccagtgaccccaggctttttatggctgtgagacacgttaaaatttcaggggtaagacgtgaccttttgaggtgactataactgaagattgctttacagaagccaaaaaaggtttttgagtcatgatgcaagaatctgggactgagacaaaaagtaacggttcagccatccagaatgggtcgggcggcagcaaccacttactagagtgcggcggtcttcgggaggggcggtccaacggagagacgccggccgtggacatcggggcagctgacctcgcccacgcccagcagcagcagcaacaggcacttcaggtggcaagacagctccttcttcagcagcaacagcagcagcaagttagtggattaaaatctcccaagaggaatgacaaacaaccagctcttcaggttcccgtgtcagtggctatgatgacacctcaagttatcactccccagcaaatgcagcagatcctccagcaacaagtgctgagccctcagcagctccaggttctcctccagcagcagcaggccctcatgcttcaacagcagcagcttcaagagttttataaaaaacaacaggaacagttgcagcttcaacttttacaacaacaacatgctggaaaacagcctaaagagcaacagcaggtggctacccagcagttggcttttcagcagcagcttttacagatgcagcagttacagcagcagcacctcctgtctttgcagcgccaaggccttctgacaattcagcccgggcagcctgcccttccccttcaacctcttgctcaaggcatgattccaacagaactgcagcagctctggaaagaagtgacaagtgctcatactgcagaagaaaccacaggcaacaatcacagcagtttggatctgaccacgacatgtgtctcctcctctgcaccttccaagacctccttaataatgaacccacatgcctctaccaatggacagctctcagtccacactcccaaaagggaaagtttgtcccatgaggagcacccccatagccatcctctctatggacatggtgtatgcaagtggccaggctgtgaagcagtgtgcgaagatttccaatcatttctaaaacatctcaacagtgagcatgcgctggacgatagaagtacagcccaatgtagagtacaaatgcaggttgtacagcagttagagctacagcttgcaaaagacaaagaacgcctgcaagccatgatgacccacctgcatgtgaagtctacagaacccaaagccgcccctcagcccttgaatctggtatcaagtgtcactctctccaagtccgcatcggaggcttctccacagagcttacctcatactccaacgaccccaaccgcccccctgactcccgtcacccaaggcccctctgtcatcacaaccaccagcatgcacacggtgggacccatccgcaggcggtactcagacaaatacaacgtgcccatttcgtcagcagatattgcgcagaaccaagaattttataagaacgcagaagttagaccaccatttacatatgcatctttaattaggcaggccattctcgaatctccagaaaagcagctaacactaaatgagatctataactggttcacacgaatgtttgcttacttccgacgcaacgcggccacgtggaagaatgcagtgcgtcataatcttagtcttcacaagtgttttgtgcgagtagaaaacgttaaaggggcagtatggacagtggatgaagtagaattccaaaaacgaaggccacaaaagatcagtggtaacccttcccttattaaaaacatgcagagcagccacgcctactgcacacctctcaatgcagctttacaggcttcaatggctgagaatagtatacctctatacactaccgcttccatgggaaatcccactctgggcaacttagccagcgcaatacgggaagagctgaacggggcaatggagcataccaacagcaacgagagtgacagcagtccaggcagatctcctatgcaagccgtgcatcctgtacacgtcaaagaagagcccctcgatccagaggaagctgaagggcccctgtccttagtgacaacagccaaccacagtccagattttgaccatgacagagattacgaagatgaaccagtaaacgaggacatggagtgactatcggggcgggccaaccccgagaatgaagattggaaaaaggaaaaaaaaaaaaacacgtcaaaagttagcagtgaaattgttctccatttgttgtacagtctggaggattttcactacgttttgacaactctgaaatgtgttaactcttagtgccatcaagaaccccatttgggagtatttttgatttttctactttttgttgaaaaaaggaatttgtactctgtgcattggatggacttgtttggtacttgggattttcctctcttaaccgtcaacatcagtgttgtaaatttgctaaactgattcacttttagcagcagactttgaactgcagtcctgccaacgttggacactgaggacgcccgacagagcttgtgcacctaagctgcagaccaagcctttgcccagaatttaaggattccaatggacgacctatttgcacagtactgcatgttgattatcactgcctttactccttttttttttttttttttttttttttttttgcttccagttgggatggggaaggcctttgtgtgtgtattggggggaggggttaaaaaataattatcccaaactttttaatgtattgctttttttttttttttttttccttctactataccattttaagttctgacctcaggcctccatttgggccgatggcctcttggaggcttaaagttttctgtaccttgtgatgaatgttaataggtgtttttattatacaaagctgaatgtcatttctcgtttgtagctttctgtcactcattccatcttccttcagacatcaccacgtttctctaaagtcagaaaacattccgttttggtctttttcaaaaaggtcccaaatgctgcactctacacatgaaggccctctcacacagacgtgacgtcctgccagaaagagaatgaatgacagaaaaaaaaaagagagacaaactctaggaacaatgccgattcattccacgcagcagtattgggggtggttcgggggaggggtgtttcggattttctttttttcttttcttttctttttttttttttgcagcaaccattaataaatgccaccacattctaccagcacaaggaaacataggcagcactgaaaaaaaaaaaaaagctcatattaattagactgacaatatggccttggaaggctctcccttgtggaaccaagttgccatgggccttgggtgctctgcgataacgggtgtgggttggttttgtttgcaaaatggccaaaaaaaaaaaccggcttccccgagcagctgccctgaaagtaggggtggcggcggcggcgctgagtttatacattagttcagacctacttggtggcattaaactgtttgaatgcaaattcgatttcagattgaacttgttaagggagttaacgagggctgagttcagcaaatgctaaagtgttaatttcaaatatgcaaatttggtactgcagtttgttatgcaatattatatcaccaacccagtatcacaaaaactcatagaagatatcatgtaggccctgggctttgggggggtcccaaacatggtatgcagaaatgtgatggttacaggtcagtacaacctcagtccttagaacccctccacacttcagctctgcacccactttcctgtcatttatttatataggactgtagttttttttagttcgagagcctttcgaagcttaatttatattctttctttgtaccttttttctaaaattaccaaagatattacacaaaggtaaattatgttctctgttttatgctttatctgatgaagccaaatatcctcttattgttgatcaaaggaggcaaaagaatttagaggcaaatgacaagcgataggctattgcaacctgagaaagagaactgctccttcatcgtaaatttagaagaccaagtagataatggaaccaaagttgttacttttttctagtagttatttttcctttttctttttgtgtacctctacagagaccaaaactcattctcttaaagagattttatggggctactgcagataaaaataggacacaatattaaaggagctacagaaggaagggagtcccatctcaaaaaaaaaatgaatgtatgccactgcaattagagtatccaataaaggagacagtttagagtcaggacagaaaagcttccataattgaactagattacataatagtatttctagaaaaagagatatttttagattgtatgccacttttgtttaagaactgtgctgtgatcactgtattaattttggtttatcttggcatatatccttcagtttgtttttatttttaatttttcctttttttccgattaggctttggtcagcatttttcatttaaagaaaagtaacactcccatccactcataagcttggtacaaaaacttctctggcagttacttttgaagcttcactctgctttctgtataaagggcagtctgtggtcacgcaagactttaaaaaaaaaaaaaaaaaaaaaaaaaaaaaaaaaaaaaaaaacttttccaggcagcttcatgatgtgcaggcagtagccagacagggtcatgggaagggggccctgtgcttctaaactgagtggttgctggttagtttggtattcaaaagaggataaaaatctggtagattagttcattctcagcatgtgtagctagacatgagtaaagataacagcatgagaaactgttagtacgcatacctcagttcaaacctttagggaatgattaaaatttaaaaaaaaaacatttcactcagttgcacttagtcgtatgtcttgcatgcttagtctaaagactgtagcaaaaaaaaaaaaaaaagaaaaattagattttacatatctttgcaggtatcacagccttgcagaagaaccaactgaaaaaaaaattctcaggctttacagcaagcaaacttcactatgatttttacaattctgattctgtatcccctgggggttatcccagttgcttctttaggatggggtttattacgttgtacatatatcccgatgtgtctgtgtgaatctttgtcttttttgggggagggcagagggcggttctttttttagatattgttcctaaaaaggaataaatgcatacacctgtttgtcaaaacacctttgctttttgtgcaactgctttatattaacgatactaaaaaaaaatagctttggaaaaaaaactactgtatgtaacggaattgcagaatatgctgcacatgtattttatttagttatccttgctttaagaatattggatgacatttcctgacatgtgggagggagaaactccctaactttttttttctgcttttaaactgtaacatagttgaagatttcttttttctgttctcattgattggagcattttgtacaggttttgtgtgtgtgtgtgtgtgtgtgtgcgcgcgtgcgtgtgtgttaatctgttttttgatacattcctatcccttgtgtttatcctaccactgccttcctggctatcttaaacaagttcatacatttgaaaagaaaaaaaaatgttgtttaaaaaatgttttctcctgctgcagtaaatattttgcatgatgaaattccagggtcacacttttccaagtttatcagtgaagtagtgattaacaatggggagtgtcaaaactattgaacttttgtataaaaaaaaaaaaactttacaaggtgccaagatgtaaagaaaatctgttactttttttttctcaaagaaaagcatacattagggaggtagtcccgtgtgtcagacaaatgcactgtcaggaatgaggatccaacctacctgtccctagagtccgtcttgtaagatgagttaggctgccccttggaccagccacaaaatggaatatcaaggcttatgtacatacgtgaagagttaccaccagtcctgccacctttggacagctctaacaccatccccagcatccagtcagacctagtaaagaaaaccttggattcttaacccaagataggctgtaaatcactagcttttttttcctcatgaaaaaaaatagagttaaaaaatatttcctctcttttccatattccagctgaactccgtttccaaaggcacaaagaagagtgtgcttattcagattttgaatctttttggtaccttttggttaatgacatagcctcctgaaattctggatgtcttcaaagtcagttttgcttctttatcctgaaaatcagatttacaatgctgaaggcatttcttgggcccagtgtagctcacgcaatctctgctacccataagccttgatgaagatgatacagtccggactgtgagcatggtgcttcatgtatatgtgctgccagtaacaagaatttttttgttttgttttgttttgttttgataaggcataaaagaaactcattccttgacatcaactgtaattccatcattccatgtctgcggatacagacaataaaaaaaatgttgtgtagtcagtactaattactgacattataagcattctcaaatgcaataaaaatgctggttgttcacgctggtaaaaaaaaaa

SEQ ID NO: 972 - DNA, 2824 bp, Homo sapiens
gaacttttttaaaaattaaatttttattttgagatcactgtttgtgttcagttgtaagaaacaagagagattctgtgtaccctttacccattcctccatgttgcaaaactagcacaatatcaccgccacggtagacgcagtgaggccataagacatttccgtcagcaaaagggtcacttcttgtgcccctttagaaccacacccacccctgccttccaactattaatgctggcaggacttagccagaccgcaagggcgcctactccgaacaaggaagagggtcaggcgctgggagggcgactgcaagcggacaggcagcacctgcgaccacggtacttggggacaccacaaaagtccgcagagcaggcaccgcggcacttccgcgagcgccgcaggccctgcccctttcgccgtcgccgaccaattgccgcccgaagaccgaaccgcttcagcggagggccggaagtgagccgcagcttttcctttctgccaccgccttgtccaagatggcggacctccaccgccagctgcaggagtacctggcgcaggggaaagctggcggcccggcggccgcggagccgctgctcgccgcggagaaggcggaggagcccggggaccggccggcggaggagtggctgggccgcgcgggcttgcgctggacgtgggcgcggagccctgcggagtcggcagcggccggcctgacgtgcctcccgagcgtgacgcgcgggcagcggctggcggcgggcggcgggtgcctgctgctggctgcactgtgtttcggcctagccgcgctctacgcaccggtgttgctgctgcgcgcgcgcaagttcgcgctgctctggtcactgggctcggcgctggcgttggcgggaagcgcgctgctgcggggcggcgcggcgtgcggacgcctgctgcgctgcgaagaagcgccgtcccggcccgcgctgctctacatggcagcgctgggcgccacgctgttcgccgcgctgggccttcgcagcacgctgctcacggtgctgggcgcgggcgcgcaggtggccgcgctgctggccgcgctggttgggctgctgccctggggcggcggcaccgcgctgcgcctcgcactgggtcgcctgggccgcggcgccggcctcgccaaggtgctgcccgtgtgaggacctcgcgccctcgccgctggggaagtacgcggagccagcgccgtcggagaccgcgccggccgagctgaggactgcacgccgctgtgcggaagcccgtggcgaaggccctgccctaacagcctgcgagtctaatccgggagcggctgctgccagcggaggcgacagcagcgttgggagctcctcgatgtcagctttttgtgctggacttggcacacgctctgaaaactgagattttgtcattgaactggtgacaggatgtgagacggttattagaagttgctttcgaagtaactgtggtcttaggttcggctgagtaaagaaaaaggatttttcttcgagttagctgctcttgtgatttttctcaggctgttttgtcattttaaaatccagtggtagatgtagcttagcgacggtagttttttgttttggctatactaagacttggaaattattctctccagtgtcagcgaatccagaagggtatcagattaaacaccgaattcagccactggacttttaaaagtacttaagatggtttatctcgggttttttcttcagttaacaaaatcataaatatggtgccttataacatgaaaggaaaattagttgtgtatttcacgacgaaagcgacggaccaaaagaaatttcctgccccaagaagcatgggatccaggaaggggcgcgtagatgcttaacggtctcttcggaaatcctgcaaatagaaagataattctagatccggaatacctgtatctggtggaaaccatggatttctacaagctcgaattattcctcattgtatagcctgctttgtaaactagtttacaatttgcaggctgatcttaagatttttttatatctaattgctgctgccttcattttaggttcagcagttacttttaactaccttaatttattgccagaaggtatgagcctaacattctgatgagtccagaaaactacgttttgtcagtagcaatacactaggaagtaaaatatatttagaatttaaacattgtgtgccagtggtcctcgcgcttgactgcacatcagttacttgaagagccacacctcagatcaatgcagtcagaacctgggaagtaggtcccagacatcaggacctttttaaagctccccaagtgattctacgttccccaagtttgaggaccacttttctgtgcattggcttgcacaatttgaaaataatgcttttcctgagctggatcccagtgttgccttaacagggtgtctgtcgtgccgcagtagagcactgctgcttcctccaaccccaaaatttatgttcctaagtaagtcaggtccctaagccccgtcccaagaagtgacacaagtggccaacatccacactgtaggcttgcaggctacccgccctgagatttggtaaagaacactgccttgttccccatcagtaaacaaggttacctacctcaggaggctgcttgtgagagagcaaatgcagtatcttcagaatgatttatttttttaattaattgtaaagacttgtgccattggctgctctttctagtcccctaaatttctgttctagttttaaatttctctagaacttgcaatagttgggggttttataatgatgttttacaatgtttatttcttaaataaaaacttaaaaattcaaaaaaaaaaaaaaa

SEQ ID NO: 973 - DNA, 2932 bp, Homo sapiens
ggagagacatgcgattggtgaccgagccgagcggaccgaaggcgcgcccgagatgcaggtgagcaagaggatgctggcggggggcgtgaggagcatgcccagccccctcctggcctgctggcagcccatcctcctgctggtgctgggctcagtgctgtcaggctcggccacgggctgcccgccccgctgcgagtgctccgcccaggaccgcgctgtgctgtgccaccgcaagcgctttgtggcagtccccgagggcatccccaccgagacgcgcctgctggacctaggcaagaaccgcatcaaaacgctcaaccaggacgagttcgccagcttcccgcacctggaggagctggagctcaacgagaacatcgtgagcgccgtggagcccggcgccttcaacaacctcttcaacctccggacgctgggtctccgcagcaaccgcctgaagctcatcccgctaggcgtcttcactggcctcagcaacctgaccaagctggacatcagcgagaacaagatcgttatcctactggactacatgtttcaggacctgtacaacctcaagtcactggaggttggcgacaatgacctcgtctacatctctcaccgcgccttcagcggcctcaacagcctggagcagctgacgctggagaaatgcaacctgacctccatccccaccgaggcgctgtcccacctgcacggcctcatcgtcctgaggctccggcacctcaacatcaatgccatccgggactactccttcaagaggctgtaccgactcaaggtcttggagatctcccactggccctacttggacaccatgacacccaactgcctctacggcctcaacctgacgtccctgtccatcacacactgcaatctgaccgctgtgccctacctggccgtccgccacctagtctatctccgcttcctcaacctctcctacaaccccatcagcaccattgagggctccatgttgcatgagctgctccggctgcaggagatccagctggtgggcgggcagctggccgtggtggagccctatgccttccgcggcctcaactacctgcgcgtgctcaatgtctctggcaaccagctgaccacactggaggaatcagtcttccactcggtgggcaacctggagacactcatcctggactccaacccgctggcctgcgactgtcggctcctgtgggtgttccggcgccgctggcggctcaacttcaaccggcagcagcccacgtgcgccacgcccgagtttgtccagggcaaggagttcaaggacttccctgatgtgctactgcccaactacttcacctgccgccgcgcccgcatccgggaccgcaaggcccagcaggtgtttgtggacgagggccacacggtgcagtttgtgtgccgggccgatggcgacccgccgcccgccatcctctggctctcaccccgaaagcacctggtctcagccaagagcaatgggcggctcacagtcttccctgatggcacgctggaggtgcgctacgcccaggtacaggacaacggcacgtacctgtgcatcgcggccaacgcgggcggcaacgactccatgcccgcccacctgcatgtgcgcagctactcgcccgactggccccatcagcccaacaagaccttcgctttcatctccaaccagccgggcgagggagaggccaacagcacccgcgccactgtgcctttccccttcgacatcaagaccctcatcatcgccaccaccatgggcttcatctctttcctgggcgtcgtcctcttctgcctggtgctgctgtttctctggagccggggcaagggcaacacaaagcacaacatcgagatcgagtatgtgccccgaaagtcggacgcaggcatcagctccgccgacgcgccccgcaagttcaacatgaagatgatatgaggccggggcggggggcagggacccccgggcggccgggcaggggaaggggcctggccgccacctgctcactctccagtccttcccacctcctccctacccttctacacacgttctctttctccctcccgcctccgtcccctgctgccccccgccagccctcaccacctgccctccttctaccaggacctcagaagcccagacctggggaccccacctacacaggggcattgacagactggagttgaaagccgacgaaccgacacgcggcagagtcaataattcaataaaaaagttacgaactttctctgtaacttgggtttcaataattatggatttttatgaaaacttgaaataataaaaagagaaaaaaactatttcctatagctagtcggaatgcaaacttttgacgtcctgattgctccagggccctcttccaactcagtttcttgtttttctcttcctcctcctcctcttcttcctcctttctcttctcttccccagtggggagggatcactcaggaaaacaggaaaggaggttccagccccacccacctgcccaccccgccccaggcaccatcaggagcaggctagggggcaggcctgggcccagctccgggctggctttttgcagggcgcaggtggaggggacaggtctgccgatgggggtgggagcctgtctgctgggctgccaggcggcaccactgcaaggggtgggagcctggcttgggtgtggctgagactctggacagaggctggggtcctcctgggggacagcacagtcagtggagagagccaggggctggaggtggggcccaccccagcctctggtcccagctctgctgctcacttgctgtgtggcctcaagcaggtcactggcctctctgggcctcagtctccacatctgtacaaatgggaacattaccccctgccctgcctacctcacagggctgttgtgaggaattgatgagatgatgtatgtgaaacactttgtaacctgtaaagcgctgtgcacacgtg

SEQ ID NO: 974 - DNA, 3574 bp, Homo sapiens
ggcggatataaggtcggtgtagacttggtcgttcaagtgaggcggggtccacactcggtggcccggtgactgggttatcgagtggagccagggcagcccagagatgctggggtcccgcgagcctaggttgggtttccagggctgggggctcggcggcggctcctgggcgccccctggcggccccgactcaaccgccacggctcccacaatgctcgcgtagccgggcttcggttcctgtggcggcgacggcggcggctccaagatggcgcaggcgatctttgaggccctggagggaatggacaatcagaccgttctggctgtccagtcattattggatggccaaggagcagtccctgatccgacaggccagagtgtcaatgcgccccctgctatccagccattggatgacgaggatgtatttctctgcgggaagtgtaagaagcaattcaactcgctgccagcgtttatgacccacaagcgggaacagtgccaggggaatgcccccgccctggccacagtctcactggccaccaacagcatctacccaccttcggcagcacccacagcggtccagcaggccccaactcctgccaatcgccagatctccacatacatcacagtgcccccgtccccactgatccagaccctggtgcaggggaacatcttggtgagcgatgatgtgctcatgtctgccatgtcagccttcacatccctggaccagcccatgccccagggccccccacctgtgcagagcagcctgaacatgcattccgtgcccagctacctcacccagcctccacctcctcctccacctcctccaccactgcccccaccgccaccacctcagcctccaccacctccaccccagagcctgggcccccctgggcgtcccaaccctggtgggaacggtgtggtggaggtgtacagtgctgctgcgcccctggctgggagtggaacggtggagatccaggcactggggatgcagccctacccacccctagaggtgccaaaccagtgtgtggagcctccagtatatcccacccccacagtgtacagccctggcaaacagggattcaaacccaaaggaccaaaccccgccgcccccatgaccagcgccaccgggggcacggtggccacctttgactctccagcaacgctgaagacccgacgagctaaagctgcagggaagccaaaggctcagaaactcaagtgctcatactgtgacaagtcattcaccaaaaactttgacctgcagcagcacatccgaagccacaccggtgagaagcccttccagtgcattgcatgtggccgtgcctttgcccagaagtctaatgttaagaaacacatgcagacccacaaggtgtggcctccaggacacagtggtggcaccgtgtctcgaaactctgtgaccgtacaggtcatggccctgaaccccagcaggcaggaggacgaggaaagcacagggttgggccagcccctgccgggtgcgccacagccccaggccttgtccacagctggtgaggaagagggggacaagccggagtccaagcaggtggtcctcatcgacagctcctacctgtgccaattctgccccagcaaattcagcacctacttccagctcaagtctcacatgacccagcataagaatgagcaggtgtacaagtgtgtggtcaaaagctgtgcccagacgttcccaaagctcgacacatttctggagcacatcaagagccaccaggaggagctgagctaccgctgccacctctgcggcaaggacttcccctcgctgtacgacctgggcgtgcaccagtactcccacagcctcctgccacagcacagccccaagaaggacaatgccgtctacaagtgtgtcaaatgtgtcaacaaatactccacccctgaggccctggagcaccacctgcagaccgccactcacaacttcccctgcccacactgccagaaggtgtttccttgtgaacgctacctgcggcgtcatctgcccacccacggcagcgggggcaggttcaagtgccaagtgtgcaagaagttcttccggcgggagcattatctcaaactgcatgctcacatccactcgggtgagaagccctacaaatgctcagtgtgcgagtctgcgttcaaccgcaaggacaaactgaagagacacatgttgatccacgagcccttcaagaaatacaaatgccctttctcgacgcacacaggctgcagtaaggagttcaaccggccggacaagctgaaggcccacatcctctcccactctggcatgaagctccacaaatgcgccctgtgcagcaagtccttcagccgccgtgcccacctcgccgagcatcagcgcgcccacacgggcaactacaagttccgctgtgctggctgcgccaagggcttttcccgccacaaatacctcaaagatcaccgctgtcgtctcggcccccaaaaggacaaggacctgcaaacccggcggcccccccagaggagggcagccccccgcagttgcggcagtggtgggcgcaaggtgctgacccccttgcctgacccgctggggctggaggagctgaaggacacaggggctgggctggtgcccgaggctgtccccggcaagccgcccttcgcagagccggacgcggtgctgtccatcgttgtgggtggtgcggtgggcgcggaaactgagctggtggtacctggacacgctgaggggctgggctccaacctggctctggcggagctgcaggctggggccgagggcccatgtgccatgctcgctgtgcccgtctacatccaggcctccgagtgacggacctgaggtgtctgtttcctgggcaggcctgatgctcctgtttgggtccagggcccctgggggcagaccggtgatccttaccagtggaagcgagccatcgagccattggcagaaatcctgctgaatgtcattcagaaacctcagcccatggtcgccctcctgtgcccctctcctgccggaaagccctgcaacattctagggttgggggcagggccatccacggtttctgggcagagccatggtggcaggagagagatggctgaagcctgagcagcccagagtcccgctggtctaggctggtggtcggggcccctgggagaggagacagggcattcctccccactctgtctccaggctgcctctgggtagcctctagtctgctgttcttcaggaggcctgccataaactcttcggagtttacgtgttgcaccttttcacagacggttccccacagcatcctcagacagctctgtgatgtagcttttaggaggcactcaggtgtcacggctagactgcagctatgagacagatctggcttcaaatccaagagttgccatgcacttgctgtgtgaccttgggcaagtcacttcacttctctgagccccgtgttcctcatctgtacaatggggcttacgatactactacctcatagggttgtcctggggatccagtatgatgaagtgcgccaggggcttggcatggtgcccggcacgcagaaagtgctcaataaatgtttttgtcataacgtgaaaaaaaaaaaaaaaa

SEQ ID NO: 975 - DNA, 5284 bp, Homo sapiens
ttttgggcttcgcttccaccgcaccagccggcctacccagtccttccggtatcgcgttgctcaggggcttttcaaccctctgtcagtcggaaaaccatcgccgaggccgtggggggactcctatccatggtgttgaagcgtcgagccgactagggaacctccttccccgccaggatggaagtcgcatcagtcgccgcctattgcgcgggctgttcttccctgtgttctgccgcccgctgccgcattcgctgccctctgtggcttttctgctggctcgaagatcggcctggagcagcgacgccaccgctgggcaaggccgagactctgtaggcttcctccgaatcccgtcgacctccagccgctgagcgccgcggccctacctgagagactgtcaagaaaaaggagatggagccggggacaggcggatcgcggaaacggcttggccctcgggcgggcttccggttctggccaccctttttccctcggcgatcgcaagcaggctcttctaagttcccgacgcctcttggcccggaaaactccgggaaccccacactgctttcctctgcccagcccgagactcgggtcagttactggacgaaactgctctcccagctccttgcgccgctccccggattgcttcagaaggtgctaatttggagccaacttttcggtggaatgtttccgaccagatggctagattttgctggagtctacagcgccctgagagccctgaagggacgggagaaaccagccgcccccacagcgcagaaatctttgagttcgctgcagctcgactcctcagacccctcggtcaccagtccccttgattggctagaggaggggatccactggcaatactcgcccccagacctaaaattggagcttaaggccaagggaagtgctttggaccctgcagcacaggcttttctcttagagcagcagctgtggggagtggagctgttgcccagtagccttcaatcccgtctgtactctaaccgggaacttggctcttcgccctctgggcctctaaacattcaacgcatagacaatttcagtgtggtatcctatttgctgaacccttcctacctggactgctttcctaggctagaagtcagctatcagaacagtgatggaaatagcgaggtagtcggcttccagacactaaccccagagagcagctgcctgagagaggaccattgtcatccccagccgctgagtgcagaactcattccggcctcgtggcagggatgtccacctctttctacggaaggcctaccagaaattcaccatcttcgcatgaaacggctggaattccttcaacaggctaacaaggggcaagatttacccacccctgaccaggataatggctaccacagcctggaggaggaacacagccttctccggatggatccaaaacactgcagagataacccaacacagtttgttcctgctgctggagacattcctggaaacacccaggaatccactgaagaaaaaatagaattattaactacagaggttccacttgctttggaagaagagagcccttctgagggctgtccatctagtgagatacctatggaaaaggagcctggagagggccgaataagtgtagttgattactcatacctagaaggtgaccttcccatttctgccagaccagcttgtagtaacaaactgatagattatattttgggaggtgcatccagtgacctggaaacaagttctgatccagaaggtgaggattgggatgaggaagctgaggatgatggttttgatagtgatagctcactgtcagactcagaccttgaacaagaccctgaagggcttcacctttggaactctttctgcagtgtagatccttataatccccagaactttacagcaacaattcagactgctgccagaattgttcctgaagagccttctgattcagagaaggatttgtctggcaagtctgatctagagaattcctcccagtctggaagccttcctgagacccctgagcatagttctggggaggaagatgactgggaatctagtgcagatgaagcagagagtctcaaactgtggaactcattctgtaattctgatgacccctacaaccctttaaattttaaggctccttttcaaacatcaggggaaaatgagaaaggctgtcgtgactcaaagaccccatctgagtccattgtggccatttctgagtgtcacaccttactttcttgtaaggtgcagctgttggggagccaagaaagtgaatgtccagactcggtacagcgtgacgttctttctggaggaagacacacacatgtcaaaagaaaaaaggtaaccttccttgaagaagttactgagtattatataagtggtgatgaggatcgcaaaggaccatgggaagaatttgcaagggatggatgcaggttccagaaacgaattcaagaaacagaagatgctattggatattgcttgacatttgaacacagagaaagaatgtttaatagactccagggaacatgcttcaaaggacttaatgttctcaagcaatgttgagttggcagcctgtagtcctagctagcatacactacctcttacctgagaggtgtcttttaaaaacaaatcttggcagctgtcctttgacatttttttttttagaggaaatgtaacttggatctagtttaatttttttttttgcaacatatcccactcagaaacattcaggtttgaagccagccctgataatgaaggatgaactagtgtgatttctaatcctcccttttttgatttagttggatgtgcttttaaatgtcctttgcctgcatgaggtggaaaggggacctttttgagttgtcattttgcactttcaaaacttattttcttggaaaacaatatttatagggcttaaagcccattttcatttctaatctaaattatgtgtgcctatctgaaaactttgggctctttcttgtttctttcccaaaattcagaagttaatgggcttttatgtttttctatattttttttatttcaatgatttggcctgtctatgttaggctaaaaaataaccttgtgtatgctaccaacttaaagtgcattattttgtgtcacttttttttttcttgtaaaaatgacttggattgaaaatatgtggtagcctttttatttctacattaagttctacctaggatatttccaaggactgccacaaaacccatatgtgcagtactttactactttgggaaagctgcatctttctaccacattttaacatctaatatatttaatttctttgaagagggttctgtgtacgttattgtagttcccagtttaatatagttctttgtatctcttaacaggttgaagttattgcaaaacactctggaaagtaataattacatcataatcatttattttttaaacttaaaagcctagaaatttcctagaaagaaaataggagacatctcagagcaatttggttttggtgtatatgttctcaacagaaaaccagtgttaatgaatatcatgcctcagcactgtcacttttaaaacctgtcaggatcccactgtaaaattggaaatgggcagttctgaattttcacgtttgaaatgtaaaatataaacttcagtcaatatccaggtttattgtgtcctactatttaataatgagagaagtaatggcaaggcctttactttcaggaaaggatagaagtatagattaatgactggaaagttttaatatatttagcccaaaggttactttgaattgaagtctttgcattgactgtttgtgtttggtttatttgtttagctttacaaggtacacataagttaggttgaggggttgttaacccttccgtggtctgctttcattccgtgtgcttcctgtcacaggtaatggaaaacataagtagaataggtgacctcttagttttgaacttatttaagtgtggggatgaatttttcatcagaagtgcttacagggttactacctcagtttacaatctacctggtcattattttatttctatccagttctaagaactgcctccactgtttatatattcataattaaacacattgagaatgcaacactataaaagctggtcaaatttttgcagagcccttattctgtgtgttttttgtttttttcttttttttttgagacagagtctcgttcggtcccccagcttggagtgcagtggcgcgatctcggctcactgcaacctccgcctcctgggttcacgcgattctcctgcctcagcctcccgagtagctgggattacaggcacacaccaccacgcccggctaattttttgtgtctttttagtagagacggggtttcgctatgttggccagactggtcttgaactgctgacctcgtgatccgcccgcctcggcctctcaaagtgctgggattctgtgtgttttgtgcacctccactttaggtaatcatagggagcacatttacaggatggtctaataacatgaaaacaggctagtttcaagcaacagcaatgtcggttggaaagcaggcgtcatttgccttgaaaaaagccttttgacaacatacaggcattcttttaaaaccaggctgaaacattttatttccgagacttaacgttgtgtttcctgtttcttaaacctagcacctctgtgtatttgaaaataatgagacatctttcattggattttggaaaattgttccccatgggattctaacctcactaccaaatgagtgaaagcttgattaagagttcttccatatactagcctccttggaagaagtgatcagaaggtgataagaaggacagaaaggactattttaaagttggactgaaggagaaaaaagcaaaattcttgtttcatcccaattctagttagaacaaagttaaacccccgtaatcttaaagagaaaatctttggaggttttaattaaacattttatacatttaaagtcttgttaatggtgctttaagtgtcaatgtagcatgtaaaaggctttgtacagacaggtaaaagttccatttctgagtgatgaaatgtaacacttcttcatctttaacttgaaatcaaaactatcagattttatttttgtataatttaaggaaggtaaagttaggggactagaagactctaaattggcttctacagatcaataatttaaatgtaactagttgggattttatagttaaaattatatttgtgtatataacataactaatctgtaaattgtaataaatatatttgcaattattaaatgttaagtgatattttggttcaaaaaaaaaaa

SEQ ID NO: 976 - DNA, 7238 bp, Homo sapiens
gcactccggccgggctctgctggctgcggcgggagctggacgcgggaggaggcggcggcggcgctggaacagtgaaccatggagctgtatttcggtgaatatcaacatgtgcagcaggaatatggggtccatctgagactcgcaagtgatgatacccaaaaatcaaggagttcccagaactccaaggcaggctcctacggtgtcagtattcgggtccagggaattgatggtcacccctatattgtcctgaataacacagaacggtgcctagcaggcacatcgttttctgaaaatgggccaccctttccacctccagtgataaataacctgcctctacattccagcaatggttctgtgccaaaggagaacagtgaagaacttcagcttccagaaaacccatacgcccagcctagcccaataagaaacctgaaacagcccctgctccatgagggcaagaatggagttctagatcgcaaagacgggtctgtgaagccatctcacctgctgaactttcagaggcatccagagcttttgcaaccctatgaccctgaaaagaatgagttgaatttacaaaatcaccagccttctgagagtaattggctaaaaacgttgacagaagaaggcatcaacaataagaagccttggacttgctttcccaaacctagcaattcccagcctaccagtccctccttggaagacccggccaaatctggtgtgacagctattcgtttatgcagctccgtggtcatagaggaccccaaaaagcagacctcagtgtgtgtaaacgttcagagctgcaccaaggagagggtgggagaggaggcccttttcactagcgggaggcccctgactgcccacagcccacatgcccaccctgaaaccaagaaaaccaggccagatgttcttcccttccggcgacaggattcagcgggacccgtcctggatggagctcggtcccggaggtcctcctcgtcatccacaactcccacgtcagccaactctttgtacaggtttttactggatgatcaggaatgtgccatccatgccgacaacgtcaatcgtcatgaaaacagaaggtatattcccttcctgccaggaactggacgggatattgatacaggatcaattcctggtgtggatcagttaattgaaaaatttgatcaaaaacctgggcttcagagaagaggaaggtctgggaagcgaaacagaattaatacagatgacaggaaaagatccagaagcgtggatagcgcctttccttttggcctccaagggaactcggagtacctgattgaattcagtaggaacttgggcaagtcaagcgaacacctcctccggccttcccaggtgtgcccgcagcggccactgtctcaggagcgccgtgggaaacagagcgtgggccgcacctttgcaaagctgcagggagcagcgcacggggcttcatgtgcccactccaggcctccccagccgaacatagatgggaaagttctggaaaccgaaggtagtcaggaaagtacagtgatccgtgcgccctcccttggtgcacagagtaaaaaggaggaggaggtgaaaacagccaccgctacgctgatgttacagaaccgggcaacagcaacttcgcctgattctggtgccaagaaaatttccgtgaagacatttccttcggcctcaaatactcaggccacaccggatctcttaaagggccagcaagagctcactcagcaaaccaatgaggagacagctaagcagattctctacaattacctcaaagaaggaagcactgataatgacgatgctactaaaaggaaagtcaacttggtctttgagaaaatccagaccttaaagtctcgagcagctgggagcgcccaaggaaataaccaagcttgtaattccacatctgaagtcaaagatctattggaacagaaaagcaagttgaccatagaagtggctgaacttcagagacagcttcaactggaagtcaagaatcaacagaacattaaagaagagagagagaggatgagagcaaacctagaagagctccgaagccaacacaacgaaaaggtggaggagaactccacattgcagcaacgactggaagaaagtgaaggggagctccggaagaatctggaggagctattccaggtgaagatggaacgggagcagcatcagactgagatcagggatctccaggaccagctctcagaaatgcacgatgaactggacagtgcaaagcgatcggaggacagggagaagggagctctgattgaggagctcttacaggcaaaacaggatcttcaagatctgctgattgccaaagaggagcaagaagacctcttgagaaagcgagagcgtgaactcaccgccctgaagggagccctgaaagaagaggtttccagccatgatcaggagatggacaagctgaaggagcaatatgatgctgagttgcaggccctgagggagagtgtggaagaagcaaccaagaatgtcgaggtcttggcgagcaggagcaacacttcagagcaagaccaggcggggactgaaatgcgcgtgaagcttctgcaggaggagaatgagaagctgcagggaagaagcgaagagctggagcggagagttgctcagcttcaaaggcagatcgaggacctgaaaggcgatgaagccaaggcgaaggaaacgctgaagaagtacgagggagaaatacgacagttagaggaggcccttgtgcacgccagaaaggaagaaaaagaagctgtgtcagccagaagggccctggagaatgaactggaggctgctcagggaaatctgagtcagactacccaggagcagaagcagttgtctgagaagctcaaagaggagagtgagcagaaggagcagctaagaaggttgaagaacgagatggagaatgagcggtggcacctgggcaaaaccattgagaaactgcagaaggagatggcagacattgttgaggcctcccgtacctcaaccctggagctccagaaccagctggatgagtataaggagaaaaaccgcagggagctcgcagaaatgcaaagacagttgaaggagaaaacgctggaggcagaaaagtcccgactgacagccatgaaaatgcaggatgagatgcgtctgatggaggaagagttacgggactaccagagagctcaggatgaagcactcacaaaaaggcagcttctggagcagacgctgaaggacctggagtatgagctggaagccaagagtcacctcaaagatgaccgcagcaggctggtcaagcagatggaggacaaggtgtctcaactggagatggaactggaagaagagagaaacaactcagatttgctgtctgagaggatcagtaggagcagggaacagatggagcagttgaggaatgagctacttcaggagagagctgcgagacaagacttggagtgcgacaagatttccctggagaggcagaacaaggacttaaagagccggattatccacctggaaggttcctacaggtccagcaaagaggggctggttgtgcagatggaggccaggatcgcggagctggaggaccgcctggagagtgaggagagggatcgggccaatcttcagctcagcaaccggcggctggagcggaaagtgaaggagctggtgatgcaggtggatgatgagcacctgtcattgactgatcagaaggaccagctgagcttgcgtttgaaagccatgaagcggcaggtggaggaggctgaggaggaaatcgacagactggaaagttctaaaaagaagctgcagagggagctggaggagcagatggacatgaatgagcatctgcaggggcagctcaactccatgaagaaggacttaagactgaagaagctgccgagtaaagtgctggatgacatggatgacgacgatgacctcagcacggatgggggaagcctctatgaggcgcctgtgagctacacattctccaaggacagcaccgtcgccagccagatctgagtgctctcccgggctgtggaagtacctgtcattcctgcaggagctgcagccacccaaagtgggaggcagggaggggagcatctgtctgccactgagaccaatcacagcctctttgcacagcatgccagctcctcagtgttacattcctcgccagggtctctcagtgggtcttcgacagagagcttttgcagtttaaaatgttgggatgcctgaggaccaggagccaccacccactggggtgttgtgagagatacactttggtaggctgaggcccctgttccacagccactatttgcattgctgtccctgccccctcatcactccccctgccaagacaaagggtccagaaggctaggacttacttaatagcactgtgcagggaggaaaccatgtatagcttgtacatattttaaaccagaccttctcacgaactgctgctgttgggtttggaatgtgatggaggcttggtagggtggctggtttgtaaagttcatgcatctatattgagtattctttttttttttttttgagatggagtttcattcttgttgccgaggctggagtgcaatggcgcaaccttggctcactgcaacctctgcctccctggttcaagtgattctcctgcctcatcctcccaagaagctgagattacagatgaccaccaccactcctggctaattttttgtatttagtagagacggggtttcaccatgttggtcaggctggtcttgaactcctgacctcaggtgatccacctgcctcagcctcccaaagtgctgagattacaggcatgagccaccacgcccagccattgagtattcttttttaaaatatgaagctattagattttaagtgttgaggagcagaggtgagaagagagagagagagagaaagtcaaataaagtcaaagaccagtttggaaaccaaagttggaaaagaagaattgtagtggtcatggacagctaagactgagcatagcagttcacatggtctgggtaaacaagtcactggcacaggggaaagccagaaggttgcttgtgtctgtgactgcagctatggccttgtttgcttagtttatctggaattctgttataatttctgaactgttctgagacctgttcccagtcactgattgcaatttcttttacacaggttgggtagggagagttgtaggtaaggccttaaacaaatgaggccgtttctggaaggatagggctgtgtggtcatgtcccacagcaagcttttgggatcgggggaataagagggtatgggggaaaggttcatagacttaggtgtgagaatgaggtgggaggtgtctggtaaggtcatgggggaagggagatgagagaggagataggcagatgtgggtatggggcccagtgtgagaaggaagacagagaagttcttgaaagctgggggatgtgtgggcaagaggtggattgagcaggatctcagggttatgtcgaggaagggaagaaagaaacagaagtcaggcagaggcgtgtctgtgcaaactggaggactccttccaacttcctggaacaaagcgacatcgccagcagcaggctggcagggagtggttgaggtctgggggccaggccacatggctggagaggaatttcagggagcatagcatcgggaggatgctacatatccagggactccctcctggccttcctgtgtcacttcacaatgtgacagtccccaggcatgcccacaggccaggcccagtcacagctgggcttccacaggtcagaatatgggacaggacatggtcagggagaggaccctgtgagttggtgacatatatgtggcagagatggtagtgttcagctgcttcagcagtgtccccaaccatcccaatagggtgggggcctgtgggccagaggactccatgacagtagccatggagtcccacctgtgccaggtcagagcccacccggcaggtttcagagtggtcagcccagtttaagggtgggagtctggagccagacagccaagccccttccacatctacagggtcactgtcatcctcaccacagccaggggtgattctcacctctgcctgcttatgtggggtgtggccgattcctccctttagtcattcattcatttagcacatatttattgggcatcggtgatgtgtcaggcacagtccttggcacacagaatacagcagtgaattaaacaggcaaaaattcctcccctcctggagctcagtgtcaggaaagggggtgataaatgacaatcaaatcgacatggaggttgagcacctctgtactcagccctctgtctgtccttctgaggacgcaacaagcctggttccctagagctcactttgaccctcaatatgttcataatttccctgctgcttctcccatcgttagacatctgccagtaagcctgctgagagaagcctcagcccactcatacctagagacgctgctggggaaggtcagcacacccaagaactttgggagtgtgtgtctgttttggtttgtgagaaagtagctgcccctcattctggccagttctttccagtagccatggggctggctacaagaagcaaaactgcccatgcaaagagaacacaggtcacttttcaaaacacttgcatcattaccctaaaaataggctgttatgcgttttgacaattgcgctatcctacactctgagggagttggcaacgcatgcggtatagtggagtgggaagagttgagactgaaagttaagagaagggttttcaagtcccggctcatctcaccccagtgactttgacagtgtgctcactctcagagccatggattacctggaacaaagtgcagattagtgcccacggtcctttccaggtataacatgctatcgttctttaattttattatatatacatacttttcttctgttttttgctttaagaactaaccccgatcaagagtattttctttagctagcttaaaaagaaaacatatattttatgtaaaaacacatacatggccaaatgcaatactgaagagacaatcatcctgtatcttttatggtttttcctgcttctgagtgtcgttctacaatgcccgttgacttattccattgcgtctctgctttagggtatggtttggtcgctttggttgtcatgagaaagagacattctccttgcagctacctccatgtgagtgaattcctggataaagcaagatttcctttcaataaacgctgtcacccaatgggaattttgactctaaaaaaaaaaaaaa

SEQ ID NO: 977 - DNA, 8665 bp, Homo sapiens
ccttcccctccccactcttctccttccctcccctcccctcccttcccctccggagcggctggggctgcggcgccgctgctgacacggatcggccgcggccgccaccgggcggaggctgcgcggcgcagacccagacgggcggccccggagggcgcgcggcgatggcggcggcgggcaggcggcgggcgcggcgggcgaggggtccgggctgagctgcgggccggcccggatggcgggcggcgcgggctggtcgggcgcccccgcggctctgctgcgctccgtgcgccgcctgcgcgaggtgttcgaggtgtgcggccgcgaccccgacggcttcctgcgcgtggagcgcgtcgcggcgctcggactgcgcttcggccagggcgaggaggtggaaaaacttgtgaaatatttggatcccaacgacctggggagaatcaacttcaaggacttttgccggggggtgttcgccatgaaagggtgcgaggagctgctgaaggatgtgctgtcggtggagagcgcggggacgctgccgtgcgcgccagagatcccagactgcgtggagcagggcagcgaggtcacaggccccacctttgctgatggcgagctcatccccagggaacccggcttttttcccgaggacgaggaggaggctatgacgctggcgccacctgagggcccccaggagttgtacacagacagccccatggagagcactcagagcctggaggggtctgtcgggagtcctgccgagaaggacgggggacttgggggcctgtttctgccagaagacaagtccctggtccacactccatccatgacgacctcagacctttctacacactccaccacctcgctcatcagcaatgaggagcagtttgaagactatggggagggtgacgatgtggactgtgcccccagcagcccttgccccgatgatgagaccaggaccaacgtctactcggacctggggtcttcggtgtcttccagtgcggggcagacgcctaggaaaatgcggcacgtgtacaacagcgaattgctagatgtttactgctctcaatgctgcaagaaaatcaacctgctcaatgacttggaagcccgactgaaaaacctgaaggccaacagccccaaccgaaagatctccagcacggcctttggacggcagctcatgcacagcagcaacttcagcagcagcaatggcagcaccgaagacctgttccgggacagcattgactcttgcgacaatgacatcacagagaaggtaagcttcctggaaaagaaggtgacagagctggagaatgacagcctgaccaatggggacctgaagagcaagctgaagcaagagaacacacagctggtgcacagggtgcatgagctggaggagatggtgaaggatcaggagaccacggccgagcaggctctggaggaggaggcgcggcgccaccgcgaggcctacggcaagctggagagggagaaggctaccgaggtggagctgctcaatgccagggtgcagcagttggaggaagaaaatacagagcttagaacaacagtgactcggctcaagtctcaaacagagaaactggatgaggagcggcagcgcatgtctgaccgtctggaggacaccagcctgcggctcaaagatgagatggacctgtacaagcgcatgatggacaagctgcgacagaaccgccttgagttccagaaggagcgggaggcgacgcaggagctcatcgaggacttgcggaaggagctggagcacctgcagatgtacaagctggactgcgagcggccaggcaggggccgcagtgcctcctctggcctaggcgagttcaatgccagggcccgcgaggtggagctcgagcacgaggtcaagcggctcaagcaggagaattataagctgcgggatcagaacgacgacttgaatgggcagattttgagcctcagcctctacgaagcaaaaaacctctttgctgcccagactaaagcccagtctctggctgcggagatagacaccgcctcgcgcgatgagctaatggaagccctgaaggagcaggaggagatcaacttccggctgaggcagtacatggacaagattatcctcgccatcctggaccacaatccctccatcctcgagatcaaacactaaggcacggggctggctgcagagcagccttaggaccctgggaccaagggcagaccctgcccaaggatgcaggcctaagccgggcctcacactcacactgtaaatgtctctctggccaccatgcgttacgtgtacccgtgtatatgtggggaggctgtgcacacgagcgaggggtgagtggccgtggctgtgggcagcatccacacggttagccgtgcatgcactttgtggcccctttgcaaggggcagagggtactggaagtgggaggaggcaaggtctgctatcaggagttactgtaaaaacaagaactggaagctcgtgtttccggtactgggtaaaatgattctacctctggggataaggattcacattcgctctagtacgatgggctctttcaccccactcctagtccccttgggagtgggagcaaaattgtgatctttcctaggagtttgaatgccccatatttgtgtcctcgccagctctttggccacctttcaagccccagtgttcaagctcagagaggatgaaggggcatctggagggtccatgagatggggccctcaccaaatgccttggccaccggccagcagccctctgtgatgtgtgtgcagagtgaacagaggactcaggtttcatagcagctagtgcggggcatcctcatcctgtacctatagagttcgtgcactcccccatccatgctacctacctccccgtttctgtttcagttttaagacaatgaagcagcattcactgcgtcattgtaacatgaagggataaaaatgaaggagaaggagggtttgggatgggtgtctaaggcaggagttgacatcgggcaaccaaagaaatgagttttggggaggaacacaactcccatcccagtcagtttccttcccatggctgcatcttaagatggatgcacggagaaaccgtctgcctggctccctgtcttcattctccacgcagcctggtgatggcaggcctgggtttggatttcagaatcctagctccgggctccactcgtgtggcagcaagactgcttcgttccagcgtttagaaacacacctgtatttgattctcagccaggggagcactcgctgcactggtgggaggcggttgggaaagttgcaggaaaaccttagtcttccatccttctgacccatggtggaaattcacaccatggatttttaatggatctttgttctaggcagctgggaatagacatggtacttaccttagagttttccaatttatctcaattttatatggcttgtgattcattttcttaatccaaatatatataaacgtgtgtggtcttattcttccccctgcagtttcttgctttcttcagcacatcttatagtatgagaaggaaggtttgggcatgttgggaagggcggtggagggggagttgcagaaagagagggcagtgagggtgaggagaggggatctggggacttgggtgtgacacctgcttgacagaggcagggctgtggccaggaccaaccttcaattccattccaatcagcctttgcatttgttggatctcgtggcttctttttaatcttttgttggggattagtttcatgctgcacataatggggttgcactggtctgacccaggactttggagccacccacactgggaagactaggctaggcagtcggtcttctaggagtttctcagccccttaggacgcgggtctccttgggctcccccaagggttctgcgaagaggcagtggaagaaggcatgaggagagggtctcttgagaatttgccaataggaaggagtggccacggctgaaaggaacaagacagatcctgacatagctttggcctgggtgttaggtcagaaggagtactggtgcgtgggggccttaccccagggttgagtattttatctgtaaaatgttatctgccctttggctgcattggaatttcagagaaggctgcagaggcctgggttacacagcctgagtcacaacgtgggaaggaatctctgccacgggaaaggtgggcggaagcagctggcagcctggggcgtgcttcaggctcctccctctaaggggcgccatgggaacaggctccggagggagccggcgtctgaaaggcccccgggacctgctgcagtgccagaggggcctctggagcaggcctggcttttaaatggggggctgaattccagctcacacacacctcaagtccaaccttactttcttcagccagaatacatttcttgtaaaacctggcttgttgcttggcttttaaagatggtgtatgtttgtaaaaatattcttctgggctcaaaagctagcttgagggggcagatgccccaggtgtcccagctccacagcccctggcagatcccagaccccttggtggcaggtcccagagcctaggtggtaggagcttgatctttgtttctgcccttacccctcagtagtggggctgcgaggtagtagacaggatgcccagttaagtttgaatttcagatagaaaataattttagaataaatatgttctatctaatacatgggacagatgttatttttagagataggatcttgctctgttgcccaggctggagtgtagtggtatgatcatagctcaccacaaccttgaactcccaggctcaagcgatcctcccgccttaactgcctgagtagctgggactacaggcatgcaccaccacgcccagctaatttttcttattttttgtagagacagggtctcactgtgttgcctcactcgagctgctgacctcaagtgatcctcccacctcagcctgccaaagcactgggattacaggcatgagccaccatgcctggccaggacatatttgaaatggggagattttaaaaattctgatgattagactgaatcctcagacgttctggtttgattgttgtgggtgtagcccaggcatgggattttttaaagagctgctcaggtaattccaatttaattgcgtgtcctacttgggttttttgtttgtttttattgtttttgctaaacctggcaaccctaccgagtagggattagcagtaacttatctgaaatttagaggtgttttgggggtggggcgagggtttctgtagtagactcagattttacatggccctgagctgcccttgcgttcagttggaagccacgcaaaatgaactgaaccaggagtgagcttcgtgtacattatctattagaaaatgaagtaccttctggttcagctagtccctgtgcgttgagaggctttaagaaacttctagtaaaaatgtttttttcttttagctttgaattggccagagtttatcctagattattttattttaaattggtagaattctttgcgaactgtcacagagaaattccttttcatgactttatttctgacctattaaaacatgaacaggccaggcatggtggctcacgcctgtaatcctagcacttgggaggcagtggcaggcggatcacttgagctcaggagtcctaaaccagcctgggcaacatagtgataccttgtctctaccaaaagttaaaaaaaaaaaaaaaaaagctcaagaacctgcacgagggcctaaaacagtgggctcagctttggctgtgcattggaatcacctggggagatttgtaagcttctgctgtctgggctgaacccccagaggttcggattgaattggtgtggggtgtggtccaggcatcgagatgtgtaaagacctccccaggtgatgatatgcagtccgaggttgagactgccctgtcctgcaaggtcgttggccagaggtagaggaaactggtcaaagtggctgttgggcttgtcaagcccgtggctgaatgacagtgagctctcttgctgggagggttccttttcctgttgttgaatggtcctggcctgcaggatgggaggccagatgccttcaggagctggtggatccagctgttctcaccagcctggaggttagcagaccagagtgggtgggcaggaccttggcctggtgcccctggaatcagtgggtggcatgtgttgggatatactggctacaggctcatctcaaagagcaggtagaacagagtcagcagggaactgacaggtggggctgtccccctgaaagcagccgcagaaacagctgccacctatttgcatagctgagcaggaggacatactgtctttgtgggttttgcttctggtctgtttcctgactgggttgataaagggagtcccagctcgttccctgttagccaaaccagcatcctactcacacaccggacactccaggtgctagtccactggtgctggtgttcaggggagttggggggggggggcgcggggacagaagcgcgggttcttggttccaatgagggacttagcagaagcctccaggggccagcagggccaggtgaaactgggagaaatgaagccctctgtgtcctgtgtgtgtggtggggtttaatgcattagcaaatttaaacttaaaaactaactctaggccgggcacggtggctcacacctgtaatcccagcactttgggaggccaaggcaggtggattgcctgagctcaggagttcgagaccagcctggacaacatggtgaaactcttgtctttatttttttaaaaaaacaaaaagtaactttcgatgtgatcataccaggaaagttttgcgtggtcaccatgccaagaaaatgactttggttgcccagcagatccacagcgactctttctcaagggctactgtggattctagattgaggaaaggggccacttaggactcagtgctggtatcctccacagtcctttctcccagactctggccctccctttgggacccaggaaatcccctctagggtgacgctgctggctaggaagactgaggtctgctgcgccaaggggcctcaagttagaagggccatgccgttcagtggatgactttgagcgctgatcctagggacctgccaggtcctcacttcctgccctgggtgcacacatgaatggggcagccagcaggaagcgggagaggctggaaccaggagcctgccctacctgcatggcaggacaactctgaggcccttctgccatattctctgctacccaccagagaaaataggctgccttctagaaagatttgtttctaaaagcgtagaccctggggaagtataatgtcaccatgctcaccaggcgaggtttcccatatgacctccctgccccgacctcgtaggttgctcctttccccatctgtaaggtagagatgtctgccccggagctaccagctggggatggcatccaggccatgtctcctgcaggatccaagtgctgttgtccccagggtgaccctgcctcctgctggggcccatccgctttgctgtgctgcacaggctgttttcatctgcatggtttggggtctttgtccttgtgccttttcttccccatcgccactgtacaggattttccacattgcccactgcctccttttctacatcgtctcatctccctggcctttcccgagccctgtaaatgtgtactttttcaacgtgcctcccccaggtgaggccagctctcccgggcacattcgtccacaaggatcaggccccacttacccttggctcgctcagcctgtagacttggtaactttgtacagaatctttcattattgtcttaagcatggggggctaggacccacttagtccctcctccagcctgcagctaatttaggagccttgcattccagaaaagggcaactttgtgtaaagcagcttctcccacagagctttccctgcattgttagtgatgtcgggcaaagcatcactctttaacctggggcattggccccagcagggatatcatgggaccgcagccgctccgtgcactgtctctgcccccagaggaagccctgtccatggttcctggtgcacggccacaggcctgccttgaggccaccacatctggtgtctagaacagctgcgggccccacttgggcagaaggaagaggtgctagctgctgcccctgcctgctgtgaacacctgcccagcccttccttgtctgctgaggtgctcagaccagagtgccattaaataccaactgatgtcacggagcggacggtgcattgccaaggactcacagctgtgggctcccttccagctcctcccactttcttggctgggtcttctgaggcctacgtggaatgaactacacatgtggcctcatgcccaagggtttgttagatggcctctgactctgtgggattcaacttgacttttttgccccaggaggctctgtctggaaacaggcttagctttagtgctggggtgggacctgccctgtgggccccagggaggggacagtgggggtgaggccctgaggctgtccagggtctgagctctttgcctccaacctgcttctgccccaaaaggaacaggctgttggtggcaggctcctcccggggagctgtactgtacagaccaaggtgtaaataaacagtttgctcttctcgcaaaaaaaaaaaaaaaaaaaaaaaaaaaaaaaaaaaaaaaa

SEQ ID NO: 978 - DNA, 2344 bp, Homo sapiens
acactactgggctccaagactgctcaaggtctcactgatagtcaaggcttgtgctcctttttttcagaagagtaagattaaagaaaaccactgtgaattaaaaagtgtgggtgccaacatgggacgggagtcccccctcactccatggatgacatagagggggcagaagattacagaattggcattgtcctgcgtggaagctgggccacccacagtggcgtgggaagcctctcagatgctggattctaatgggctcttgatcaccttggattgggctatttcattgttatcacaaaataaacaggatgctccaagtcatgttatggcagagaaccaaccagcttcacactggtcctctaaaccaatcctcacaacaggactgggagacaggtgttacctttcccactttacagagaatgaaacagagtggcaaagcctccgaaggaccctacacttcggacatcgcaaagcaggatctgagtcccggctcctctgtccaaacctacttgctaggctttctttcccatgtctactctatagctggaaaggtcgtggaggacacattttaggccaaccctctcggtttacaatccagagaggggagaccctcagaagccaagcgacatgtccacggctacgcggcgagtgtgtggcaacgtggaaggggagcccgagacgccctggtctctcccttctctcgcaggttcctttctccccgaacgcagcccgcaggggacgctggaggaggagctgagctggagttgccggggccccgggaccgggcgttccgggggcggtccccagcagccgcgcattccagagccagcagcgcgtcctggccgctcctgcgctctcccgcctcccggggctcggaggagccggggcacgttccaggagctgcctagggctgaggttccaggcctgggggtcgcttccagctgccagatcccgtgcagtcctggggaccctgagaagcaccgagccatccctgacccaggaactttccgcagactcgccgccatctgggagtgaagcaacatggatgcagtcagccaagtccccatggaagtcgtgcttcccaagcacatcctggatatctgggttattgtcctcatcatcctggccaccattgtcatcatgacctcgttgttgctgtgcccagccactgcagtaatcatctatcgcatgcggactcatccgatccttagtggggctgtttgagagcctcccaagagggccgggtgagggatgaggacaggcatcctatccccagcctcttcctgtcttcagaaaagcagcaggagggactttggggcatggacctgagttctggttttgattctgccacgagccagctgtgtgaatttggtcaagggacctaactctctgagttccaggttccttatctttcaaatggggatggtgatccctgccctttctacctcatagggatgtgagaaccacctgacttagtggatgtgaaagctgtttgtgatcagtaaagctaccacagatataagggtgttatgctgaatcctgagaagctttcaagaaccagagaacctgattgctgatgatggccttaaaggtggtgagggagatactgggggcagagcagactttgccagtgcccctcaggtcaaaccaagccaagagcaccctgtccccattccaaggggccagcagcactttggcccaaagtattttctttaaggtgccattccttcatgttttctcagtttggagggtgatgggtagagctttccagaaccttctccattccagaatctctgcccctgtgtaatctgaaggaaggctgtgccatctttgggcactgccaagggagttggggtgatgggcttctttctgcactggagtctcacatctgttagctttgacactcaagcaatgttggaaaatgcagggtgactgagttccctgcccagctttcgggatctctggcccccatccccttgtgtgtgtccctctgcccagctcctgctgtaattagctccacgtgtacccccttcactccctcccaccagctctgcagccagcctatggcaattatattttaagaggtgttcccaggacttttgggacctactaaaacaatgatggttattttagatgtgatgatttatatttatgtagagatatttctggaccactcaagctcttcgataccaaaatcaggagcatcttgggatttattaaattatgtaagaagatagcacagatatcgggatattattgtgtgaaaatgctgcttttactttgatgtgatctcattgatgtacacaaccaagttccaataaagtgctagaatgtgcaaaaaaaaaaa

SEQ ID NO: 979 - DNA, 2773 bp, Homo sapiens
ggaggatgctgggaaggaggtaaaatggccaccggcggcggcgcggaggaagagaggaaacgggggcggccgcagcttctgccccccgcgcggcccgcggcccggggcgaggaggccgacggcggccgcgagaagatgggctgggcccaggtggtgaagaatctagccgagaagaagggcgaattccgcgagccgcggccgccgcggcgggaggaggaaagcggcggcggtggagggagcgccgggctcggcggccccgcgggcctggcggcgccggacctcggcgacttcccaccggctggccgcggggatccgaagggccgtcggagagatccggccggcgaggcggtggacccccgcaaaaagaagggcgctgcggaggcgggcaggaggaagaaggccgaggcggcggcggccgccatggcgaccccggccaggcccggcgaggccgaggacgcggccgagcggcccctccaggatgagccggcggcggcggcaggcccgggcaagggtcgcttcctcgtccgcatctgtttccagggagacgagggcgcctgcccgacccgggacttcgtggtaggagcgcttatcctgcgctccatcggcatggacccgagcgacatctacgcggtcatccagatcccgggcagccgcgaattcgacgtgagcttccgctcagcggagaagctggccctgttcctacgcgtctacgaggagaagcgggagcaggaggactgctgggagaactttgtggtgctggggcggagcaagtccagcttgaagacgctcttcatcctcttccggaacgagacggtggacgtggaggacattgtgacttggctcaagcgccactgcgacgtgctggccgtgccggtgaaagtgaccgacaggtttgggatctggaccggggagtacaaatgcgagatcgagctgcgccagggggagggcggggtcaggcacttgccaggggccttcttcctgggggccgagaggggctacagctggtacaaggggcagcccaagacatgctttaaatgtggttcccggacccacatgagcggcagctgcacgcaggacaggtgcttcaggtgcggggaggaggggcacctgagcccttactgccggaagggcatcgtgtgcaacctctgtggcaagcgaggacacgcctttgcccagtgtcccaaagcagtgcacaattccgtggcagctcagctaaccggcgtggccgggcactaaacacccgcctgcctgccagggtgaacacacagccagcttatccctcttaagtgccaaaacttttttttaaaccattttttatcgtttttgaaggagatctttttaaaacctacaagagacatctctctatgccttcttaaaccgagtttactccatttcagcctgttctgaattggtgactctgtcaccaataacgactgcggagaactgtagcgtgcagatgtgttgcccctcccttttaaaattttattttcgtttttctattgggtatttgttttgtttcttgtactttttctctctctccttgcccccctcccgccctccccgccccataccttttcttcccctggattttcaccctttgggctgccttgctcatctttatgccccagcactaggtacggggcccaacacgtggtaggcactccatcagtgtttgctgaattgaaaacattgttgactgtggcttctatcagagtgtctaccttttgcagctcttcccctccctcatttaatttgctgcttttaatctacgtggtctgagaatttgtgaaaccagtgttgttagaagtgtatataatctgaatcaataagctctgaatggtggccaagggcctctcttatggcacaaagatgcatggacttcatgacagctcttttggtggctcagaagccattttttatagaatcatggaatctagaatattcctgctggaaagaacctgagagttggtttggaccaattccctggttttccagcagatgaaacaggcccaaagaggttaaatgactgggtgaaaatcacatagctgtctggtgccagagccagcctatagtagagtcccctgaccccaagcccggtgctcattccactacctctcacacttcacaacaatttcctcaacacttgagggcccagaaagtctgatctctccagaatgatcagcccagaggaatgctgagaaatcacctggaggagggagcagaaagagaaggtttttaaggaggggcttctgaatacttgggagatacggaacggaccaaggaccacactccagggtgcattcgttgctccctggggcaccacttctggattacagtgtgccaggtcctttggaggccctaccccttccccattcattgccaccagtgagaaatgggggtgcccctgtgtaaagaaacctaccaaaggtttacatttgcaccttagcctcaatagctacgaaccctagagaagcagctagctggagctcatgtgcaactcctgattctcaggagaaagatggattttaacccaaaattatgagtgagctgttaactctaaaatgtacttgggagataggccaagcgagaggtcatgggccaactaagtgttatccagtagaaaagacagtacactgcttttcttttagtgtttgcttttcctttgctatatgttttgctatttccttgtggcttagaatgtaaaattgattgttaaaagttttgttctgaataaatatttatcttttgtattgctaaaaaaaaaaaaaaaaaa

SEQ ID NO: 980 - DNA, 8716 bp, Homo sapiens
gccaatgggcgcgcggggaggcgcgggccgcggcggcgggctgggggctcggcgctcccgggcgtcagtcgggccgcggcgacggcggcaggagcgcgtcccggcgccgcctcgggctccgctcggctcgggggctgcttcgggaggaggagagccaagggaggcgccaggcccgcgggccgggcgcatggcttagggacgctcccggccgccgcagccccagcatggggaaacttcactccaagccggccgccgtgtgcaagcgcagggagagcccggaaggtgacagcttcgccgtgagcgctgcctgggctcggaagggcatcgaggagtggatcgggagacagcgctgcccgggcggtgtctcgggaccccgacagctgcggttggcgggcaccataggccgaagcacccgggagctcgtgggcgacgtgttgagagacacgctcagcgaggaagaggaggacgactttcggctggaagtggccctgcctcctgagaagactgacgggctgggcagcggagatgagaagaagatggagagagtgagcgaaccctgcccaggctccaagaagcagctgaagtttgaagagctccagtgcgacgtgtccatggaggaggacagccggcaggagtggaccttcaccctgtatgactttgacaacaacggcaaggtcacccgagaggacatcaccagcttgctgcacaccatctatgaggtggtggactcctctgtcaaccactccccaacatccagcaagatgctgcgggtaaagctcaccgtggcccccgatggcagccagagcaagaggagcgtccttgtcaatcaggctgacctgcagagcgcaaggccccgagcagagaccaagcccactgaggacctgcggagctgggagaagaagcagcgagccccgctcaggttccagggtgacagccgcctggagcagtctggctgctaccaccattgcgtagatgagaacatcgagaggagaaaccactacttagatctcgccgggatagaaaactacacgtcccaatttgggcctggctccccttccgtggcccagaagtcagaactgcccccccgcacctccaatcccactcgatctcgctcccatgagccggaagccatccacatcccacaccgaaagccccaaggcgtggacccggcctccttccacttccttgacaccccaatcgccaaggtctcagagctccagcaacggctccggggcacccaggacgggagcaagcactttgtgaggtcccccaaggcccagggcaagagtgtgggtgtgggccacgtggccagaggggcaagaaacaagccccctctgggacccgccatccctgcggtgtccccctccgcccacctggctgccagcccggccctcctcccctccctagcccccctcgggcacaagaagcacaagcaccgagccaaggagagccagcagggctgccggggcctgcaggcaccactggcctcaggtggccctgtcctggggcgggagcacctgcgggagctgcccgccttggtggtgtatgagagccaggccgggcagccggtccagagacatgagcaccaccaccaccatgaacatcaccaccattaccaccacttctaccagacatagagcccctccccagggccccaccctgccatatgaaggaccccacccccgacaccacaaggcattattattctattaattattgttattatgatgattattgttattaataattattgttactccactaatatttagctagcctacatgtagaagatctatggaaacacagaactaaacttttatttatatgttgtggggactgcataactagcccaggaaatgactctggttttgagtggcctgtaatgggcagaggctccctcggggctcgggatctgcagcatctatgtggatcagcccacacccttcccagagccagggagcccttagcctcaactctgccccaccccagcctcttccaggagagcacccttacttggcccggcttccagagaccctcgaaatctccgagaagataaacagctgctacctcttagtattattctgattttattttgcccttaactgattgttatatgctacaagggatttcagtggactgcagagtgcgaacgtcttgctgttgtgtttttatgtcccaacctagaaaccttagctgtcttttctggagttgtctttcatgcttttccagtgggatcaagcccttttccccaagagtcccatctcttctgccatgcacgacatgaaaatccacttctcttccttctccttcttctctctctactttacagtgatacacacacgtatttaaggactatccctgagaccatccttctcattttggaaactgctagggagggaaccaaccacttaaacaagcgtggttttccaagatccaggcaattgtgtgctgttggttgtggtggaggatgtggcacatatatacgtacctacacggttctctaacagagctttctgtatctatagatagatgccatctgtccatttctatgtatctttctataaatatacactctcaggtatcttttctggtgtgtataaatcagtggtttgcttccctggatgcttctggaacccagatgtgaccctgcttgtctccttttggggctggacggctctcagatgctttcatcagaggtccattctcgggttttggggtctgatggattttggagagaactgctggggtacagaaacttggtgggaaaaggggactgtggccagagttgggaccctggagcagcatcctctgcagagaaggattttgtctggccagagcctggagaaacctgaaaaagaaccagtcagctagccagggtctcagagaaaagcagattacacactcaaattgggtaatttgagcagagcttaataaaggcagtatttacaaagtgtgggctaagcctcccatgagagtgcagaaccctggggctagcagtgtggggcgctattcccacccctgggcctgagtggggaaggagttatctttagcagacagaggattgctggaggagtgagaggggcacctgaaggagctgtgacctttgcttaaaggatgcagccagtcatggggaccctccagggaaattaatatcctgacctgctttcctgccccccagccccctcaatccattggctgaggccgctggaagccaccgggccaagggagcttgttgatgtgggtcacacgggcatgttcccaggtcagagaggagagtggagagtgaatctagggagactcaagagggagaagtgactccagctaccttcctttctgccgttttgtctcccagctggcattctcttttccagagcctcgagtttgggtttaatgtagttagtaaggagttacttccaaaggtagtgggcttagttgtcaccgtattcttaattttattaatgactgatgtgcctgggattggattaatacattaatccttaggacagccccatgaggcagcttggtggcagctcaggaagcatgtctaaggctcagaagttcataactcccttgaggccgcacagagggcggagctggaattctggtctcccactcgatcccttcgccactggtgcagagcttaatcacggccatgggctgcccttgttttgggttgtgggtttctgttcagtgagaacgcaactcaatccaaagtgaatgaaaccaagttggaaggcagggagggaactggctttgagatgacagggtccaggatgtgaatgcagctgagactggttcttgtccctccctcttgtccctcggattgataacttgtactcaactacatgcttttgtcagggaaccctggctgctggccttctgggtcccctaaccataagaaaaaggaccttccgttagtgtaaagcccaaggcaggattctgcttggctgggcttcgatctggtacccatagctggaccaatcatgacatcccagatggggtcacgtggccaacctgccgcaagggggtggggtctgtaccggaagacaggaggggaggggtgcagatcggacaggaagtaatggcatcccaggccccgaattgctgcaaccctggaggccagcccggagttgagactactggttttagagcagttcctctgcctccctaagctccacacctgtcaggattctgttacttcttggtaactgggacttgcccaactttaaaaacattatttaaaaaaatagtaatgtgcacatgtaaaagattcaaatagtatatatacaaggtgtacagtaaaaagtaaacttccctccatcccaggcctgccagcatccctgatgccgactttctgggtgtggcctagggcccctcagtgtaatgtaggggttgtgagcacagactttggtgccagtttgctaggttcgaatcctgactccctctttgtagctctgtgcttcaattgaaatactgtgcctcagtttctcctttataaaggcagggatcatgagagtgcctgtcccttgtgagcactatgaaagtgttagctgttctttaccagaataaatgcatttctatatcttcccatatgcattttgttaatttttaaagtatttcaaacacaaagtttgaaacagaaaattgtgtaacattaactatgaacttaccacccagaatttacaaatgctgacattttgcaatatttatttcggatctatttttaagggggggaaccctgcagttactgcttaatcctcttcccaccccacccttttatttttacacaaggagcatagtgttcatacttatgctatttttttcagtaactgaatatatttggagatctccctccctaggtcatagagctctgcccccttctctctaacagctgctcagccttctgtgactagaggtgctgtcaccagcttgccccatcccctcctggtggtcataagggtcatctctcatcccaggctctggcgaacactgtgctgagagtccttgcatacagctctcccggtgcccacaggcaggaacacaggcgacagaaagtttccacgtggaactgcagagttcaagagcaagtgtgatttcaattttgatgagattgtacatgacctctaaaagaggttatactggccgggcacggtggctcacgcctgtaatctcaacactttgggagaccgaggtgggtggatcacctgaggtcaggagttcgagaccaacctgggcaacatggtgaaaccccgtttctactaaaaatacaaaaaattagctgggcatggtggtgcgtgcctgtaatctcagctactcgggaggccaaggcacgagaatcgcttgaacctgggaggcagagattgcagtgagctaagattgcaccactgtactccagcctgggcgacagagtgagactccatctcaaataaataaagaggttatactgaataatgaggaatcaaaggaagaagaagaaagagagaggaaggaaggttggaaggaaggaaggagggaaaattagaaggggaaaccatgattgctggtgaggttttgagcacattttcctgcaggctggtatgggtgagaggtttggtcttgtttgcaaatcttctgaaggccattccagaggagcagttgccactgccccatcccctgagctctgagcgtgggggttcccctggggagactcctggtgagaggatgccgatttctgctgatctgtcactgggtaccgaggactgggtgtgtttaaggcagacagccaggtgaggatcccagctactggggcctgctgtcatctcctgggagtacccgggggtcaggagcctaggggactcttgcacttcacatccagccatgctaattacactttttggcaaaggaaacagctaggagcagtttctttcactcctacagccccgttttctcagtgtttagacctcgaattattactgggctagagggaaggcagcctctgaagtgtggcaggaggaggggaagtctgcctgcatcttggtgtgtctgtcagatgccagcactaataacctggcttctgtgaggcctgtcagtgctctcaggaatgaaaggggacccctgagaggtgctcagtaccagcaggctgtgaatgctctctacccaccaccctcacctcctcgttaaagatggtgctacctgccacacagcagacatctggtcgctgcacacccgaaagaccccaaggcagtctgccccttgtccagccacacgccagcacccaccctcctggcccctgcctcggcctccccagaccagctgcacccagcccccaacacgcaccccttctccagatgtgtgcagggcctcattttgcagagcaaagacagatgtttcagccacacgctttattaacttctaaaacctgtgctcaggacactcttcaacagtcatgaaaagtttgatcacttgccacagtcaggacctttgtgtggggctctgatctgatgttcggtctcatcatctcccaaaccagcagtcgtttgtaccccaaccctctgctcaggggctcatacccccaaatgattttcctgatttatgtatttccctacaaagggctttctatacctagcatctgcctccagcatgagaagggggaataggtgagacccatttgccagtagcagacggggaccctggggagaaaatggcagagcctgttggagactccctgtctccagctgaccagccaatgggattcctcttccctccactgtctcccacaaagtagaagaatcctggtacatttagcccatgagcctggcacagatccctatctagacatgaggccctttagacatgactttggcattgaccagcctgttggcaatgggtcggggaggcagaggggatgctcacaccagtaattctcatcccctgaatgcttgggatcacctggggagagttcacaaaatactggtgcaggggtcccacctctgatgatgctgagtggtgggtctggggtgtggcccaggcatcatgatgtttcaggcccccaggtgacttcttaggcagcccagctaagcccctagagccttgcaatttcccccaaatgacctcagagggcccgatttgagggaaatgcctaacttcaggggccgtaagaatcccccagggagcatgtgaaatgcagataccaggcccacccccagagatgagctgaggtgggtcaggggtgaagtgcagggatcagtgtttttcacaagctccatacctccaggaaatggtgttgtggttgggcccgtagaaaacattctgagagtcctgttgcctgtgccttggtgcacgtggggtggaatcccagtggccctgccttgaggaggatgtgcattaacgtggtaggggagacagagacagctccacctgccccctgccccaccggggacctccaaaaacttcatggatgttagagcaagcagccatgctgcagcagaggatgaggctggcggatttagtaagagccctctgtgtttgggctgagttctttctctagttgccctgtcatctggcctctggataacccacctctcctccctcatcctaaaattacagatggcgaaagatggccacatttagtgagacccctaaggtcctccaactagggtgggtccacagtggcccctggtgcatggaccacacactctcttccctcctctggctcaggactacggtctgaaattagggagatatgaatgtctttcttgaaaacttctcttcccagtcttcccactttgcttgggggtccttggtcaaggccagctttggggactagggcttgttgcgactaccagctgtctcattttgctgtactgcaaactcaggcttggttccaagcttatgggggccctgtccttcccctagtagggtttgttttggggtcacatctggtcatacccttcagagagctcttccccagcctctacatcagggagagaggtaggtagggaggagcattcaaggattagaagaaggactaaagtacaacagccttggaggaactgccaggaactaagggcgagcactggagaaggcaacctgggaccccctgcgcttctgagcaggaagaccaagaccttcaggggccctaagcactgaaaacatcattcctcatccccaagccctggcatccccctgttcttctaaaataattcttttctaggtatttctgattgcaaaattctggatgggttcatccaagctgacctttgctgttttttcccttcccaacaaggcctcactttttggagccaccttagctggtgcctaggcagaggggcagtcagcagtggttatcaggatcctggctctatgggttgccttcctcctggtctgtaaagcccctgcaggcagggacttcttagatagctgcttccttagggcatggcatgtagtgggtggttaatgaatggaagagagggaatgagtgatcaagggagggaggagggagtggagtggagatttctcatcctttcctgttaatttatgacatcctcctgcctatgagtccttgactctggagttttacaaagcagtcacatttcaaataaaagtctgggaaagcaacacatcatcgccaacttttaattttgctaaataaggatattagaaaaagaatagaaaattgcagtcccttactgtttaaagaaaaaccaaaagaagttaaaaagaaaaaaaaaacaacctc

SEQ ID NO: 981 - DNA, 3594 bp, Homo sapiens
ctttcttctctctctgtttctctcttgtgtctttttgtccttatcttggtctctctgcttctatttctacctctctcagcgtgtgcgtctctctttccctgtatgtctctgtctttctccgagtctctcttcttctccccgcccccctcactcccctttctccgtccctctctgtctctgcgcctttctcgccctcactttctcccctcctgcctgctccgggcctgcccccaccgccgccggttcaggggaacgtgtgcggagcgattgtcctgggggacatttgatggattagagcgccgagcggttccattgctaggggaccacctgatctccagcctgcgtcccatataaagccggcagccggagtgctgagcgcagctcccgcgatcccctgtctgcgcgccgccgccgccaagcccgagcccgagccggggccgccgccaccggtgccggctccgagcggcctcccgcgctccagcccgctgggagctgtccagtgctgaaaacccgcgcggacacagccgatcgcgcccggccggccgcctccccgcaccgagccccgcgccggccgcgccatgccgcgctccttcctggtaaagaagatcaaaggggacggcttccagtgcagcggggtgccggcccccacctaccaccccttggagacagcctacgtgctgcctggcgcccgggggcctcccggggacaacgggtacgccccgcaccgcctgcccccgagcagctacgatgcggaccagaagccgggcctggagctggccccggccgagcccgcgtacccgccggcggcgccggaggagtacagcgaccccgaaagcccgcagtcgagcctgtcggcgcgctacttccgaggggaggcggcagtgaccgacagctactccatggacgccttcttcatctcggacgggcgctcgcggcggcggcggggcgggggcggcggggacgcggggggctcgggagacgcggggggcgccggggggcgcgcggggcgcgcgggggcgcaggcgggcggcgggcaccggcacgcgtgcgccgagtgcggcaagacctacgccacgtcgtcgaacctgagccgccacaagcagacgcaccgcagcctggacagccagctggcgcgcaaatgcccgacgtgcggcaaggcctacgtgtccatgcccgcgctcgccatgcacctgctcacgcacaacctgcgccacaagtgcggcgtctgcggcaaggccttctcgcggccctggctgctgcagggtcacatgcgctcgcacaccggcgaaaagccgttcggctgcgcgcactgcggcaaggccttcgccgaccgctccaacctgcgcgcgcacatgcagacgcactcggccttcaagcactaccgctgccgccagtgcgacaagagcttcgcgctcaagtcctacctccacaagcactgcgaggcggcctgcgccaaggcggccgagccacccccgccgacccccgccggcccggccagctgagccttccgcctcgccctcgcgcccggaactcgctctccacgcgccccgggccccctacctgcgcccgcagcgccctcgcccagccccggctgcgtttccctgcccatgaccctctcgtggggacccccggcccggcccggaacttttctccccaacccccaaacccacgactcacttccacaccgtcttccccagcgtcccccgacccacttcatcctttccggccatccctcggaccttgacccccctgtccgcgccttcaaggctcccaactcaggcaccaggtccgcacctctcccgcgccccagagccggaaatttctccctcccagaccccgcgctgctcttctaacttctagatcttttctctcgcttctcagctgaatctctctgaccattcctctactggagcccccaatgaaagccgcaaacctatacccttgacgcccatacctgcctcagtttccccatccacacctggacgcaggccctgccgccctgagaccacagtccaaccccagaccatccctctggcctctgctgaatctcccagagtgtgtccatctggggatctaatcttcacccttcttgaagtctccgatctgtccctgatcccatccatgctcaggccttaggtctggccattcacacacacacacacccccacaccccactcccacacacagttcctactgtcttcagtccatggggatctcatcacccactcccagccccagctccagctgccctcacctctctagcagctctcacccctctgagtctacctaacctggagggggcttgaggggcacttcagggccctgccccctaatgtaacccctctctcaccccggcacaacctgggcttccacagtctggagctgccctacccccagattctctgagcactttcccccatccccagggccacagatccccttccttacttgttggggggaggtctggagcacctcgccaatgcccttcccccatccggctgggtccttccagttatttatttgtgtatttatttatttatctatttattattctatttaatctcttggcctcacccagggaccgtctggcttccccagctggactgggaggtcaggaagccaggcaaggagagggacagcacaggccacagagggctgcccccaccacacacacccccgcgtctcgggagaaacccaccctcttcagagcctgcactcgctaaggaaggggactcgagaatgggggggcagcttgctgaccctcaactgggggggtgagggagcatcaggaggtccaggcgtggggcaggtccccaccttcctgaaccttcccctgccactccaggcggcccggagagaggagcctcttcgatttgtttcctgtttattcttcttcccgagggaccccaggttccagggaccgactgagccccggacccgctggggcctctggcctgctccccgggaggggcgctctctcccggccatgtctatgcaactctcccggacagaggggccgggctgccagccacccgcccgttggccgccactacctcctccgctgcgcttttgcatgcccgggcgaggaccgaagcacacacctccacgcgcacgggccctggccccctccgctttaagcacacgcctctgccccattgctctgcagccagcttgggggcaggagtcctggactctcagatcctcctctcccctcctcttagccacaaaagaggggggagactggaggcacccctgcagcaggggcacttccctagggctccagaggggtgaatgggcctttgctcagctccaggcccagcgggaagggaggctgcagggatggtgggagggagaggggtagcagaagcaattatggaggcgttgaccctgtaaatagcaacttctgacagcaataattttccatgcatgctaagccttttggccatattttgtatgagcgcttggcgctcctcctccgtcctatcccaactcacccccaaacccccatcccttccccacctccagcagtattacttgtaacgcaattcagggatattaaagggactttggccactcaaaaaaaaaaaaaaaaaa

SEQ ID NO: 982 - DNA, 3068 bp, Homo sapiens
aagacgcaccggggcgggcccgggcggcgcgcggcccctttaaggcttggcctacgtggcagccgctggagccgcagccgacgcggagcgaggccggccgccgggcacttcctgtggaggccgcagcgggtgcgggcgccgacgggcgagagccagcgagcgagcgagcgagccgagccgagcctcccgccgtcgccatgggccagaacgacctgatgggcacggccgaggacttcgccgaccagttcctccgtgtcacaaagcagtacctgccccacgtggcgcgcctctgtctgatcagcaccttcctggaggacggcatccgtatgtggttccagtggagcgagcagcgcgactacatcgacaccacctggaactgcggctacctgctggcctcgtccttcgtcttcctcaacttgctgggacagctgactggctgcgtcctggtgttgagcaggaacttcgtgcagtacgcctgcttcgggctctttggaatcatagctctgcagacgattgcctacagcattttatgggacttgaagtttttgatgaggaacctggccctgggaggaggcctgttgctgctcctagcagaatcccgttctgaagggaagagcatgtttgcgggcgtccccaccatgcgtgagagctcccccaaacagtacatgcagctcggaggcagggtcttgctggttctgatgttcatgaccctccttcactttgacgccagcttcttttctattgtccagaacatcgtgggcacagctctgatgattttagtggccattggttttaaaaccaagctggctgctttgactcttgttgtgtggctctttgccatcaacgtatatttcaacgccttctggaccattccagtctacaagcccatgcatgacttcctgaaatacgacttcttccagaccatgtcggtgattgggggcttgctcctggtggtggccctgggccctgggggtgtctccatggatgagaagaagaaggagtggtaacagtcacagatccctacctgcctggctaagacccgtggccgtcaaggactggttcggggtggattcaacaaaactgccagcttttatgtatcctcttcccttcccctcccttggtaaaggcacagatgttttgagaactttatttgcagagacacctgagaatcgatggctcagtctgctctggagccacagtctggcgtctgacccttcagtgcaggccagcctggcagctggaagcctcccccacgccgaggctttggagtgaacagcccgcttggctgtggcatctcagtcctatttttgagtttttttgtgggggtacaggagggggccttcaagctgtactgtgagcagacgcattggtattatcattcaaagcagtctccctcttatttgtaagtttacatttttagcggaaactactaaattattttgggtggttcagccaaacctcaaaacagttaatctccctggtttaaaatcacaccagtggctttgatgttgtttctgccccgcattgtattttataggaatagtgaaaacatttagggacacccaaagaatgatgcagtattaaaggggtggtagaagctgctgtttatgataaaagtcatcggtcagaaaatcagcttggattggtgccaagtgttttattgggtaacaccctgggagttttagtagcttgaggcaaggtggaggggcaagaagtccttggggaagctgctggtctgggtgctgctggcctccaagctggcagtgggaagggctagtgagaccacacaggggtagccccagcagcagcaccctgcaagccagcctggccagctgctcagaccagcttgcagagccgcagccgctgtgggcagggggtgtggcaggagctcccagcactggagacccacggactcaacccagttacctcacatggggccttttctgagcaaggtctcgaaagcgcaggccgccctggctgagcagcaccgccctttcccagctgcactcgccctgtggacagccccgacacaccactttcctgaggctgtcgctcactcagattgtccgtttgctatgccgaatgcagccaaaattcctttttacaatttgtgatgccttaccgatttgatcttaatcctgtatttaaagttttctaacactgccttatactgtgtttctctttttgggggagcttaactgcttgttgctccctgtcgtctgcaccatagtaaatgccacaagggtagtcgaacacctctctggcccctagacctatctggggacaggctggctcagcctgtctccagggctgctgcggcccagccccgagcctgcctccctcttggcctctcatccattggctctgcagggcaggggtgaggcaggtttctgctcataagtgcttttggaagtcacctacctttttaacacagccgaactagtcccaacgcgtttgcaaatattcccctggtagcctacttccttacccccgaatattggtaagatcgagcaatggcttcaggacatgggttctcttctcctgtgatcattcaagtgctcactgcatgaagactggcttgtctcagtgtttcaacctcaccagggctgtctcttggtccacacctcgctccctgttagtgccgtatgacagcccccatcaaatgaccttggccaagtcacggtttctctgtggtcaaggttggttggctgattggtggaaagtagggtggaccaaaggaggccacgtgagcagtcagcaccagttctgcaccagcagcgcctccgtcctagtgggtgttcctgtttctcctggccctgggtgggctagggcctgattcgggaagatgcctttgcagggaggggaggataagtgggatctaccaattgattctggcaaaacaatttctaagatttttttgctttatgtgggaaacagatctaaatctcattttatgctgtattttatatcttagttgtgtttgaaaacgttttgatttttggaaacacatcaaaataaataatggcgtttgttgtatgcagtgtgatcctaaaaaaaaaaaaaaaaaa

SEQ ID NO: 983 - DNA, 9098 bp, Homo sapiens
cgcggcgggcggtggcggcgaggcggcggcctagaagatggcggacggcgacagcggcagcgagcgcggcggcggcggtgggccgtgcgggttccagcccgcgtcccgcggcggcggcgagcaagagacgcaggagctggcctcgaagcggctggacatccagaacaagcgcttctacttagatgtgaagcagaacgccaagggccgcttcctcaagatcgccgaggtgggcgcgggcggttccaagagccgcctcacgctgtccatggcggtggccgccgagttccgcgactcgctgggcgacttcatagaacactacgcgcagctgggccctagcagccccgagcagctggcggctggcgccgaggagggcggcgggccgcggcgcgcgctcaagagcgaattcttggtgcgtgagaaccgcaagtactacctggacctcaaggagaaccagcgcggccgcttcctgcgcatccgccaaacggtcaaccgcggcggtggcggcttcggcgcgggccccgggccgggcggcttgcagagcggccagaccatcgcgctgcctgcgcagggcctcatcgagttccgcgacgcgctggcgaagctcatagacgactacggaggcgaggacgacgagctggcaggcggcccgggaggcggcgccgggggcccagggggcggcctgtatggagagctcccggagggcacctccatcaccgtggactccaagcgcttcttcttcgatgtgggctgcaacaaatacggggtgtttctgcgagtgagcgaggtgaagccgtcctaccgcaatgccatcaccgtacccttcaaagcctggggcaagttcggaggcgccttttgccggtatgcggatgagatgaaagaaatccaggaacgacagagggataagctttatgagcgacgtggtgggggcagcggcggcggcgaagagtcagagggtgaggaggtggatgaggattgaaacgggcagcttcccctacaggcctccacccaaccaccatccccttggctagagaattccctttcctgctcatccccagtgagctagtggagagggagcaagggaggccgcagagggaaaaaacaaaacgtaacacagttaagagaaataatcgtaagagaacagtgacggacaacttgagaaaagcagtcaagttccaaggaactgacagcaacctgcaaagaggaaaacagcatctcctcacctgcgtaaaattgtctcagcttctgttgtttctcaactgaggttcgtaaacccatcaggataatccctggagggaatagatccttgcacatccagggcaagaaacatgtccaagttacccagaccattgataacagttgcatttaggttgcacctgggtaatctggcataaaagatctctctaggcctcactgttgcggtgtctatcccttcacctccattgaaatcagcattttggatctaggtcttcatggaatccttgagaagagaggcctttacaattacccagttctgagggttcaggttcacgaaaagaaatgcaacttgggataatcatgaacaggttaaagataagatttcaagaagccatctaagaatacagaaccaaattggatccatttttttaaaaaaatggttttgcatggaacctggaccaaggcaaatgtcttttcttcgcagaattgttttccaggatgccagtggattcagatagcaatgcttggagtagaatccgttactaaaatagtttcaaagttgacaaaaaattttcaaagataaaagcagttttacattgggggttgctgaggtaggcacaagaaaaagtcaggcataaagcacaaggcagactgtttgagtggattggttgctgctcactaaagttgttcccctgatctctaaatatggaggtcattaccaagaaatgctttggtatgaatgagagccagatctccactgtgtgagccagtgaattatggctaattcggctgttacagccactggttggctggattttaaaccataaaacttgaagattacctacaaaagtaacagtgtggctataagcctgagctttaatggatatacatcctcacagaaaagttggaaataaccaaaactgaagtcttaatttaccttcagtttaatctgtggatttgttcaaatactaaagatcctcaggtccagaattccagcatcatttattcttttaaaatttttaagaacttgatccattgtatcagtacctcacaatcagagttggcaaatgatggatgagtgattcaagcagtgcacccggtggaagctgaaatccatctgtgaatggaactgaagtgaacgtgaatatgctgactatatcctggaagcatttttataccatcttgaaatttcaacaaactggcttttgccagttaatccagctgtctttcaagaataaaagttggggttttcaaggatcgcctcttctatattttaaatggattttcagtagaaatgatttttactaatcaagttaatcccaccccatcaaaaggtattcctagaaatgtcatagacctaggtaactttgaattgaatgggagctaacgttctttccaaagttttcaggtattctttgtgtgacaccttctcaaccaggaggcaagtaaccccgcctccacaatcttagtattttttttaaactgcatgcctgccccttatttgagctgcctttttaatttattgcatatcctttttattatcttattttggtattattcaatctatacaatctttttgtatttattgggaaatgagtaatatacaaaaaggttttcatgtatttgtggctgagagggcgggaaataattgtgtacataaaattaggcttttttaaaaaaatagattatgatgcagaatattgttgatcttagattaaaaagtggaagagccacaaacattggtgcccttttcagactatttctctactctcatcatccacagtagaatttttaaacagatttttttaaagcttttcttttaaatttttctccgttgcaaagaatgtttcctaaattgtatgggagcaatagtatttttgatgttttaatgacatccgtatacttgtactgtattttgtactacaaggcagctgtttttcaataatgtcctgctgtatttacctacgtgttttgagtgtctatttctttgctgcggagaacaaattcctaaatagttttagtaaaggagctgagaagctagcattaggtttgcagaaactatttaagtttcaactctgaggcagcaatgaaaatttaagttgcagctattagttgattgctgtaactttttcattttcaaaccatgtacaattcttgtatagaccaacttgttttcttgcttcagtggtggttctgttgctcagctgcagtgagccagttcaattttgcaaaggtgcagtacctctcctttttaaggggttggtttattcttttttctttttgtttggctgaattgcagtaactagccttgcctttctattctgtagaaatgacagggtcttcacaatccttcaccagtggctactaagctataattagctgaatagaaagaatgtggaagtggtctgaggcatatagagtatatgccaagaacactaccatatatggcatcagctttggttaccagagaaattttcttagtcattagaccatgtaacagtaatatatcatatgtaaatctttagatatcaatttgaaaatcctccaaaaaaaggagcaaagaatgcataagctatgtgttggcaaaagtaatttatattaaaattttgacctgcctatgtaagattaagtggtaatgtcatagtggtgggtttttaagtcttaaccaatctctaaggtttgtttctcctgcaagggatggttcatggcctctcttcccactgcaggaagattgcagaaggctgtggattaattgtagcatttcactgatcttcactccagtcactagggacaatagaaacctgcaaaacacagattcattcgtaaatattattaatagcttattaaaggaaatggtctttgttaattccagtcagataatggcattgtacagacatgggaaacaaccaatttttttgtttttcagttgttgctatgaatgattttgagcctttttttttaagcttggcaaacatcccagctaatcaaaatagtcatattcctgagaagtaggaaactaaaacttcttttcatataattgttagaaggtttgtttcccaaactaccatagttacaaaggtgaaaagccaaattttaggaacagaatcaaaagaataaaaatctgtgaagagatcctactactcttccttctatgttttggttttggtttctattgtccctatcatttcagcaagtggaacagcagcaagtttttcagtgcatatgctgcacaagaacaaaatataaatctgtatggcaccaaaaatcaaagtgaaaaccaaaccaaaaacccaaacaccctatgtaactatcggaggcatatacgtggtataaatgactgtagctgtgatacacacatggctacttgtcacatcactttccataattatttactgcaaaatgattgagaggcttttggtgcaggcagccgttaacctcctgcttcctttgttacctctggattactttgcagtaaattgcaggtcttttaagagatttaagcttcagttttctcaaaacaaaacaattatcctgtcttatctgaagatgcagggttgtgggcaaaagaggctggttataataatgccctcatattgagtggtctgtaaacggctgcacacttcaggcactgtagttgctgaagatgctttgttaaatgtgaccttgactggctttacaggggtgtagaatgtaatctacacaaggtgactttgcatctatcttgctcttgaggtggatgaaattgagaagctggagtgtgtaagccatgcacataagtattcttcactgtaaattttgttttcatttttaacccaattatggtactttatccaatgcacaactgatctctcagtagatattcatttgaaaatagtgtggccttgatcagtgagaaagggaaggagaaaagtgacttttttgcttatgtagaaatgactcatttgctgagagtttgtctttctgcagcactcttggtatatagtgatcggtctcctttttgattggggaaagttaatgtttttgaccctggagttaattcagttgagttatcttatatttttaggaagtatcagaattgctctgatgaataacaaagttgactgttttgatgtccaatctcaggttttagaatatagtggtgtaaagtcccactatttttaattcttaaaacaactttaatttcgtacaccctaaaagtcacatgcataaggcctgttcagagagcagagcctccatctttttgctccttttctactttgtacttcacttgaaaaaatatcaagtgactttacattgtatatttccattgtaaccctgacatttctcaaagataaagcactttttgatcatgaaatacatgaaatctttgtgtgatgtggatcatagtttctcaggctcccttagataattgcttatgaatattgttctaactctgtgtaagaagagtagaaatctttgctaatgttagaaggtttgtattattgatccagaatgcattttgctagtttccaatggatgggagagtaaataatgctgcattcacaatttaataagttactttcccttgagccttaaggtaactttttctttcctgtcaactacagcactgaagttatagtaagtgaatgagattatcagttttcagggttggttttagagtactgtaaatcaattagctgtcttcctaaagagttacaactcccattcagtatactggataatgggtgtgtgggtggggctggggagggcgggagatagtttgtagaaaagaaaaaagaaaaaaaaaaaaacacatttaccttaagaaaatacagacaaaaaagaataaagtatgtgtcatatgctccatttgagattccaaatgcggccgggcgtggtggctcacgcctgtaatcccagcactctgggaggctgaggtgggcgggtcagttcaggtcagcctggacaacatggtgaaaccccgtctctactaaaaatactaaaattagccgggcatggtggtgcatgcctgtagtcccagctacttgggaggctgaggcaggagaatggcatgaacccaggaagcggaggttgcagtgagccaagatcgcgccattgcactccagcctgggtaacagaacaagactccgtctcaaaaaataaataaataaattccaaatgtaaggtggaaatggcagattataacttcatttcccccatttttaacttagaaaaaacaaagtccttaattttcaagtattagccccccagaagtttcagcagatagctggactcttgaataatgatttcttttgatatgtctgactttgctatttaaagtctcctttcccagccctcagtcttaaaactcagttttattactgacggatttaacagactcttacttgaaaattgtccaattatcagtactgaaaattagatttggaaaatgaaaaaataataaaatcgcatcaagaaaacttattaccttagagattcccaattgatatctgtacccctgatccaagtaaggcctttatgaatgtattttatatttcctaaagaaatagggaatatgccatcagtgtaatcacctctattcacagtcatttaatttgaaaatctaactcatgtctcttgaattagacattccaattgggataggtagagtcatgttaaaacaatagaatagcaactgccatattggtagtttcactgctcaatatgatttctaataagagcagagctttattggaagctaaaactcatttttctccatagatgattctaacagtttaataaaaaagtataattatactttaagtgtcaacagattttgagtctagaagcaaatttcattttccttgtgttatatctaatatccattgacatgggtaagaaaactaattatgtctttttagtatgatgaaatgtgggcccagagtattggaaagaaagcaatagccctattcagtgtccactaggatggatattgcagaaggcatgagtttgtccttttttcccccttaccttaaataacacttcaatagctaactttttccaaaatatccatttaggccatctcttatttcttaaagccaaatatttcgtccccagtcttaactctgagttgcaagatcaggctggttggaagaatctttatatttagaaataggatggtgagtggtttgtttattctcttgtaaaattcctttttcagagacataactgcagggagagtcccaagagaactgaagaactggattatatcattaaacacatttgtgttgtaggaatttgggagtttcattttgaactgataagatattagacataaacccttgttccagcccacatgtgtcatccctgtgtacaaaagctctctggattctttttttttttttgagacggagtttcgctcttatcgtccaggctggagtgagtgtagtggcttgatctcagctcactgcaacctttgcctcccgggctcaagcgattctcctgcctcagcctcccaagtagctgggattacaagcatgtgccaccatgcccagctaattttttgtatttttagtagagacggggtttcaccatgttggccaggctggtctcgaactcctgacctcaagtgatctgcccgcctcagcttcccaaaatgctggaattacaggcatgagccatcacgcctagcctactctctgaatttctaaaagtcagtaggttgaccaaaaagtctagaaactggctttaagtcagtatgggacgtacttataaagagtccatggttttgcacgtttcggtagacaagtaaatctgagttatttttcaatgacttaccaatatttgaatagtaactaagatcgtcagtgtatctggacttctttttttgaagttctaaaacaattatagtagggatttattattttgggcctccatccagatgtttttccaagatcatttttaaaattcatttgtcttctgtttccagataacatactttccgttctataggaatcttcactgccaatcatagtatctaccagtggctttcttagactattcactccaaagctgggactgatgtcctgccagtagagaatctacagaaataatttgaatgaattaaaaccaaatcttgatagcaggagacagcttcctgatctagatgtacaattagagtttaggttggaaattactttaaaatgtgttttttggggatgtcttcaatctctgtgtaaatacccacatgcttatgcattgtaaaccaagtgtgtattcctgtgtatgaatttgtagaactgatttctgcttcaagagaagctgcacctttaattttataaggtcccctccacctgtaaccctataaatgtctgtaaataaaacactaaaatttgtagtgataggatcaatttgggaatatctgctgagagaccaaaaagttcatttttttaagtaccttggttaaagagtaaagattattcctcttattttttaaagaagaatgcactttaacaaacatagagctgcatgggcaattcaaacaaatctgtgaagtgcagtacccattcagaaatcacacttcctgaaaaccgttcaaaagcagagtccagacgggctgttgatctcactgcctgtaggttgaagctcagattctgatcaattttgagaggagcagggctgcttcaaaagagcaatgtgaatacagtcagaagcttcagactggtctgtaaaaatggcgggtcccgtatttaccactaactagcaaaactgacagaaaaactcacagagaaaaaatgtaagaatccttcctgctggtgtgcactccttacaatagacttttgcaaatggagttttacagtctatatttaaaaaaaattgtatgtttgtaacaaataaagtatgcagaaaagtgaatgacaaaaaaa

SEQ ID NO: 984 - DNA, 3213 bp, Homo sapiens
gcgctccggagggagagctggggctggaggttcctaccccctcggcggcccgcatctgcccccgcgcgcccgccctgagcccgccccgactgggcaggcgggggagcccctacttctctccccccgggcgggggagccggggggcagcgccggagcccggggggagctcagccccgccgaccggccggccagggcagggggcagctaggacggccccggtccaggtggaggccgcagagggcccagggcaagcagaggcagcaatggttggtcctgacggtggctgagcccccagcccctggaatatgcagcccgggggagccccagacagcggcaaggacgaggtggcggagtggggcgggaggcatggtctccacctaccgggtggccgtgctgggggcgcgaggtgtgggcaagagtgccatcgtgcgccagttcttgtacaacgagttcagcgaggtctgcgtccccaccaccgcccgccgcctttacctgcctgctgtcgtcatgaacggccacgtgcacgacctccagatcctcgactttccacccatcagcgccttccctgtcaatacgctccaggagtgggcagacacctgctgcaggggactccggagtgtccacgcctacatcctggtctacgacatctgctgctttgacagctttgagtacgtcaagaccatccgccagcagatcctggagacgagggtgatcggaacctcagagacgcccatcatcatcgtgggcaacaagcgggacctgcagcgcggacgcgtgatcccgcgctggaacgtgtcgcacctggtacgcaagacctggaagtgcggctacgtggaatgctcggccaagtacaactggcacatcctgctgctcttcagcgagctgctcaagagcgtcggctgcgcccgttgcaagcacgtgcacgctgccctgcgcttccagggcgcgctgcgccgcaaccgctgcgccatcatgtgacgcctgcgcgcccctcgggctgcaccggcactggccgagcggagggcggggccgtactgcggggctggggcggggagcgggcgggaaatggaactgtgacggtcccggcctgaggcccctgcagccacgcacctcccggtgagaagcagagcgcgagagggagccctccgtaactgcccagccctgccccttgcccccgtggcttcctgggacagccgccttcagtgctgtatttagtgcagtgcccggcccgacccgcgggggtgccacagccttttgggatgggggtgagcgtgcaatggaggctgggggtggcgaggtgccgccttggccgggcccccacgtgtcttctccagaatgtgtctgtctttgcctggtgtcttcctttcccgtgtccgcccaccccagcgtctgttggtacttacctgtctcacctaccctccagtcccctcccagctccgctcacagggctctcatttcgtccatccccttgtcgcagatcctggcagcttctttgtgaggccaggccttctgactgtcagcaccaccggcacagggcagagatgcgggtggcccaaggaccacgatcaaggggtccgggggaccgaggtcccagatcagtgaggggagaaggttgagctctccggcttccagggagacctccccgcccagcagcccccagagacacaacaacctaccttccagccttaactcgatggtccgtccctgccaggtgcccctcactcttcctgaccccaaagccagatcaccccctgggttaaaactttttttcttttttttttttggacagagtgtggaaagggagccccccaaaggatagcttctttttcatgatgccaggctccagtcctttattcccttctgcatactgcaatctgatctgtcagactggggaatgttgggttctggggtctggtcgtgggcaggatggtgcccagaagggggttaggttgtcccagtgaaaattctgttgccccgtctcaaccccatctgactaccccagactctgcctgcctcagatctcagactatcctgattaatctggggaagaacagagccagggaaagaatggtggggacccctgtacttgggggagacacacctgcatcttcctcctgccacagatggaggccctcaggatctgacaccctcttgtcccaacaccagtcagccctataccctaactcactccaccccattttctccggctgcctggccgggtttctacctctcgtcaccggagctgatcactgtcagttttgtaccgatttagaaataacaataataatgaagattctaggaatggcatgagggattgatgggggacttggagggagggacaagtggtgccctgtcccctgctcccctggccaaagaaagctgtccttgaggctgagccctcagccctggcctggtggggggacagcaaggtcccttgttataagaggggcagagaggacaactccgctttggccaacctagccaaggctgcagcatatagaccaggaaatcaggtagcccagactggtgatggagcagagtctgggggaagggtcgtgggtggggaatttatcaccaacatccattgtagggggaatctatgattctgcttccccagcggattcccactctgtccaccaagtggggggtagcacagcctcacagcaaccgccctgaccttgggcagtctagtgttcctgcattctagtccctgctgtgctgcaggactttgggcaagtgacctgccctctgtgagcctccctctgacacagaggaggtggctccccttccccacaccttagagtggctgggagggtaacaaagagggcctgcccctttagtctcctgcacccctgccccctggttcaccagagggagcggatgaaggatggcagcatctcacatgccccatcaccaactctgaggcacctggggtgggggggcggagcccaggcctctggctgctcccctgtgggagccattggaatgtatcccctgacaggcccccttccgcctccacctcaacccaggtcttggatttcaggtccctccacccccattctgagtctctgtccttctccttccacccgctcccagggtttcccaccacagggtctggaagtgtgtgtgacgcccattgagctgttacccgaagtcagattaaaaatcagggagtgttttccctcgtttctgtaaaaaaaaaaaaaaaaaaaa

SEQ ID NO: 985 - DNA, 2716 bp, Homo sapiens
gtgagggaattccgtgtgtgggaaccgtggggaggagctgccaggattcaggagtttcctgggtgaggcgtggccacaacggacactcctgctttgtactagaaggaagaagtatggagttaaagactgcagcgtgaactgaggagtcccggacaggccgcttgctgcagaggatccagtccagatcccaggagagcccctctgccccttcggacctcgtctcccatctacaaaacgtgaagattggcccagttagcgtgtctctacaaaaaggtgcatataccactgccccgctgcaggctgatctgagaaagcctctggcccagggcagataccgccatggccttcctgatgcacctgctggtctgcgtcttcggaatgggctcctgggtgaccatcaatgggctctgggtagagctgcccctgctggtgatggagctgcccgagggctggtacctgccctcctacctcacggtggtcatccagctggccaacatcgggcccctcctggtcaccctgctccatcacttccggcccagctgcctttccgaagtgcccatcatcttcaccctgctgggcgtgggaaccgtcacctgcatcatctttgccttcctctggaatatgacctcctgggtgctggacggccaccacagcatcgccttcttggtcctcaccttcttcctggccctggtggactgcacctcttcagtgaccttcctgccgttcatgagccggctgcccacctactacctcaccaccttctttgtgggtgaaggactcagcggcctcttgcccgccctggtggctcttgcccagggctccggtctcactacctgcgtcaatgtcactgagatatcagacagcgtaccaagccctgtacccacgagggagactgacatcgcacagggagttcccagagctttggtgtccgccctccccggaatggaagcacccttgtcccacctggagagccgctaccttcccgcccacttctcacccctggtcttcttcctcctcctatccatcatgatggcctgctgcctcgtggcgttctttgtcctccagcgtcaacccaggtgctgggaggcttccgtggaagacctcctcaatgaccaggtcaccctccactccatccggccgcgggaagagaatgacttgggccctgcaggcacggtggacagcagccagggccaggggtatctagaggagaaagcagccccctgctgcccggcgcacctggccttcatctataccctggtggccttcgtcaacgcgctcaccaacggcatgctgccctctgtgcagacctactcctgcctgtcctatgggccagttgcctaccacctggctgccaccctcagcattgtggccaaccctcttgcctcgttggtctccatgttcctgcctaacaggtctctgctgttcctgggggtcctctccgtgcttgggacctgctttgggggctacaacatggccatggcggtgatgagcccctgccccctcttgcagggccactggggtggggaagtcctcattgtggcctcgtgggtgcttttcagcggctgcctcagttacgtcaaggtgatgctgggcgtggtcctgcgcgacctcagccgcagcgccctcttgtggtgcggggcggcggtgcagctgggctcgctgctcggagcgctgctcatgttccctctggtcaacgtgctgcggctcttctcgtccgcggacttctgcaatctgcactgtccagcctaggcaggccgccgaccccgcccccatcgctcacggacggaactggggtccagagaggccaggtcacagagcaaggggcaggaacagagagacagagcctgagtaattgaatcatgaacgcaagtgcccactggggactgtggggaagatggcacctggaaatgcaaggtgcggctctatccccaactctgtgtcacactacctgtgacgaccagctcagatctcctttgctttgactctcaagagaggactgatttgcagcatctagctggaggcaggcccaagggtgttagaagggaaacagctgggacagccggctgtcccttcaggctgtgtgaccttgggaaagtcatttggcttctctgtgcctgtttcttcatgcatgcagtggggattccagtaagtaccaactacctcacaggcatggcacggaggcaaaaggaaaaagcagcccgcatcaagcaagccctcctgggccacctgctgatctgacagtccatcgtagtaacaagagtggcagtctgcacaacctagaagtggccagaagggttgagacacgcccctgccctctctcctttgcccctcagtctcacagaggggcttctacaagacaagcagataacgatagaatcttgggcatcttggctttcggattctcagtgtggagggacgtagtaccccacacaccccttcctgtcatccttcctggcccataaagcccactagttggagagtaagtaccctcctggaagccgggagagatgatttgctggtggggctggggaaggcccatccctgagcctctgaaagtgaactccccgaccaggttggggaccagacatgcagagcccctggaagtattctctcaaatggaggcaacagaggtgattgttattttgttttagtttctgtttttcatttttttaaataaaggcattccctgcttttaaaaaaaaaaaaaaaaaaaaaa

SEQ ID NO: 986 - DNA, 4842 bp, Homo sapiens
gctctcggtgaggctcgcgctcgagctgcggcgccggctcctgccgcctgggccccgggcccggcccctcccgcgccgcccgggcgatgagaagctgcttctgcgtgagacggagccgggacccgccgccgccgcagccaccgccgccgccgccccagcggggaacagaccagtccaccatgcctgaagtcaaagacctctcagaagccttgccagaaacgtcaatggatcccatcacgggagtcggggtggtggcttctcggaaccgagccccgacaggctatgacgtagttgcacagacagcagatggtgtggatgctgacctctggaaagacggcttatttaaatccaaggttaccagatacctgtgtttcacaagatcattttccaaagaaaatagtcatctggggaacgtgttagtagatatgaagctcattgacatcaaggacacactgcctgtgggcttcatcccaattcaggagacggtggacacacaggaagtggcttttaggaagaagaggctgtgcattaaatttattccacgggattcaacggaagctgcgatttgtgacattcggatcatgggccggaccaagcaggccccgcctcagtacacgtttattggggaactgaacagcatggggatctggtatcgaatgggcagagtaccaagaaatcatgactcatctcaacccacaacgccttcccagtcatcagctgcctccaccccagcccccaaccttcccaggcacatctccctaacacttcctgccaccttccgaggcaggaacagcacccggacggactacgagtaccagcactccaatttgtatgccatatcagcaatggatggtgtgccttttatgatttcagagaagttttcttgtgttccagaaagtatgcagccctttgatctcctgggaatcaccatcaaatctctagcagaaatcgaaaaagagtacgagtacagcttccgcacagagcagagcgcagccgccaggctcccgcccagccccaccaggtgtcagcagatcccgcagtcctgaggagccagcggccacctgcggggagaccaccgccgcccagactactgacggcaggggctgctgcccccgcctcctcctgccgcctccgccagccctccctcccacactgccccagcagggctggcccggagactgggcagctaagtgggcgcatcctgtcttcagctggcctgactgacaccccggcctccctggggacattgttcataaccatgactaatctgtgtgtgctgtagtgaccagcggctcctaacgtgtctgtgtgatgaccagttgtcctccaaaaacctcactcaccacggagtcaccctgagggccccgggcagttgccctggccgcccagtgacgcccaccggctccctccgctccctcctgtcacctaccagggcagaccccactaagccgttgagtctcttcctggaagaccctgagggccggcagctttgcctaggactctccagggtcgctgatcctccccggcccagggctgccaggaacaagttcctctctgcaggatctcacagcagccctgagaagacatgggaggaagaagccagtggccctggggtggaccctgccctttggacatcccatggacttgtcacccagtcgcctggaagtcggggagcagcacccctgcccccggtggaggggttgttgctttctggggaggaggacggttgacggccctgcttggatccaccaccaggacgctgtgctcggccatggcgcgcctcccccaagggctcatctgtgcaacaaccacatgccaacaatagctccaggtgcctcagccccgtgccctgacccggggaccacagggacaccctctgagacgtgctggccccaggaggatacaggcacacgggcacccagcccctctcagagccaggcgtgtcttgacggtatctgctgacgggaacaagtcattctgaaaggtccctctgacccaggtcaccaaatttgggccagaactggcacttccgagtgcccactggtgctggcgtcctcaaagtgccgggcgccaagttcagccccaggtgcgtttgcctaggcagtggtggctgccatccctcggggcccaggccctcacccgaagggctgcctcactctgtggtgtcaggcactgggctgtgtcctgattcctcagagtatggggacctgacatctttgggtccccaagagttggctcttggatgtggaggcttgatgctgcggttgggggctgcactacctgcgtccgtggaagcctctgcctcagcggggacggcctcctgctgcaggtcctgggcagcccacagtagtgctagctgaggcccagaggaacgggaggaaagggaggcagcgccggacggcgcagctggccaagaggcgggcggggccagaaatacctcatgcccctgcaccagcccctccgtctccaggccccaggcctctttgtggacccatcttcctcctctgccaccccgatcttcactcggatacctcttgatttctgtggataagggaagcggccacttctccctccctgagacccgaggatgcccctggtgggggtggccttctcaggactcctgggtggcacagcagcaggaccttgtcatgggactgatgctgagcagggagggggctgccaggctggctgccgatgctccgttcacataagccagtgtggttctggggacctgaggagccctgtggcacccacagggggcacctatgtctgccgtggctcctcgggtggtgccctgtgtgacaaagcccaacagcaagggtgactcctggcaggtgggggcagcaggagggcagagggcagagctctggccacttctgcccacttcattagggtttgtgaactttgtccttcacctcttttcgtgccctggttgtgagattgcctctaacaggtaatgccaggggcccttcactccgcccccatgactgggaagaggcctgtggcagcgccgctggaccctaggaggctcagaggcagtggtgtgggagccctgtctgcaaggacgcagaataagcagtgagggcggctgcaggagaggaaggggctcccacagcccccactgatgccgctgcaggcccctgtcgagctggggtcccagccaggtgcccccgcatgccctcctgcagttgctggatggatagggacaccaggaagaggacaaactgcatggactcaagcgagctggagccatcttctccatagcattacggacttagcataagagtaaatgactgtgaacgttgtagtaaacggcagcttaagataagtaagcagagacagtgttaaggacgagttggtgtctgtggtagcttttaggctgctcctaacccaccatttattgccttctgagaggtgggtgaggacaagcatgtgcctgtgtgtgtgtgtgtgtgtgtgtgtatatgtgtgtgtgtgcacgcacatgcgtgtgtataagcccacctgagtggggctcgtgcaggagaactgaggcatgaaactctggctcaaacctaggaattgagagcgtttctgtcttttgggagagtacttttctccacgagccctctggccactgtgggagggaaggacaagggttcccttggaaatgtgaagggtcttggcctcatccctcaggtccccccacagcacttcccactactgcttctgtccctgctggcagcctctgtccctccagaacggctaaccagagcacactgtccccaccgcctcccctttctctctggaaagttgaagtatctccaaaggccttggaaatggcacaaaggtgataaggagcaggtgctttgctgcagtctcccttgcaaatgtataattaaggcctttcttcccaccccaagtccaagaacaaatgccagccacgtcctccgccacttggagagatgagaacccagtggggtcacgtaaaggaattgcaggtcggtgagaggacaagagggactcccatgttctaagcacctgttcctggccaggctctaggccaggctctctaagcacatttctcctttcattccccctaaaaacagagtgacctggaagtagatgttctttgctccttgtcagagttgaagaggctgacttggcccactgctaagcggcagaggcagggccagccatcctgtcgcaagcccgtgctggggctgccctttctgtttccagtccagttacggacttcccggccgccactgggccctgccggtcaccaggccactgtgcagtgggcgcagagcatggtcaggagtggcctgcccgtactcctccacccagatgagggccctccagagcctgcaggcatctgtggggaatcccagcctgcaggttcttggagaagcaggtgaacctaaggatgaaagcaaaggagggccttgaggaagcagcccccaggcctggcagccacgcagcggctgagctcatgaacttggttcgcagcctgccttgcccctggaggccacgccaggcgctcacccctgagcccacagcccctgcttgggctgcctggcaccctcagggtggcccggcctcctcctgccactctgagcacatgtccgggggttgccaccagagacggctttgttctcccagctaaggccgtggagctgctgtgtgactgtgtcaggcctggacaaggaagacccttagggatgacgtccccgctgcatatttattcaaggtgactcttgtacttggcaagggaagtccactgtgtgattgtctgtattcttaatataatttgttaaataaacgtttgttttaacctctttcaaaaaaaaaaaaaaaaaa

SEQ ID NO: 987 - DNA, 4478 bp, Homo sapiens
gacgtcggcggttgccgtggagagacccgctcggtcccgaccgagagctggcgtcaggagccgcagggtcacagcgtgtctttgaagctgcctccgccgccaccatgagcggccgaagtcggggtcgaaagtcctcccgcgccaaaaaccggggcaaaggccgcgccaaagcccgagtccgccctgctccggacgacgccccgcgcgacccggacccttcacagtaccagagtctcggggaagacacccaggcggcacaggtgcaggctggcgcggggtggggtggcctggaagccgctgcgtccgcgcagctcctccggctcggggaggaggccgcctgccggctccccctggactgtggcctcgcgctgcgggcccgagctgcgggggaccacgggcaggccgcggccaggcccggcccggggaaggccgcatctctctcggagcgcctggccgcagacactgtcttcgtgggaacagcgggaaccgtgggaaggccgaaaaatgccccccgcgttggaaaccggcgtggccctgccgggaagaaggccccagaaacctgtagcaccgcggggagggggcctcaggtcatagctggtgggaggcagaagaaaggggcggcaggggagaatacctcggtgtcagctggggaggaaaagaaggaagagagggatgcagggtcggggcccccagcgacggaaggcagcatggatacgctggagaacgtgcagctgaagctggagaacatgaacgcccaggcggacagggcctaccttcggctctccaggaagtttgggcagttgcgactgcagcacttggagcgcaggaaccacctcatccaaaatatcccgggcttctgggggcaagcatttcagaaccatccccagctagcatcctttctgaatagccaagagaaagaggtactgagctacttaaacagcttggaagtggaagagctcggccttgccagattgggctacaaaatcaagttctacttcgatcgcaacccgtatttccaaaataaggtgctcatcaaggaatatgggtgtggtccttctggccaggtggtgtctcgttctactccaatccagtggctcccagggcatgatctccagtccctaagccagggaaacccagaaaacaaccgtagtttctttgggtggttttcaaaccacagctccattgagtctgacaagattgtggagataatcaacgaagaattgtggcccaatcccttgcagttctaccttttgagtgaaggggctcgtgtagagaaaggaaaggaaaaagaaggcaggcaaggtccaggaaagcagccaatggagactactcagcctggggtgagccaatccaactgatcctgcacaagtctccctgctacctcctgctgggctgctcctggttgactacatatttggctctctgccttctcttcatgttggcctctgtgtactatagaccctttggactttagttacaagaatatggcatttatgatcatgttcttttgcctcccatagcctcttgcttttctacgttagtgtcacatgttatgtgatcgcacccggactgttcatatgttaagcacacatactttagatgtgtgctccctgttatctacattgcctggaccttgttcttggctctggcctttcctacttgtctttaacatggacactcatgagtcatcctccaggacgaccagtgcatcctcaagctctgctccttcagggccagtgacttgctgggcttcgtgttcatgctggccatgcatgtcatctatgcaagcgtttccattgccactgcagaatgaagccagtgcacatggtattagtcatcagccagaacttcctgttctgtgggtctggggtcaccagctgagatgtcacctgctttatttctggctttggcctgtggtctgtgatacccatcctgcttgatgttctgcagaatggcacttgactgctgggcatgcatgaagttaagggcaagaaacagtatgccatgtgttctgtaccatcatgtgtctcttcttgcttctgggcccttctactggtgaactttcatcaagatctgcgccatgccgtgtcactatcaagccattaagttttgtctgggttgctgtcagccccagttggcttcctggtcaacaaggacctcaagaactgcctgtggaccgaggccccctaccagtgcatgagacacacacctaccctccccagctttccaggaaccctactggctgccagactgatgggcgggctggtatgtgtggacatgtgttcactgtcattatgctgtggctccaggtgagggtgaggactgggcctatatagaatccagataccattgtcaacttcccttattcccgtctaagatgtgagcagagtgccatagtaggggttctgggaagaggtatttctgatttgtgggcctctgcttgcttgacttcaggtcacttatacttcttattttgcttgcctgccttcatccctcatttcctccctctcattcttctttcctccctccctttcctggtagcctcctttcctccccttctgccttccccttccttctttccttattcttttttattttgtttaaatagtaccacagagaaaacaactgaaaaaccacatttttctacatacagctggggaggtagctgagaacttggcactgcgcacacatactaggttgaaagagagttgaggaaaccagaaggccaagtggatctgctggcaaaccctgaacctgtctcctgcgcttgctctacagttctgaagttgaaaatccttttcatgcctagcatctgcttgagttataaaccccaaggcagccatgtcatagactagtgtttactcttgttttgactttgttttaatgcttcctaagacccaagtgcctcctgctgtttcctcctttgtggtagcctctggccatctggacctcaatccccagctttcccactttcagcagtcctttgctctctttgcttctacctcaaatagccccaggagtgggctttagtctccaatatggagcatctcaagcttctcctgggggatggggattgggatgggcagaatctgttttggatctccgggttatttccagtgggtgtaaaagcagagctgggcctttccctctcttatccctgagggtgggtaagaaggactgtatctacacctgttcttccctaccttctcttttgttagggaggcctcattctaagttcctcaagagagtccttggcttaaagctgtagcaagggtgtgctaggtgggggatttggagcaaaaccgtcgagtaggcatgatactggtatggagtgggcctgcaaaatcagacagaaatggcttgagaagccgcagggggagcatgcctgtctctcagtgatagagtatgggagggacctccctagcttggaaaatgagaattgaaggggttatgaacaaataggatgcctagttgaggatgttcccaaagttttgtccaatcttatcattagtagattttataagccacagagacaaaccagaaacggaataatgttactttggatgctttatttttttgttctaggtgtggctttgtacatgcagaagaatgctatatgctgcacattttgcctttaaagtcttacgactttccccattttagtctaatgggaagatacagatgtgcaagtctgcttttttgttttttgttattatttttttttttttgctctgtgttatggacattttcagacatgcacagaagtggagaggatggtccttggaccccatgtgtccatcacctagctgcatcacttatcagctatggtcaacctggtttcatctgtatctctctcttttcacctgtattgtttattgaaaatccaagacactatgccaatgcaaccgtgactactttgggagattggtagtctcttttgatggtgatagtgatggggtgcactatcataatcacatcaggtctgctttttgcttttaatgttaactaatgaagttccagagatgggccttagaaatgtgttttaagaattaacaaggagtctcaaaaagaaatgagagggatgcttcctttcccttgcatctacaaaacaagagagagactgttctgttgtaaaactctttcaaaaattctgatatggtaaggtacttgagacccttcaccagaatgtcaatctttttttctgtgtaacatggaaacttgtgtgaccattagcattgttatcagcttgtactggtctcataactctggttttggaagaataatttggaaattgttgctgtgttctgtgaaaataacctccccaaaataattagtaactggttgttctacttggtaatttgacaccctgttaataacgcaattatttctgtgttcttaaacagtataaatagttgtaagtttgcatgcatgatggaaaaataaaaacctgtatctctgttataaaaaaaaaaaaaaaa

SEQ ID NO: 988 - DNA, 3684 bp, Homo sapiens
ccgcggacccaccccctcgcttccggcatcggctgtggggagtaccggctgcagtcggctgtgccgggagggtaggatggcgtctggccgatgcggtgatagcaccgaaagcagacggccgccaggcgctccccctaccccccgaagtttctccccagcggcgggggatgggggtaggcggttcctctgttctttctgcgttccccgcggcctcttaccacagagacgcgggcctccaccgtcctagccctcccgccctgttctctagtgcggactagagcgtctcctcgccatttcctgtcgccctggggccccgcggggaaaaagggggagtagcaggacagcggagggaagtcgcgagcttaggtggtgtgtagacgccggaagtgttgggaaggaggccggaagctaggggcggggccaggaagtgaggaggggcgggggtttatgaggagtccaagggagcattggggcagacttgtactcagagccacctgagggacttggcggtggcgcccagcactgtcccctcccctcgtagagacacggttgtcgtttgggagtagggaacactgtgttggggtgggttgtcggcaggacatctctctggctgctcttggggcgaggtgtggaggggcagggctgggggtggagccgggtcgccagggcgtcggtagggaagacccccgcccctcgcccccccaccgaacctctacactggctggctggacactaagatggctgccgttgccatgacacccaaccctgtgcagacccttcaggaggaggcggtgtgcgccatctgcctcgattacttcacggaccccgtgtccatcggctgcgggcacaacttctgccgagtttgtgtaacccagttgtggggtggggaggatgaggaggacagagatgagttagatcgggaggaggaggaggaggacggagaggaggaggaagtggaggctgtgggggctggcgcggggtgggacacccccatgcgggatgaagactacgagggtgacatggaggaggaggtcgaggaggaagaagagggtgtgttctggaccagtggcatgagcaggtccagctgggacaacatggactatgtgtgggaggaggaggacgaggaggaagacctggactactacttgggggacatggaggaggaggacctgaggggggaggatgaggaggacgaggaggaagtgctggaggaggttgaggaagaggatctagaccccgtcaccccactgcccccgcctccagcccctcggaggtgcttcacatgccctcagtgccgaaagagctttcctcggcggagcttccgccccaacctgcagctggccaatatggtccaggtgattcggcagatgcacccaacccctggtcgagggagccgcgtgaccgatcagggcatctgtcccaaacaccaagaagccctgaagctcttctgcgaggtagacgaagaggccatctgtgtggtgtgccgagaatccaggagccacaaacagcacagcgtggtgccattggaggaggtggtgcaggagtacaaggccaaactgcaggggcacgtggaaccactgaggaagcacctggaggcagtgcagaagatgaaagccaaggaggagaggcgagtgacagaactgaagagccagatgaagtcagagctggcagcggtggcctcggagtttgggcgactgacacggtttctggctgaagagcaggcagggctggaacggcgtctcagagagatgcatgaagcccagctggggcgtgcgggagccgcggctagtcgccttgcagaacaggccgcccagctcagccgcctgctggcagaggcccaggagcggagccagcaggggggtctccggctgctccaggacatcaaggagactttcaataggtgtgaagaggtacagctgcagcccccagaggtctggtcccctgacccgtgccaaccccatagccatgacttcctgacagatgccatcgtgaggaaaatgagccggatgttctgtcaggctgcgagagtggacctgacgctggaccctgacacggctcacccggccctgatgctgtcccctgaccgccggggggtccgcctggcagagcggcggcaggaggttgctgaccatcccaagcgcttctcggccgactgctgcgtactgggggcccagggcttccgctccggccggcactactgggaggtagaggtgggcgggcggcggggctgggcggtgggtgctgcccgtgaatcaacccatcataaggaaaaggtgggccctgggggttcctccgtgggcagcggggatgccagctcctcgcgccatcaccatcgccgccgccggctccacctgccccagcagcccctgctccagcgggaagtgtggtgcgtgggcaccaacggcaaacgctatcaggcccagagctccacagaacagacgctgctgagccccagtgagaaaccaaggcgctttggtgtgtacctggactatgaagctgggcgcctgggcttctacaacgcagagactctagcccacgtgcacaccttctcggctgccttcctgggcgagcgtgtctttcctttcttccgggtgctctccaagggcacccgcatcaagctctgcccttgattatcctgccacccgcaggggcccctctgtcagcacttggggggtgggtggtggagggtggcccgtaagtttgagggctcaaaggctcttcccactgcttgttactgtgttgcttcccactcccccttgaccccaggcccctgcttctccctctaggagcctaaagaaccctcctggcctccagctcagccttctctcacctactatgtctgtccaacaggtctgcatgggtccctgataatgagaacagctgcctggtcttctctcccagtctgcctagcccagccctgggactggaatttgagtaggggatgaggggaaattgtaatttcattccttaacttccttttccccacccctgctcttcaacctctttatcagttctgaggctggagggtttgggcaaggcaacatccccattccaattccattttctgatgcagattttagctgagggatttggaagccatttggggaggcaggctgggccaaagggtagagctgggtaataaatgtctattctcctggggaggagggattctaaactttccttccgtcctcaatttctacctccatagaccggccagaatttagcttcacttgagagagatctggaatggtcgccatgattgaaaccacgcaccattacatcatcattacattaattacatcaacataaattatttcttcccccttcccttttccagcactcaaccaaggagcaaagctcatcccaccccacacccctcccaggtctgctcactgccaggctcctctcccctttgttcagtggagctggcttttctcccagcccctttccatgcctttcactccatttggcaagctctgagggggagcctggggacgggtttgggtccccaggaggagagccttgggtataatctatttttctaggagcctcttgccttgtcacttgcagctttcgccctctgctttgatggctgaggtgaactcatgttctttgggaaaagggaaggcgtgctgtggaaataaaatgtttatttgcttctctaaaaaaaaaaaaaaaaaaaaa

SEQ ID NO: 989 - DNA, 5866 bp, Homo sapiens
aaaccaggcacaccattgatcaggctagaatgatgtggaccagtctcacagacaacagccaagcacagaggaaatattagctggcagagataacgaagagaaaacactcggtgacagatgcaccatctgtcagtttctgaggagcagttttcaagaaagctgaaaatgaattgaagaagagaggggttttgtttgaaaggtacagcacagcctaaggacaattttaaacaaaaaattgaggcaaaagaagcatgtgactggctccgtgctgccgggttcccgcaatacgctcagttatatgaggattcacaatttcccatcaacattgtggctgtcaagaatgatcatgattttcttgaaaaggaccttgtagaacctctttgcagacgactaaatacgttgaacaagtgtgcctcaatgaaacttgatgtgaacttccaaaggaaaaagggtgacgactccgatgaggaagatctttgtatcagcaacaaatggactttccaaagaaccagtcgcaggtggtctcgtgtggacgacctctacacgctgctccctcgaggagacagaaatgggtcaccgggaggcacggggatgaggaacacgaccagcagtgagagcgtcctcacagacctgagcgagcctgaggtctgctccattcacagcgaaagcagtggaggcagcgacagtcgcagccagccgggccagtgctgtacagacaacccggtcatgctggatgccccactcgtcagcagcagcctcccacagccccccagagatgtcctcaaccaccccttccaccccaagaatgagaagcccacgagggctagggccaaatcatttttgaaacgcatggaaacactccgagggaagggagcccacgggaggcataaggggtctgggcggacaggtggcctggtgatcagtgggcccatgttgcagcaggagccagagtcctttaaggctatgcagtgcatccaaataccaaatggagatctccagaattcgccgccacctgcctgcagaaaagggctcccatgctctggcaagtcgagtggcgagagcagcccgtcggagcacagcagcagcggggtgagcacgccctgcctgaaggaacgcaagtgccacgaggccaacaagcgcgggggcatgtacttggaggacctagatgtgctggcggggacagcactgccggatgcaggggaccaaagccgtatgcatgaatttcactcccaagagaatttggtggtgcatattcccaaggatcacaaaccaggaacattccccaaggcactttctattgaaagcctctctcccacagatagtagcaatggggttaattggaggaccggtagcatctccctgggcagagagcaggtccctggtgccagggagccccggctcatggcgtcctgccacagagccagccgagtcagtatctatgacaatgtccctggctcccatctgtatgccagcacaggagatcttttggacttggagaaagatgaccttttccctcacttggatgacattctgcagcatgtcaatgggctccaagaggtagtcgatgactggtccaaagatgtcttgcctgaactgcaaactcatgatacattggttggggaacctggcttatccacctttccatctcctaatcagatcaccttagattttgaaggtaactctgtctcagaaggtcggacgacacccagtgatgtggaaagagatgtaacatctcttaatgaatctgagcctcctggggtcagagacaggagggattctggtgtaggggcctctctgaccaggccaaacaggcgactccgatggaacagtttccagctgtcgcaccagccccggccggccccagcatcgccccacatcagcagccagacggccagccagctgagcctgctccagcgcttctcactgctccgcctcacggccatcatggagaagcactccatgtccaacaagcacggctggacatggtcagttccaaagttcatgaagaggatgaaagttcccgactacaaagacaaggctgtctttggcgttcctctcatagtccacgtccaaagaacgggacagcccctgcctcaaagtattcagcaagcactgagatatctacgcagcaactgcctcgatcaggtgggtctttttcgcaaatcaggagtgaagtctcgaatccatgcccttcgccaaatgaatgaaaacttccctgagaacgtcaactatgaagaccagtctgcttatgatgtggcggatatggtgaaacagttcttccgggacctccctgagcctcttttcaccaacaagctcagtgagacctttctccatatctatcagtatgtctccaaagagcagcggctgcaggccgtgcaggctgccatcctgctactggccgatgagaacagggaggtcctgcagacgctcttgtgtttcctgaacgacgtcgtcaacttggtggaagagaatcagatgacgcccatgaacctggcagtgtgtctggccccctccctctttcatcttaatttattgaagaaagaaagctctccacgagtcatacagaagaaatatgccactgggaagccagatcaaaaggacctcaacgagaatctggcagcagctcaggggctagcgcacatgatcatggaatgcgacagactttttgaggttccacacgagttggtggcccagtctcgtaactcgtatgtggaggctgagatccacgtgccaaccctggaagaattggggacacagctggaggagagtggggcaactttccacacttacctgaaccatctcatccagggcctccagaaagaagccaaggagaagttcaaaggatgggtcacgtgctccagcacggacaatacagatcttgctttcaaaaaggtgggcgacgggaacccgctgaagctgtggaaggcttctgtggaggtggaagcacccccctcagtggtcctgaaccgcgtgctgagagagcgccacctgtgggacgaggactttgtgcagtggaaggttgtggaaactctagacaggcaaacagagatctaccagtatgtgctgaacagcatggctccccatccttccagagactttgtggttctcaggacctggaaaactgatttgcccaaaggaatgtgtaccctggtgtccctctccgtggagcatgaggaagcccagctcctgggtggtgtgcgagcagtggtgatggactcgcagtacttgatagaaccgtgtggctctggcaagtcaagactgactcacatctgcaggatagacctgaaaggtcactccccagaatggtacagcaaaggctttggacatctgtgtgcagcagaagttgccaggattagaaactctttccagcccctcattgctgagggcccagaaactaaaatctgagttttgcccagtgtgacatcaaactcagggaagaggaagctaaagtgacgagtgtggcagagagtgtgcatgtgagaaagcgagagaaagaggaactgaaggacgcggttaatgcctaaaaatggaaacgttaagaagttggaatgttggagatgcaagaatttccaagaactttcttagccttcctggagatggctacatccctactaatataattttaaaatgagaactttatatatattacttaaaattaaatggactattccttgtgcattgcctaatttgctatttaaaggcttctaagaagcgtatacctaactgtaaataaatgtatgtatagcatatgtacatatgtgtgtatatctccatctttactgtatatatgtaaaataccaattttatatagaattgtgtgttttgaaaatgacggtgtctgactcagtgagtcccttcctcacacagttctttccaagtggctctgggccccatctctccactgtcctgtaagctgtgcagaacctgctgctaacaccaaggtgtgaacatgccctgatgcctaaccaaagatgagttaaccaaaggaaaataacattaaaggagacttatgtgttaacgctttgtttctgctattcaaaaactgagagtggagatctgggataaagcaaggaaataataattactcctccttaaagcaaatgggggggtgagaagtcattaccaaatttaaagctagatgaggagttgccactgggcccagtaagatggaatttcagtgagatatggaccaccggagtcagcgagagtgactgaaacagaagcgatacctctcgctcccatgcccatcactacagaccccaagtcaagatgaatatcatagcctttacttcttcacagccaaagggagcccctgtgttgtctcaagtttttataaatacatttcataatgttattaaatgtcattctatttgaccagtggcctatttggtcacagttaattggtgttttcttattgcactgaattcaactccagacaccatacaaagggagatgatggccattccgttcaaatcctagatcgttacagcttcagggaattcatattttgttatgtgtaggatactcttaaaatgtaattcattaaacttttacaatctgaaagacagggtttttaactaacatgagaccaaaactatgttctttgattagttttagatagtataatcgggtttattaattcttctgtgtttcttcactagccagtccaagctacctatgcatttgacccaaccttatttattattgtacagatgaagcgaattgactccctttagccaactgctaatggatcgaatgtgctttttattgtaattcaacagctatagagagaaagataacttattgtgtgtttgatttcagggagagagattttctttggtcatccataatagagattgataagatttagcaactggtgttggagaaaaaaagaaaagcaaatgagtgttttcaggtttttttgcattatatgcatttatgtaatgtttctgttatcagcaatgtgcaattattttattgagaggaataaaaaagctttctatgagtttggtatggtgcgaggaaaatcttacagtttgaattatgacctagaaatttttcattcccatatctacctaagaaggaagcagtaaatccataatttaccttttgggcaatgctttgtgagcaaaacaaagtcacttctgccataacatcttgaatttaaccatatatgccagattactttatatgcatcaacaagatcaccagtgaagtttaatctagctaaacactggtcctgctcctgagatgggatcctatgtgtttggaaaacgtgataggcacacgaggatgagtggctttgtatcgcccagagaggtgcttgtccagatttcacatgcacatgaattgcctggggatcttgtgaaactgcagactctgctccaagtaatctgggctgggcctgagattctgcatttctaaggagtctcagggatgcctatgctgctggcctaaaaccacactcagaaacgaggacctagaagatccctaaaacagaataagaacaaatgtgattgtatttctgattctccctctcttcgaattatctgacttttttgtttttgtgcacatagtaatcatatcaccgctgcataacaacacagtgcatctttttaaaacaaggaaaagggaaaaaaaggagaaaaaacgatgcatcaagcttgtttgtcaaataccacagtattttattcattgttatcttgccaatggaaataaagtatgatattgcatttaaatattatatttatacctcatgtatatttttacctcaattgttgatatcaatcatcaattgtaaataaataattgccaaggcaaataaatttatatatattaaatatttcctattttctataaaataaaa

SEQ ID NO: 990 - DNA, 3685 bp, Homo sapiens
gcccggagccgccgaagcgcctcggtgcgttgcaccgccggaggctgggcagctcgcagcgctgctcggcgctggaccccacccggcaggcgcaggccacccacacccggctctgtgcggctgccccccgcagcattgcacggccgaccctcgcccgcccactgccaccggccgcgggactggctgggactggctcggccgagggcactgctcctcggtgcattgctgctcgggcgccgcagcccgcagccgccagcctcccccggccgtgcccctcccccgtggagccggctgtccgtcggcgcccactgcccggcggcagcggcggagccaggcagccccgcggcggccgagcgcgctcgcgcatcgggccctctggccttctttacctagggcagcccgcgccccggtgcgagggagcggtccttaccgagacccgcccggcccggcggtgcgatgagcttcttcggcttcgggcagagcgtggaggtggaaatccttctgaacgatgcagagagtaggaagcgggccgagcacaagacggaggacgggaagaaggagaaatatttcctcttctacgacggggagacggtctccgggaaggtgagccttgccctcaagaaccccaacaagcggctggagcaccagggcatcaagatcgagttcatcgggcagatcgaactctactacgatcgcgggaaccaccatgagtttgtgtccctggtgaaggacctggcccggcctggagagatcacccagtcgcaggccttcgactttgagtttacccacgtggagaagccgtatgagtcctacacagggcagaatgtgaagctacgctatttccttcgtgctaccatcagccgccgcctcaatgatgttgtcaaagagatggacattgtagttcacacactcagcacatacccagagctgaactcttccatcaagatggaggttgggattgaggactgtctgcacattgaatttgagtacaataaatccaaataccacttgaaagatgtcattgtagggaagatatacttcctgctggtgagaatcaaaatcaagcacatggagatagacatcatcaagcgagaaacgacgggtacaggccccaacgtgtaccatgagaatgacacgatagccaagtacgagatcatggacggggcaccagtgcgaggagagtccatcccgatccggctcttcctggccgggtatgagctcacgcccaccatgcgggacatcaacaagaagttctctgtgcgctattacctcaacctggtgctgatagacgaggaggagcggcgctacttcaagcagcaggaagtggtgttgtggcggaagggtgacatcgtacggaagagcatgtcccaccaggcggccatcgcctcacagcgctttgagggcaccacctccctgggtgaggtgcggacccccagccagctgtctgacaacaactgcaggcagtaggcccccagggccgagaagatgctgggcacccacccagcacccccatctaccaacaccagcggctgggggcgggggcggaccttgtgaggctcagttgacccgttacttgcaacctgaaaacaaatcatgtttttgacttaaattcttttctctggagaacccaaggggcttggggtgggaagcagtctctccttgggattctgcggccgatgtgggatagaagaggtagcatcctggaagccagcctctctggggaacatgagcccccttcctcggggggctgccttgcgtcttagaggagggagagcagagagcacgcatccttggctcctggctctctgagcttcctgatacaggatctgagcatgtccctgggattctgagctgccaacagggccctgggtagtcacatcttgtactcccctttgctgtcccggaggtagtggcaggagttgggccagcccccactaagtggcaggggaagactcacgattgggaagctacctctttgggaatcttggatgtggtgatctcaagttcccacaggccacctccttctggccactcactgctgggacccaggcacctcccttctccatcctctctggattgtcagtaatgtcctggaacagaagcctgtgggatggccttgggcacggagaagccctggggtcagtgtcgtgcacggatggcggcagtgttgaacccaggaggctgaacccggcccaccacggaagatgagtgcatggcaaccgcctgccttcacgtcgctccacttggtaaccccaaggtctgggctgttctaggtattgcttcacgtgccccagcaagcccttaacaagagggcctggttccctgaagaaccaatcccaggaaggggccttgatccctccgccttgctgagagtgaaccctcgtctctcctcaccctccatttcatttctgggaattggggcttagtttcgaacctttggcaaggctgttcttactaatgcccaagcccctttacccctctccctataggttacacaggggagaccagggcctcggcagaagactgctgccacacttccgaatcattctgcttgccaaataggtcatcttcaccagttgactgacccaagtttaggaccattggtatcgtgtgtttaaaaaacacatataaaaaaactcttgtgaatattcttgttatgctagagaggaaggtacttctccctctacggctctgcgctggggcctatggtagtaaagttgtttactgtcctttttctgcttcccctggaaatgacaggcattactctcccattggcctcccttccctttatagaaagaccaagcaggccccactggccaagaggtacggtatttggcagtctgagttctcagtaatttggaaagttaaggagttggttcctgtgtcacctttcagttagtgtgggaaaggaagacttctgttttcctgagatcagtgcagtctcaggcctttggcagggctcatggatcagagctgagactggagggagaggcatttcgggtagcctaggagggcgactggcggcagcagaaccgaggaaggcaaggttgtttcccccacgctgtgtcctgtgttcaggtgcgacacacaatcctcatgggaacaggatcacccatgcgctgcccttgatgatcaaggttggggcttaagtggataagggaggcaagttctgggttccttgccttttcagagcatgaggtcaggctctgtatccctccttttcctagctgatattctaactagaagcatttgtcaattcctttgcctcccaactgacaacacacgttcattttccaaccttcctaacatcttaaacctttcttctgggagaactagaagacagaatttgctttgattctctcaggcgctgtgcacaagccaggtcttctgttttctctttcttactctacccacattcttgccttctctatccaactgtgaaagtgaggggaggctcctgtccccctctcttaaggtccccaaacctgggagtgcataggtactaaatcaagcagtgcaacttgtaattaagcagctgcagtgtttacatgtttcttaatgtgtcatcttttcaatggctgtattaaaagaagaacgtttgttttaatggtctttctgattaaagaaagcccctgtggctttggaggcattgtgcccacggtccaccaaaaaaaaaaaaaaaaaa

SEQ ID NO: 991 - DNA, 2264 bp, Homo sapiens
tgggtgccggccgttgtgggggttggggtgggggcggggagcgcgcgccgggcggaggccgagtggagggggaggggagggggtccgagcggcccttaggccctgcccctgtcgcctactgcgctcagaaggggcctcagggcctgccccgggttgggggcgttggggtgccctggatgggggcacctttatctctcgtcctgtctccggccaccctgaagggtcccttcccaagcccttagggaccgcagaggacttggggaccagcaagcaacccccagggcacgagaagagctcttgctgtctgccctgcctcaccctgccccacgccaggcccggtggcccccagctgcatcaagtggaggcggaggaggaggcggaggagggtggcaccatgggcccgggcggtgccctccatgcccgggggatgaagacactgctgccatggacagcccgtgccagccgcagcccctaagtcaggctctccctcagttaccagggtcttcgtcagagcccttggagcctgagcctggccgggccaggatgggagtggagagttacctgccctgtcccctgctcccctcctaccactgtccaggagtgcctagtgaggcctcggcagggagtgggacccccagagccacagccacctctaccactgccagccctcttcgggacggttttggcgggcaggatggtggtgagctgcggccgctgcagagtgaaggcgctgcagcgctggtcaccaaggggtgccagcgattggcagcccagggcgcacggcctgaggcccccaaacggaaatgggccgaggatggtggggatgccccttcacccagcaaacggccctgggccaggcaagagaaccaggaggcagagcgggagggtggcatgagctgcagctgcagcagtggcagtggtgaggccagtgctgggctgatggaggaggcgctgccctctgcgcccgagcgcctggccctggactatatcgtgccctgcatgcggtactacggcatctgcgtcaaggacagcttcctgggggcagcactgggcggtcgcgtgctggccgaggtggaggccctcaaacggggtgggcgcctgcgagacgggcagctagtgagccagagggcgatcccgccgcgcagcatccgtggggaccagattgcctgggtggaaggccatgaaccaggctgtcgaagcattggtgccctcatggcccatgtggacgccgtcatccgccactgcgcagggcggctgggcagctatgtcatcaacgggcgcaccaaggccatggtggcgtgttacccaggcaacgggctcgggtacgtaaggcacgttgacaatccccacggcgatgggcgctgcatcacctgtatctattacctgaatcagaactgggacgttaaggtgcatggcggcctgctgcagatcttccctgagggccggcccgtggtagccaacatcgagccactctttgaccggttgctcattttctggtctgaccggcggaacccccacgaggtgaagccagcctatgccaccaggtacgccatcactgtctggtattttgatgccaaggagcgggcagcagccaaagacaagtatcagctagcatcaggacagaaaggtgtccaagtacctgtatcacagccgcctacgcccacctagtggccagtcccagagccgcatggcagacagcttaaatgacttcaggagagccctgggcctgtgctggctgctccttccctgccaccgctgctgcttctgactttgcctctgtcctgcctggtgtggagggctctgtctgttgctgaggaccaaggaggagaagagacctttgctgccccatcatgggggctggggttgtcacctggacagggggcagccgtggaggccaccgttaccaactgaagctgggggcctgggtcctaccctgtctggtcatgaccccattaggtatggagagctgggaggaggcattgtcacttcccaccaggatgcaggacttggggttgaggtgagtcatggcctcttgctggcaatggggtgggaggagtacccccaagtcctctcactcctccagcctggaatgtgaagtgactccccaacccctttggccatggcaggcaccttttggactgggctgccactgcttgggcagagtaaaaggtgccaggaggagcatgggtgtggaagtcctgtcagccaagaaataaaagtttacctcagagctgcacacatctgaaaaaaaaaaaaaaaaaaaa

SEQ ID NO: 992 - DNA, 4304 bp, Homo sapiens
cacacggactacaggggagttttgttgaagttgcaaagtcctggagcctccagagggctgtcggcgcagtagcagcgagcagcagagtccgcacgctccggcgaggggcagaagagcgcgagggagcgcggggcagcagaagcgagagccgagcgcggacccagccaggacccacagccctccccagctgcccaggaagagccccagccatggaacaccagctcctgtgctgcgaagtggaaaccatccgccgcgcgtaccccgatgccaacctcctcaacgaccgggtgctgcgggccatgctgaaggcggaggagacctgcgcgccctcggtgtcctacttcaaatgtgtgcagaaggaggtcctgccgtccatgcggaagatcgtcgccacctggatgctggaggtctgcgaggaacagaagtgcgaggaggaggtcttcccgctggccatgaactacctggaccgcttcctgtcgctggagcccgtgaaaaagagccgcctgcagctgctgggggccacttgcatgttcgtggcctctaagatgaaggagaccatccccctgacggccgagaagctgtgcatctacaccgacaactccatccggcccgaggagctgctgcaaatggagctgctcctggtgaacaagctcaagtggaacctggccgcaatgaccccgcacgatttcattgaacacttcctctccaaaatgccagaggcggaggagaacaaacagatcatccgcaaacacgcgcagaccttcgttgccctctgtgccacagatgtgaagttcatttccaatccgccctccatggtggcagcggggagcgtggtggccgcagtgcaaggcctgaacctgaggagccccaacaacttcctgtcctactaccgcctcacacgcttcctctccagagtgatcaagtgtgacccggactgcctccgggcctgccaggagcagatcgaagccctgctggagtcaagcctgcgccaggcccagcagaacatggaccccaaggccgccgaggaggaggaagaggaggaggaggaggtggacctggcttgcacacccaccgacgtgcgggacgtggacatctgagggcgccaggcaggcgggcgccaccgccacccgcagcgagggcggagccggccccaggtgctcccctgacagtccctcctctccggagcattttgataccagaagggaaagcttcattctccttgttgttggttgttttttcctttgctctttcccccttccatctctgacttaagcaaaagaaaaagattacccaaaaactgtctttaaaagagagagagagaaaaaaaaaatagtatttgcataaccctgagcggtgggggaggagggttgtgctacagatgatagaggattttataccccaataatcaactcgtttttatattaatgtacttgtttctctgttgtaagaataggcattaacacaaaggaggcgtctcgggagaggattaggttccatcctttacgtgtttaaaaaaaagcataaaaacattttaaaaacatagaaaaattcagcaaaccatttttaaagtagaagagggttttaggtagaaaaacatattcttgtgcttttcctgataaagcacagctgtagtggggttctaggcatctctgtactttgcttgctcatatgcatgtagtcactttataagtcattgtatgttattatattccgtaggtagatgtgtaacctcttcaccttattcatggctgaagtcacctcttggttacagtagcgtagcgtgcccgtgtgcatgtcctttgcgcctgtgaccaccaccccaacaaaccatccagtgacaaaccatccagtggaggtttgtcgggcaccagccagcgtagcagggtcgggaaaggccacctgtcccactcctacgatacgctactataaagagaagacgaaatagtgacataatatattctatttttatactcttcctatttttgtagtgacctgtttatgagatgctggttttctacccaacggccctgcagccagctcacgtccaggttcaacccacagctacttggtttgtgttcttcttcatattctaaaaccattccatttccaagcactttcagtccaataggtgtaggaaatagcgctgtttttgttgtgtgtgcagggagggcagttttctaatggaatggtttgggaatatccatgtacttgtttgcaagcaggactttgaggcaagtgtgggccactgtggtggcagtggaggtggggtgtttgggaggctgcgtgccagtcaagaagaaaaaggtttgcattctcacattgccaggatgataagttcctttccttttctttaaagaagttgaagtttaggaatcctttggtgccaactggtgtttgaaagtagggacctcagaggtttacctagagaacaggtggtttttaagggttatcttagatgtttcacaccggaaggtttttaaacactaaaatatataatttatagttaaggctaaaaagtatatttattgcagaggatgttcataaggccagtatgatttataaatgcaatctccccttgatttaaacacacagatacacacacacacacacacacacacaaaccttctgcctttgatgttacagatttaatacagtttatttttaaagatagatccttttataggtgagaaaaaaacaatctggaagaaaaaaaccacacaaagacattgattcagcctgtttggcgtttcccagagtcatctgattggacaggcatgggtgcaaggaaaattagggtactcaacctaagttcggttccgatgaattcttatcccctgccccttcctttaaaaaacttagtgacaaaatagacaatttgcacatcttggctatgtaattcttgtaatttttatttaggaagtgttgaagggaggtggcaagagtgtggaggctgacgtgtgagggaggacaggcgggaggaggtgtgaggaggaggctcccgaggggaaggggcggtgcccacaccggggacaggccgcagctccattttcttattgcgctgctaccgttgacttccaggcacggtttggaaatattcacatcgcttctgtgtatctctttcacattgtttgctgctattggaggatcagttttttgttttacaatgtcatatactgccatgtactagttttagttttctcttagaacattgtattacagatgccttttttgtagttttttttttttttatgtgatcaattttgacttaatgtgattactgctctattccaaaaaggttgctgtttcacaatacctcatgcttcacttagccatggtggacccagcgggcaggttctgcctgctttggcgggcagacacgcgggcgcgatcccacacaggctggcgggggccggccccgaggccgcgtgcgtgagaaccgcgccggtgtccccagagaccaggctgtgtccctcttctcttccctgcgcctgtgatgctgggcacttcatctgatcgggggcgtagcatcatagtagtttttacagctgtgttattctttgcgtgtagctatggaagttgcataattattattattattattataacaagtgtgtcttacgtgccaccacggcgttgtacctgtaggactctcattcgggatgattggaatagcttctggaatttgttcaagttttgggtatgtttaatctgttatgtactagtgttctgtttgttattgttttgttaattacaccataatgctaatttaaagagactccaaatctcaatgaagccagctcacagtgctgtgtgccccggtcacctagcaagctgccgaaccaaaagaatttgcaccccgctgcgggcccacgtggttggggccctgccctggcagggtcatcctgtgctcggaggccatctcgggcacaggcccaccccgccccacccctccagaacacggctcacgcttacctcaaccatcctggctgcggcgtctgtctgaaccacgcgggggccttgagggacgctttgtctgtcgtgatggggcaagggcacaagtcctggatgttgtgtgtatcgagaggccaaaggctggtggcaagtgcacggggcacagcggagtctgtcctgtgacgcgcaagtctgagggtctgggcggcgggcggctgggtctgtgcatttctggttgcaccgcggcgcttcccagcaccaacatgtaaccggcatgtttccagcagaagacaaaaagacaaacatgaaagtctagaaataaaactggtaaaaccccaaaaaaaaaaaaaaaa

SEQ ID NO: 993 - DNA, 4641 bp, Homo sapiens
tttacatctgttgatctgacctgactggaagcgtccaaagagggacggctgtcagccctgcttgactgagaacccaccagctcatcccagacacctcatagcaacctatttatacaaagggggaaagaaacacctgagcagaatggaatcattatttttttcccaaggagaaaaccggggtaaagggagggaagcaattcaatttgaagtccctgtgaatgggctttcagaaggcaattaaagaaatccactcagagaggacttggggtgaaacttgggtcctgtggttttctgattgtaagtggaagcaggtcttgcacacgctgttggcaaatgtcaggaccaggttaagtgactggcagaaaaacttccaggtggaacaagcaacccaggttctgctgcaagcttgaaggagcctggagcgggagaaagctaacttgaacatgacctgttgcatttggcaagttctagcaacatgctcctaaggaagcgatacaggcacagaccatgcagactccagttcctcctgctgctcctgatgctgggatgcgtcctgatgatggtggcgatgttgcaccctccccaccacaccctgcaccagactgtcacagcccaagccagcaagcacagccctgaagccaggtaccgcctggactttggggaatcccaggattgggtactggaagctgaggatgagggtgaagagtacagccctctggagggcctgccaccctttatctcactgcgggaggatcagctgctggtggccgtggccttaccccaggccagaaggaaccagagccagggcaggagaggtgggagctaccgcctcatcaagcagccaaggaggcaggataaggaagccccaaagagggactggggggctgatgaggacggggaggtgtctgaagaagaggagttgaccccgttcagcctggacccacgtggcctccaggaggcactcagtgcccgcatccccctccagagggctctgcccgaggtgcggcacccactgtgtctgcagcagcaccctcaggacagcctgcccacagccagcgtcatcctctgtttccatgatgaggcctggtccactctcctgcggactgtacacagcatcctcgacacagtgcccagggccttcctgaaggagatcatcctcgtggacgacctcagccagcaaggacaactcaagtctgctctcagcgaatatgtggccaggctggagggggtgaagttactcaggagcaacaagaggctgggtgccatcagggcccggatgctgggggccaccagagccaccggggatgtgctcgtcttcatggatgcccactgcgagtgccacccaggctggctggagcccctcctcagcagaatagctggtgacaggagccgagtggtatctccggtgatagatgtgattgactggaagactttccagtattacccctcaaaggacctgcagcgtggggtgttggactggaagctggatttccactgggaacctttgccagagcatgtgaggaaggccctccagtcccccataagccccatcaggagccctgtggtgcccggagaggtggtggccatggacagacattacttccaaaacactggagcgtatgactctcttatgtcgctgcgaggtggtgaaaacctcgaactgtctttcaaggcctggctctgtggtggctctgttgaaatccttccctgctctcgggtaggacacatctaccaaaatcaggattcccattcccccctcgaccaggaggccaccctgaggaacagggttcgcattgctgagacctggctggggtcattcaaagaaaccttctacaagcatagcccagaggccttctccttgagcaaggctgagaagccagactgcatggaacgcttgcagctgcaaaggagactgggttgtcggacattccactggtttctggctaatgtctaccctgagctgtacccatctgaacccaggcccagtttctctggaaagctccacaacactggacttgggctctgtgcagactgccaggcagaaggggacatcctgggctgtcccatggtgttggctccttgcagtgacagccggcagcaacagtacctgcagcacaccagcaggaaggagattcactttggcagcccacagcacctgtgctttgctgtcaggcaggagcaggtgattcttcagaactgcacggaggaaggcctggccatccaccagcagcactgggacttccaggagaatgggatgattgtccacattctttctgggaaatgcatggaagctgtggtgcaagaaaacaataaagatttgtacctgcgtccgtgtgatggaaaagcccgccagcagtggcgttttgaccagatcaatgctgtggatgaacgatgaatgtcaatgtcagaaggaaaagagaattttggccatcaaaatccagctccaagtgaacttaaagagcttatatatttcatgaagctgatccttttgtgtgtgtgctcctggtgttaggagagaaaaaagctctatgaaagaatataggaagtttctccttttcacaccttatttcattgactgctggctgctttaaaaaaaaaaaaaaaggatccattgtaccgttgtcttcatcactgggaaatgattattacatagtacagaagattctttgtttttctccactgagcacttaacaattgctttctctctggcctggacattctctggcagcacctccaggatacataaattcaatggatcaatttatttgtcttcaaatggccttaacttggattgtctgtttggccaaccatgaaaattaaagagtgaagcagatgtaatggcctgacattccaaaaactctgaattgggtttattagcacaaatgttgtgttcatttgttgagccatatctcagaagaaggaaagggagctacagaaaggaggtttaggattgcagagaagatgcaagagcactttggcccaattctccagctcaacccagcagctgaaaagcttcaagagatctaggaaaagacattttcatgttaatgagaatttccaccattgtagagaatttccttcctactgagaatctacctctattccccctgccctagctcttctctaacttggttaaccataaccataaccagattcccttgcaatcgatttctctttagtcgttggtgttagaagtaccagcacaatttgagcattcccattaacaaaggtgttcacagttgagaaactctcctgccgggcgcggtggctcatgcctgtaattccagcactttgggaggcagagttgggaggatcacctgatgtcaggggtttgagaccagcctggtcaacattgcaaaaccttgtctctactaaaaatacaaaaattagctgggcatggtggcgcatacctgtaatcccagctacttgggaggctgaggcaagagaatcgcttgaacccaggaggcagaggttgcagtgagctgagatcatgccattgcactccaacctgggtgacagagtgagactccatctcaaaaaaaaaaaaaaagagagaaactctcctgatgccctgttacagggtttgcactgactggagcagaaacagcaacctttctaaaaaagcaaacctttttcctgggaggaaaatgccagagcctgagccaaaattcttatgacaggtaacatttgggtgttaatgtccatgagagctgacagggccatctctgagcccatataactgtctggaacccccaaatgtgtccacaggttgaatgtccatgagtgtgggaagaacacggctcatctggagcacagctgaggctagtaagagctaaatgactttccttgctatgacttggcttacctgaattagctgtaagagttgccgaatgggatgggttctgctatttaataaacagcattcatattcatttttccccagatggagttacctacctttccacatggtcagcttagaaatcttcccctaaagatgctaatctcctttgggctgtctcagaacacagtatccttcaaataagaaaaactgagtgggaagtgcagtgtttccaaacaatacctatcataactacgtattcattgtctacctgctaagtcaagggttcactgcatttctccttcctcagaatacactctggacctgtgctgtctaatatggtagccactaacaaaatgtggccattttgatggaaatccattaaaatcaaagaaaatttaaaactcaattcctcaattgggctggccacatttcaaatgctcactacccacctgtggctagggtctacttctactgtattggcgagcatggatatagaacatttcatcacagttctgttggaccaatctagatagattcattatcccatctagagaagagactttagtcactgtcttcttgcttcagacccatctatatttaaaacaaatttccctaaatcctgagactgagacggagctacaaattctcagatggcgaccgtgtaaatggtattagcggctgaagaaaaaaaatttttcaagacctctgttttttaactgaactttatcattggcattgtgggtctttgaagttgctgggataaattaatataattaaataaaagactgaatttaattgca

SEQ ID NO: 994 - DNA, 6120 bp, Homo sapiens
ggcgccgccgccgctgccgccgctgctcgcctgggccctcctcctggccacccccgcccccgggccgggcagtgacgcgccgcggtggtgccagcccctctccccgggcagccgcggcggcagcagcagcagcagcagctggagctgtggggctgtcaccgccgcccgccccgctcactcgcggatcccgaccgcccatctccgcctcgcttccagcccaggatgagacttctgtgagcagcgaggattttgatatgagcgactccacatggatgtcagctgacccgcacctggcctccagcctgagccccagccaggacgagaggatgcggagcccgcagaacctccacagtcaagaggacgatgactcctcctctgagagtggcagcggcaatggctcctccaccctgaacccatccacgtcgagcagcacgcagggcgaccctgccttccccgagatgaatggcaacggcgccgtggcccccatggacttcaccacggccgccgaggatcagcccatcaacctgtgtgacaagctcccgccggccacggcacttggcacagcctcctacccctcggatggctgcggtgccgacgggctgcggagccgcgtcaaatacggggtgaagaccacccccgagtcccccccctacagctctgggagctacgattccatcaagaccgaggtcagcggctgccctgaggacctgacagtgggccgggccccgacggcagatgatgacgacgatgaccacgatgaccatgaggacaatgacaagatgaacgactctgaaggcatggaccctgagcgtcttaaggccttcaacatgtttgtgcgtctctttgtggacgagaacctggaccgcatggtgcccatctccaagcagcccaaggagaagatccaggccatcatcgagtcctgcagccggcagttccctgagttccaggagcgggcccgcaagcgcatccgcacgtacctcaagtcctgccgtcgcatgaagaagaacggcatggagatgaccagacccacgccaccccatctgacctcggccatggcagaaaacatcctggcagctgcctgtgagagcgagacaagaaaggcagccaagcggatgcgtctagagatctaccagtcctcacaggatgagcccatagccctggacaagcagcactcgcgggactccgcagccatcacccactccacctactcactgccagcctcctcctactcccaggaccctgtgtacgccaacggcggcctcaactacagttaccgcgggtacggggccttgagcagcaacctgcagccccctgcctccctccaaacaggaaaccacagtaatgggcccacggacctcagcatgaaaggcggggcctctaccacctccaccacccccacgcccaccccctccagcaccagcaccagcaggcccgtgcccaccgctcagctcagccccacggagatcagcgccgtgcggcagctcatcgcgggctaccgggagtctgctgccttcctgctgcgctctgcagatgaactggaaaacctcatcctacagcagaactgaccccaccggcacctggagcgcactgccctagggaaggaggctgtcccagcctggacctggcttcctgcctcaccagttggtacattttgtttttgaaagaggtgggatccaaaagagctgtttctagccacactccaagcacctgagactttgggcacaaggacacttttttttttttttttttttttttttggaatctcaccacacgggtgctctgacctgcttggaagaggccaacggggcagctctggaagggttgggggctcccctgacaaggcgctggggctgcagctctgtttagaatcaccttcgtggaccctgatgttagaatcccacccccagataattacctttcaagtcttaggtgagcagaattgcatatttattgagaaaagcaaagtggaccctttcttcctctccccttagtaatttatttttctgaaaatggattcttttgtgtttgtacagattgctagtctgtgtctgtctgatcagaaggatgtatccccatacctaacattccatatcactacactgatgtgggctggggccagtaggggcaggacaggtgccaggctggctgttcctctgcatgcctggtgcaccctgtggccgctagcccttggccaggccatcctgttgcagatcccagtgctgccacagggacaccaccaggcacctccctaggcaacgccaagcaggaggacctcacccacacccatggcaaagcaaaacaaaagaggcaccccgaccccattctacagaagccccagtccatggtcacctgtattctacctcacactccagcgtgggctttttccaggatgtgccctgagcctgttctgaacagctgtaaccccaactcccccacacaatgtgtctgcctgggaggtaagtaagtccagactgggtgtccaggagctggaacccagagagcgtcctgtccctaaccagccactgcagccctccagctctggccctcagctgcttgacaggacggactgctgggagatggcagccggttggcagggcccttgccctcacaccccgctgcccaggagccaggtctgaacttctgtgcacaggcctggcccctcagactcactcctgccaagaggggccacttcttcagggtgagccccggctatcaggcagccgtgagctccagggcgggctgcagctcccatccccttgcgccatgtttggagtaaagggatcagtggaagtggaggagccacttgggttctcctaagaccagcccttccggaggggccggtcctggaagaaacccataatccctggagtgtgaaaaagggcaaaaagaaaaagctggcctggtttccttcctccctgattgattgattgataggcacttcctcttgctcagtgcaatacctaccagtgctgctaaaccagggactcgcccagacctcagcaggcccccagggcctctccgtgcaacactccgtagccatgacagcagctctctgctgcccgcccctgcccagagctggcagaagccctctgttgcctttcctccctcagagcagagaggccccaggggagccagggccgagtggatcctaggatggccacggagagccactcgctcccagaacaggcaccccttcccaaaccagcttttctgcagccaattgcctgttgcagctgtggccactgcctcccggcactgtggcagactccccccaaggagggatggggggggcaccagtgaggatgccccatcctgcctcaggtccagaactctgaaaggtagggtgcccaccccgtgcttacttccggcccctagaggttgggggtggtcgttatctctcaagtggcctccaataccccatccagccacaccacctctgccttccatctgaccaatccccaggcctctggtcagggccaggacacctgagactcacccttagcacagcacaacctccagtgcccaaggcctctcccacaccccagccatccacacatctggccccacctgctcagtactactcaacatttgaattcgtgtaaatatttatttttgtgtgtgaacaatactacaaagtaatcagtaagatcttttgcaaaaatgttaccccaggcaattatttgtgaaaatcttaatgttaaaacctggcagagacaatcgccaccctagaattcctggtatcagttacttaacgtgtcacttctcctcccagaggcagtacccaagctagacatgaaccgtttgcatttcttggcagacaggagtgagaaagactggggaaggggctccctccccctacccacacaaggattagatctaaagatcagcataagctacagtttgaagtcatgtttttctgagttcaagctgttggaactgaccaccctccagcctgccttagtactgcggcaagagcgtaggttcaatgtgttttcaagagaaaggaaagaatatgttgttaaagtccattgggcctcccaggcccctccaggacaatggatttcatcatgtcgaccccacctcttgggtgggctcctcctttccagtgaaactacacctgaagccctagagatggcagaatcaggagcaagtttctgcatggaaacaggattccatttagctggctcagtcagggaacttgttttgcttttgttttaaaagatgcagcttcaaccccttccccctactcccgacttggagggcaccaaagagctggttctgatgaactaagctcactgctgtctcaccctcaccagagggactgccttctcccaaaaggagctcccaaagcccttgtcccacagccatttaaaaatcttctgaagggcctcagggcacaaagtgatcatttgggatcctaagttaaaaaggaaatgcaagagtaggatactccaattccagagtctttgcaggaggctaatcccacaagaagggtagcatcagagaagtgggcattggtcttagtggtggatcatcaggtagacaagtgatagtgtgtgtaacccatctgaaattcattttaccgtcaccactcttacaaaggacagtttattcccaaggacagtgctgacggggagggggacaggcagggagttaggagggttttcgaggatttcaaacaggtggaacccatccatccctattcccaagggccacttacaactctaagggtggttacaggattaactaccagttcattttcaaaatgctgctttgaactcagagggttgatacttttaatttgtaattttttgtaaaactttttacaaaatagtaaagtatttcaccagaataccagtttcaatccgtccatggtctgatttttatataatttagtggtgctttagaaactttgtttttgttgtttctgagctaaacagctcaatcctttttcgcctgtatctacctaagaccaatgtgaacctttgtatttttgctcctaattttggactcagtgaaagtgtactgtttacatgtacagatgcccccagtccctgtgtgttctgcaagacttgctcttgaggaggaagatgcacctcactaagctcatctgcttagcaaagccacaaacaaaaacctctcactttttacctacgtttccacctaaaaatacaacaaaaaacctataccacgtagaactcagattggctgaaaaacactttccacctggtagatggcccatatgcctcaattatgtggtccatttaggagcaggagtcagaagagagacctcttattggctgctggtgggtaactgcatggacagaggaaaagggaaggcaggactttgctgcagagctgtgggatgaatgtagttcttccctgggcagcctgggagtgggaaggtcagaatgactcatgttgccttcaggatcaagccatccaggatttagggacaacccaagaggtctttagtcctctggcataatttagacatgttttggaagagcatgagttccatatctgagatgagatttaagactttcagtgcagatagtacaagccatttcttcagggttcctctgggggcagctccttcatgaggtcccacctccggggaggggcacagggctccagatagtaagcacttaaggcaaacagtggatggcaccaacttttaaaggtgactctattaatggcttcacctctaaattatatttttacagatatgcacctatgcaacttaacgtggctcttctaagcaggtgaggacttcctcctcaatgctctctataaaaattatttgtgttctatatagtgagttttaccagtaaatgtggcttaatattttaattcttagaatgtgtcttctctacgtgatgtgactaaattctgttttgtttgtggaatgactagcacaggccgactccctctctccctcacttaacaaaagaccaatgagctgttaatcgagctgttatctccatggtattacttgctaaatgcactgatttcataagtatgtggaatccttttccttttgaatctgtatatcatatataagactgaatctacttaataaacactgaacaacaaaccgaaaaaaaaaaaaaaaaaaaa

SEQ ID NO: 995 - DNA, 2840 bp, Homo sapiens
agtgaacgtgctccgcgggctcagtccgcccgccgctgcgtcccggagtgcaagtgagcttctcggctgccccgcgggccggggtgcggagccgacatgcgcccgcttctcggcctccttctggtcttcgccggctgcaccttcgccttgtacttgctgtcgacgcgactgccccgcgggcggagactgggctccaccgaggaggctggaggcaggtcgctgtggttcccctccgacctggcagagctgcgggagctctctgaggtccttcgagagtaccggaaggagcaccaggcctacgtgttcctgctcttctgcggcgcctacctctacaaacagggctttgccatccccggctccagcttcctgaatgttttagctggtgccttgtttgggccatggctggggcttctgctgtgctgtgtgttgacctcggtgggtgccacatgctgctacctgctctccagtatttttggcaaacagttggtggtgtcctactttcctgataaagtggccctgctgcagagaaaggtggaggagaacagaaacagcttgttttttttcttattgtttttgagacttttccccatgacaccaaactggttcttgaacctctcggccccaattctgaacattcccatcgtgcagttcttcttctcagttcttatcggtttgatcccatataatttcatctgtgtgcagacagggtccatcctgtcaaccctaacctctctggatgctcttttctcctgggacactgtctttaagctgttggccattgccatggtggcattaattcctggaaccctcattaaaaaatttagtcagaaacatctgcaattgaatgaaacaagtactgctaatcatatacacagtagaaaagacacatgatctggattttctgtttgccacatccctggactcagttgcttatttgtgtaatggatgtggtcctctaaagcccctcattgtttttgattgccttctataggtgatgtggacactgtgcatcaatgtgcagtgtcttttcagaaaggacactctgctcttgaaggtgtattacatcaggttttcaaaccagccctggtgtagcagacactgcaacagatgcctcctagaaaatgctgtttgtggccgggcgcggtggctcacgcctgtaatcccagcactttgggaggccgaggccggtgattcacaaggtcaggagttcaagaccagcctggccaagatggtgaaatcctgtctctaataaaaatacaaaaattagccaggcgtggtggcaggcacctgtaatcccagctactcgggaggctgaggcaggagaattgcttgaaccaaggtggcagaggttgcagtaagccaagatcacaccactgcactccagcctgggtgatagagtgagacactgtcttgacaaaaaaaaaaaaaaaaagagaaaaaaagaaaatgctgtttgtattttgtggtctaataaggagttcgggatagcctgttgtatttgcctcatgccagcccctgagctgccttgggagaagatgctgattgtccttgtccagagtactgcttttgcagagtgacaggctgctgggacagatgtcctcctgttgcatctttgtggatgtttagtaccaatgatgacacgggaactcacatcactgacaccgctcttcatcttctgttagtctcttgaagagcatttttttgtacttctttgctgatgacctacctcttcataagccaagtgaaacaagttgacgaactgcctaggacttccacgtgttgctcacatacatgatgatttctgtcacgctcttgtgttcagacacactgacattaccatgtatgtcagacctccttatgatcgcatgtcctgacagttaagctgattgcaaacagactattaaatatgaatggagcaaacgctgtatgtcatggatatgttctggagaaattcttacccatctggatggggcagggcccttgactcacctgaatcatgaccaggcaaacattttatctgtcctttctgcaggaatccgttctgtgtcatgctaggagaatgggttcagtatatggggccatcaggcagtataccctctgaatgtttttcattgttgtatttgcttagagtaactaaacaattgtatcttttaatttatcttttaattcaaagaggaaaccttggcttctgataactttgttgtgttgtatcttaatggcctatagctgtcattacttcctgtagctgcagtacagaattgttacagacctggattaatgcttccaaagacagaaggaccttggcacctaaactgaccagccctgtgatcctgcaccccacaggagtaactcatcaggacttaccagactgctgcttttgggcatcatctgctgggttgatgatttggtttggccaagagtcttgccaagactttaatctatgcctcttgttctacatgaattcttgggaattactcacgttccataggaagagtgcatccccaggtgatggtttttggttatggtatgatcctttcacaccgaggatttcattgtttaaaacgtgtttctttaaaagaagccttgataacgagagtgggggaaggaggcagcagactttgaagactgtggcctttggtgttctggagtagggggagggaaggagaaacatgttttccacatcatcgcaagtgtgtgccctttgccccttttcaggatccttagagttgcctccctccctccaccccgacagttttgcaataatgtgccttatcagttgtgagtttacaggtgaagcaatttcccaaataaatggatgtaagtgttcaaaaaaaaaaaaa

SEQ ID NO: 996 - DNA, 5260 bp, Homo sapiens
atggctccactccgcgcgctgctgtcctacctgctgcctttgcactgtgcgctctgcgccgccgcgggcagccggaccccagagctgcacctctctggaaagctcagtgactatggtgtgacagtgccctgcagcacagactttcggggacgcttcctctcccacgtggtgtctggcccagcagcagcctctgcagggagcatggtagtggacacgccacccacactaccacgacactccagtcacctccgggtggctcgcagccctctgcacccaggagggaccctgtggcctggcagggtggggcgccactccctctacttcaatgtcactgttttcgggaaggaactgcacttgcgcctgcggcccaatcggaggttggtagtgccaggatcctcagtggagtggcaggaggattttcgggagctgttccggcagcccttacggcaggagtgtgtgtacactggaggtgtcactggaatgcctggggcagctgttgccatcagcaactgtgacggattggcgggcctcatccgcacagacagcaccgacttcttcattgagcctctggagcggggccagcaggagaaggaggccagcgggaggacacatgtggtgtaccgccgggaggccgtccagcaggagtgggcagaacctgacggggacctgcacaatgaagcctttggcctgggagaccttcccaacctgctgggcctggtgggggaccagctgggcgacacagagcggaagcggcggcatgccaagccaggcagctacagcatcgaggtgctgctggtggtggacgactcggtggttcgcttccatggcaaggagcatgtgcagaactatgtcctcaccctcatgaatatcgtagatgagatttaccacgatgagtccctgggggttcatataaatattgccctcgtccgcttgatcatggttggctaccgacagtccctgagcctgatcgagcgcgggaacccctcacgcagcctggagcaggtgtgtcgctgggcacactcccagcagcgccaggaccccagccacgctgagcaccatgaccacgttgtgttcctcacccggcaggactttgggccctcagggtatgcacccgtcactggcatgtgtcaccccctgaggagctgtgccctcaaccatgaggatggcttctcctcagccttcgtgatagctcatgagaccggccacgtgctcggcatggagcatgacggtcaggggaatggctgtgcagatgagaccagcctgggcagcgtcatggcgcccctggtgcaggctgccttccaccgcttccattggtcccgctgcagcaagctggagctcagccgctacctcccctcctacgactgcctcctcgatgacccctttgatcctgcctggccccagcccccagagctgcctgggatcaactactcaatggatgagcagtgccgctttgactttggcagtggctaccagacctgcttggcattcaggacctttgagccctgcaagcagctgtggtgcagccatcctgacaacccgtacttctgcaagaccaagaaggggcccccgctggatgggactgagtgtgcacccggcaagtggtgcttcaaaggtcactgcatctggaagtcgccggagcagacatatggccaggatggaggctggagctcctggaccaagtttgggtcatgttcgcggtcatgtgggggcggggtgcgatcccgcagccggagctgcaacaacccctccccagcctatggaggccgcctgtgcttagggcccatgttcgagtaccaggtctgcaacagcgaggagtgccctgggacctacgaggacttccgggcccagcagtgtgccaagcgcaactcctactatgtgcaccagaatgccaagcacagctgggtgccctacgagcctgacgatgacgcccagaagtgtgagctgatctgccagtcggcggacacgggggacgtggtgttcatgaaccaggtggttcacgatgggacacgctgcagctaccgggacccatacagcgtctgtgcgcgtggcgagtgtgtgcctgtcggctgtgacaaggaggtggggtccatgaaggcggatgacaagtgtggagtctgcgggggtgacaactcccactgcaggactgtgaaggggacgctgggcaaggcctccaagcaggcaggagctctcaagctggtgcagatcccagcaggtgccaggcacatccagattgaggcactggagaagtccccccaccgcattgtggtgaagaaccaggtcaccggcagcttcatcctcaaccccaagggcaaggaagccacaagccggaccttcaccgccatgggcctggagtgggaggatgcggtggaggatgccaaggaaagcctcaagaccagcgggcccctgcctgaagccattgccatcctggctctccccccaactgagggtggcccccgcagcagcctggcctacaagtacgtcatccatgaggacctgctgccccttatcgggagcaacaatgtgctcctggaggagatggacacctatgagtgggcgctcaagagctgggccccctgcagcaaggcctgtggaggagggatccagttcaccaaatacggctgccggcgcagacgagaccaccacatggtgcagcgacacctgtgtgaccacaagaagaggcccaagcccatccgccggcgctgcaaccagcacccgtgctctcagcctgtgtgggtgacggaggagtggggtgcctgcagccggagctgtgggaagctgggggtgcagacacgggggatacagtgcctgctgcccctctccaatggaacccacaaggtcatgccggccaaagcctgcgccggggaccggcctgaggcccgacggccctgtctccgagtgccctgcccagcccagtggaggctgggagcctggtcccagtgctctgccacctgtggagagggcatccagcagcggcaggtggtgtgcaggaccaacgccaacagcctcgggcattgcgagggggataggccagacactgtccaggtctgcagcctgcccgcctgtggaggaaatcaccagaactccacggtgagggccgatgtctgggaacttgggacgccagaggggcagtgggtgccacaatctgaacccctacatcccattaacaagatatcatcaacggagccctgcacgggagacaggtctgtcttctgccagatggaagtgctcgatcgctactgctccattcccggctaccaccggctctgctgtgtgtcctgcatcaagaaggcctcgggccccaaccctggcccagaccctggcccaacctcactgccccccttctccactcctggaagccccttaccaggaccccaggaccctgcagatgctgcagagcctcctggaaagccaacgggatcagaggaccatcagcatggccgagccacacagctcccaggagctctggatacaagctccccagggacccagcatccctttgcccctgagacaccaatccctggagcatcctggagcatctcccctaccacccccggggggctgccttggggctggactcagacacctacgccagtccctgaggacaaagggcaacctggagaagacctgagacatcccggcaccagcctccctgctgcctccccggtgacatgagctgtgccctgccatcccactggcacgtttacactctgtgtactgccccgtgactcccagctcagaggacacacatagcagggcaggcgcaagcacagacttcattttaaatcattcgccttcttctcgtttggggctgtgatgctctttaccccacaaagcggggtgggaggaagacaaagatcagggaaagccctaatcggagatacctcagcaagctgcccccggcgggactgaccctctcagggcccctgttggtctcccctgccaagaccagggtcaactattgctccctcctcacagaccctgggcctgggcaggtctgaatcccggctggtctgtagctagaagctgtcagggctgcctgccttcccggaactgtgaggacccctgtggaggccctgcatatttggcccctctccccagaaaggcaaagcagggccagggtaggtgggggactgttcacagccaggccgagaggaggggggcctgggaatgtggcatgaggcttcccagctgcagggctggagggggtggaacacaaggtgatcgcaggcccagctcctggaagccaagagctccatgcagttccaccagctgaggccaggcagcagaggccagtttgtctttgctggccagaagatggtgctcatggccatactctggccttgcagatgtcactagtgttacttctagtgactccagattacagactggccccccaatctcaccccagcccaccagagaagggggctcaggacaccctggaccccaagtcctcagcatccagggatttccaaactggcgctcactccctgactccaccaggatggcaacttcaattatcactctcagcctggaaggggactctgtgggacacagagggaacacgatttctcaggctgtcccttcaatcattgcccttctccgaagatcgctcctgctggagtcggacatcttcatcttctacctggctcaagctgggccagagtgtgtggttctcccaggggtggttggaccccaggactgaggaccagagtccactcatagcctggccctggagatgacaagggccacccaggccaagtgccccagggcagggtgccagcccctggcctggtgctggagtggggaagacacactcacccacggtgctgtaagggcctgagctgtgctcagctgccggccatgctacctccaagggacaggtaacagtcttagatcctctggctctcaggaagtggcagggggtcccaggacacctccggggtcttggaggatgtctcctaaactcctgccaggtgatagaggtgcttctcacttcttccttccccaaggcaaaggggctgttctgagccagcctggaggaacatgagtagtgggcccctggcctgcaacccctttggagagtggaggtcctggggggctccccgccctccccctgttgccctcccctccctgggatgctggggcacacgcggagtcattcctgtgagaaccagcctggcctgtgttaaactcttgtgccttggaaatccagatctttaaaattttatgtatttattaacatcgccattggaccccaaaa

SEQ ID NO: 997 - DNA, 5733 bp, Homo sapiens
aattataacagctggccttctggtgggcaaaccatcccctgatggactggaagcctaccccccaccccaagccctggctgcgacagctctggaaccctgactgcctgggtgcccctcagctctggaaccctgactgcctggatgctcctcagctctggaaccctgactgcttggataccccctcagctctggaaccctgactgcctggaaccgtgatccggaacccaagatcctttcaaggcctcaggggtattgctgctgccctcctccttctcaatttaaccccgcgtccagccgtcgccaccaggggcgtcagagcgcgcgcatgctcctagctcggagccgcgccgatctcgcgccggcacctggcagccaatcgcaggtctccactggacgcgcgcgtgtggaggcgtgcgcgtcggcggcgccgggggcctgaggaggcgtagtcgccgccggctgtgccccgggagcgcctccggggctggtgcgtggccggcagctcgcgaacagcagctgatccggactggatgtgaccttctgcctggaatagctcaagttcttaaaagttgcgttgtaataaacctgaggctgggaagttcaagatcaagatgctggacgatttggttccttagtgaaggctctcttcctggctggtggatgacagccttcttgctgtgttctcacatgacagaaagaggaagcaaggtggcagtttatataaaggaagcattgggacttgtggccccaccattcaggaataaaaaaattagaaaatggaacaatcatgtgaggaagagaaagagcctgaaccacagaagaacatacaagaaaccaaacaagtagatgacgaagatgctgagctcatctttgttggtgtggaacatgtaaatgaagatgctgagctaatctttgttggggtgacttcaaattcaaaaccagtcgtttcaaacattttgaacagagtcaccccgggttcatggtcaaggagaaaaaagtatgatcaccttagaaaagatactgctcgcaaattgcagcctaaaagtcatgagaccgttacatcagaagcagtgaccgtcctgccagcttcccaacttgaatcgagatcaacagatagtcctattattattgagcctttgtctaaacctgattatagaaatagttcaccacaagttgtgcctaataactcttcagaattaccttctcctttgattacattcacagattcattgcatcatccagtaagtacagcactttcagtaggaggtataaatgaaagtcctcgtgtatcaaagcaactttccactttcgaagtaaacagcataaatcccaaaagggctaaactcagggatggaattatagaaggaaattcttcagcttcgttcccttcagatacctttcatacaatgaatactcagcaaagtacaccctcaaataatgttcatacctcattaagccatgttcagaatggagcaccttttccagcagcttttccaaaggacaatatccatttcaagcctataaatacaaatcttgatagggaaaatgaattggcaaaaacagacattttgagtctaacaagtcaaaacaagacctttgatcccaagaaagaaaatcccattgtgttacttagtgacttttactatggacagcataaaggagaagggcagccggaacagaagactcacaccacctttaaatgcctcagctgcgtgaaagttctaaaaaatgttaagtttatgaatcacgtgaagcatcatttggaatttgagaagcagaggaacgacagctgggaaaaccacaccacctgccagcactgccaccggcagtttcccactcccttccagctacagtgtcacatcgaaaatgtccacactgcccaggagccctctactgtctgtaaaatctgtgaattgtcatttgaaacagatcaggtcctcttacaacacatgaaggaccatcataagcctggcgaaatgccctatgtgtgccaggtttgccattatagatcgtcggtctttgctgatgtagaaacacattttagaacgtgccatgaaaacacaaagaatttgctttgtcccttttgtctcaaaattttcaaaacagcaacaccatacatgtgtcattataggggccactggggaaagagtgcacaccagtgttccaagtgccggctacagtttttaactttcaaggagaaaatggagcacaagacccagtgtcatcaaatgtttaagaagcctaagcaactagaaggattacctcctgaaacaaaagttactattcaagtgtcactggaacctcttcagccaggatcagtggatgtagcatccataactgtgagcacatctgactctgaaccatcactccccaggtctaaaagcaaaatttcaaaaaagtcccattaattctagtttcagtaaatctaaagcaagtatttcaaaccaaattaaaaaacctcataaaacaaaaaatacaaaccatacattattcagtagcaccaaaaatagtgaaactagtggattatatatgactttttaaacaagattcaggatatatattatttgatctgaattttgaggtattattttaaaacatctggttttcatgttaactgtatctggcttaacacataaaaggtgtttgtgtgtgtgtgtgtgagagagaaaggtattaatttatttttttaattttaattttttttttttttactttagagacagggtctcactgttacccaggctggagtgcagtggcgtgatcctagctcactgcaaccttgaacttccaggctcaagcattcctccgcctcagcctttggagagtagctaggactacaggcgcagccaccacacccagctagttttttattttaattttttgtagcgatggaatcttgttatgtcgcccagggtggtctcgaactcctgaccttaggggagcctcctgcctcagcctccccaagtgctgggttgtgtgagtcactgcccctggcacctatttattgttttggtatttcatgttactcctaagcttgaaagctcttttttctatatacagaattcatagaatttttgaaatacttagttttctttacagctttttccatgcattcagcatttcatggttaactctagtcagactggaatggctttgttatgccctggcccacttgctgccgaattcccagaagtgcctctgctgtgctggcataaaataacctgaaaagattctgaaaagccaggatgtggaattgaaagagaagctgctgcgtgagcagagaccaagaaggcggaggttagttgagggagagcagtggttctttgttctagttgaaggataggcacacattcattctagtcttggggccaggtcaaaaggaacactgcttcagagtatctttacctacctgaaaacatccaaggaagccaaaccattcaaagtaaaatggttttgtttggtgaagggcccctgcagacatcaaacagccgtcatgtatcattggtttgaggtgaaatagcaataaaattaatagaatggtgcctggtactagctgacttcctgttctgtgatctaaaggtgaatttgattcattccctctcctctcccttctggctagccgttagtggagaatgaactggccatattctcagccacagctgtaaagcaagtttcccaaggggaagaagccctaatatctataatttgaactgtactggacccatagttttaactgaaaagggccaaacaagtggtgtctgtccagttcctggactgggctaaatttagttttcccactgttaagctggaatgaggactgtcccaacaacagtaggtacagtggacaaaaatagcccagggtgactgactgaatttaaacccataatggctttatatttttctgtgcatatatatcttaccctaattgaacatgtgaagcttgcaactttatgtcttgctttggacatgaatgtattacagcttgcagctattctgttaaatgtatagtttcccagttttttgacactaatgctgtttgggtcttacctgacacacaccagtgtgcaagaaatgtctctctaattcaataagttttaagacttagagttaatgtccttcatctgatctatcctatctaatctgtactatgggtgaatctttttcccttgctctccccaggggctgtttcacagtattctggagtaccttttgagtattggttcctgaacatcagcagtcttggctgcctctgtggactcccggagttgtctccctgcttgtgttctggtgccatcctttgttcctccacccctgaccaaggtgcccagcagcctgtcttcaccagtcaaggaatccgccatcttggctgtagacataggtctggagaaatctctccctttttccttgatttctttttaaaggtaccttatctctccccactcctttcttccctcctcaatctagttaaatttcctaagctttcacaaaaatccgggaagagataattaagagcttagcatccctcttagagtagaaggcagtacagataacaaagaagttgtgagtatattatctacattttagaaaattttctgactctagatccatagattctgttgtatttatttgccggacactcatttgattgatttgcaccttgaacactatactaggtcttttcagttacgttgcttgggttaagacactttgctaaaattacagcctgaatcctttctttagttgaagaaagggtatgtgtgtgcaagtgggtgtgtgtgtgccagtttttcttgtctcaggtagatactcccactgtgtataaatagatctacagacttttcatacttacctcccgtattctgtttctgtggtaaaaatatgaagtgttttagttgtatgttgagtgattggttggtattatcaacactgttgtttgcagtttcattaaagcatgctcttaaggagtacatatggtcattaattgccaactgtagattccagtgatctggcccctgcctacctccttcctctctttttcattctctgtcatgcttctccactgttttccccaatgacgcactattttgacacactggccttgctattccttaagcaaatcacattcttcccaatccaaagactttgcacatgctgttgtctttcttagaatgcccttcccctaggcctgcatggcttgctacctcacttaattgtttgacacttcctttggttcattgagcttcaaggctcttaaaatgccactgacaatgagatctccctttaaaaaaaaaaaaaaacttctacttttcctcttaaaggcactttactctctccccactcttttcttcctcttcaaagtatttaaatttcctaggttttcatgaaaaagctggaaagcgatcagcatcaagggctttgcttctgtcttagaattgagctagcttgagtcaatttctgtgcctgcaaccaaatgaaaattaatatagtgagttctttcaggagctttctctgtttttctattgatacctctatatatttttaaggcaatgtcactttgttttgtttacaaatatattgaatatgtcaagattactattttgttattgccctttgtgaatttccttgtctattttgctcgcttgttctttcaggtgaaatttattattttattaatgttgccaaaaattataagtaaaatatcaattatagtaataaaatgttttgtgaaaaaaa

SEQ ID NO: 998 - DNA, 6900 bp, Homo sapiens
agcgcaggtcccgacagaggtcgccgggtggtggcgtcagctgcggcgccctccgcgtggaaattagccggttgcccgggcaaatcagggaggaagggagggagctgaacacggaagtggtggcggcgcccagggaaccggcggaggcgatgaccgtgacggctgggttgggaccggaacgccgaagcggggttgggggtggcagaaaagcatctgctttgtaagacctacacgaggtgcaggagtggttgggcctcccctctccacttaagcaagcgcccagactgatggcgatggtgatggcagcagttactcgcacaaccccagttaagctgcgctccgggagatacatccagaaagtgcccagaagaaacttcctgctggaaaaaatgaaaaagcagtatttataacattagaatctggataatttgttaacatggcagaaaataatgaaaatattagtaaaaatgtagatgtaaggcccaaaactagtcggagcagaagtgccgacagaaaagacggttatgtgtggagtggaaagaagttatcttggtcaaaaaagagtgagagttattcagatgctgagacagtgaatggtatagagaaaaccgaagtgtctttaaggaaccaagaaaggaagcacagctgttcatccattgagttggacttagatcattcctgtgggcatcgatttttaggccgatctcttaaacagaaactgcaagatgccgtggggcagtgttttccaataaagaattgtagtagtcggcactcttcagggcttccgtctaaaaggaaaattcatatcagtgaactcatgttagataagtgtcctttcccacctcgatcagatttagcctttaggtggcattttattaaacgacacactgctcctataaattccaaatcagatgaatgggtaagcacagacttgtctcagactgaattgagggatggtcagctaaaacgaagaaatatggaagaaaatataaactgtttctcacataccaatgttcagccctgtgtcataaccaccgacaatgctttgtgtagagaaggtcctatgactggctctgtgatgaacctggtttcaaataacagtatagaagatagtgatatggattccgatgatgaaattctaacactttgcacaagttccagaaaaagaaacaaacccaaatgggatttggatgatgaaatcctgcagttggaaacacctcctaaataccacacgcagattgattatgtccactgtcttgtaccagacctccttcagatcaataacaacccatgttactggggagtgatggataaatacgcagccgaagcactactggaaggaaaaccagagggtacctttttacttcgagactcagcacaggaagactatttattctctgttagttttagacgctatagtcgttctcttcatgctagaattgaacagtggaatcacaactttagctttgatgcacatgacccctgtgtcttccattctcctgacattactgggctcctagaacattataaggacccaagcgcctgtatgttctttgaaccacttctatccactcccttaattcggactttccctttttccctgcagcatatatgcagaacagttatttgtaactgtacaacttatgatggcatcgatgcccttccaattccttcttctatgaaattatatctgaaggaatatcattataaatcaaaagttagagtactcaggattgatgcaccagaacagcaatgctagtaacaggatgggaacatgggaatgataatatatattttttcttttaatattttatttttctttttatgccactttggatttttctacaaaggcagtggtgtccaaaataaaatctctgccctaaattttactaataaatccatttttctagtgatacacaaattgtttaaggttatacactcgagcttaaatagatatttttaaccaggtgtttggtttttgtttttaccgtgtaggttgtatacttacattttttctttccttaatttatacatgatcctttttccttaatttatacatgatccaggcacatttgaaatttggtaggcattgcaaacacatttgaatattgtgtatttcatactattctttaaaagtaatcttatgtcctttcctacatgtaaaatattttgttaatctatgccattagtagtattatatataaaatatagttccccgtcccccttttcattgagtttgatattcttcagtaaagctgaatgttgtaattcaccattcatactaatgttattgacttttgtaacttactaatagggatgttaaaagtaacaaaaccaagtcaaacttggtgtatttttattttaaatattaactctaaagcaggattactaaatttgattaatctggtcaatgagaatcaaatggaaacatatcattctggaggtgcacttactcttctacaatgtggccggatcatttgtcattcctgaataggtctttctctcaacctgcaagagctaaaccatcttcaaaacataaatcttgttcctttctcattggaagctttgaaaataatgataacactattagtagctagtagttactaaagtgctaaagtaattgtggggtttttctgtattagcttatgaactgttgcttctacttagcccttttatagaaactctgagctgttactttggggaaattccacaatgtattagcagccacaaatttccactggtaaccaaagagtacctaagtagtttttcattattttaagttgaatttgaataaagattccagaaataaacatggagctcagtattcaggaagcttaatactgtttttgatctacaagatccaaataattatccctatcttcagaattaacttagtctgtaatgtggcttcaaaaaaagaaagccttttgacagctacatgacttacaccatacagaacagtactggacaaaaggggtgatattttaaatttactatcccagaaacagggcaacgtttttagaaacatctttagcccaaagtaactagtaaaaataaatggagtggtatcctatcttctttttttaaggaatcaatgaataataaatgtagatagacaattttcttctggtgagctgtctaaccctttgtacacattgacatttttaatatcgtaactgatttcttgatgctagtttagctatattaggaaactgcttctacctagattgaaagaaatttgactcataaacttccaagttagaacaaatatttcttcattattgttgcttttatgtgagtagcatttccctatcttgcagttctgttaacatgaaaatggcatttttccataatagctttaaaataattttttagtaattattacaaaattaaggaaaatctctattaccgttatcttttagcattttttttttcctcagtgatctcaagattgtcttagtctcaatgagatgtagctacaaaaatggcacctcttagcagtgatgaggctcaggatatcggatatcataacaccaatgtcaggataaatatctcttctaaagacgatatttaccttttacaaggttagaaaagtctcatactacctcatctttattgtggcgcttttgtagatcactgagaagcttatcttattaaccaatataccacttcctaaatatccatctttggtgaaagaaaatagtgtggtaagagtacccatgattatagttttttatcagaatttgataagattttctgtttctgtgaaacaattattttaaatatttttcttttaaaaataactttttatcagtacagaaaaacctaagggatgactagcttacaaatattctgttaaggggtagttttataaagaaaaatgatatatagttatgttgtcttttatagtgttaaaattagtatttatatgaaagtcaagatctaagtaccttttcatataattcaaactgattgcttgtgatatgttttctctggcttttttattttttcaacttcaaggtattaacagctgttaacacttaaaaagtactgccacatatgtagccttgaagtagttgatctaataaatgagagcagggaggagattcattgactctgaaatgatttttatttttcctttggtatttgctacagtgaaaagaagtttggaaagtagatacataaagacttgagaagggaattgtttaagggaaaagaaaagagtaataattttttttaaaacattaaggaattggaattcagaaaggttacccccttcctctgtgtctttgtaaggatacatttggaagaacatacagtattcagaaactaacctatataaaatgtaaacaatatattgattgcactatataaatgagtaaattttgagaggaacaatgtgggaatgtataaatttgtctaaaattttataactgttgaacaaagggaagatttgaacagtgtaaattccagagttgagaaagcatttagcatggtggaaatgtggagagcttattggtgagagaggatggagctaagagaaataagatcaaatattaaaattaggaatttaggcattacctcagggaaaagccttgacagtgaaaagaaactacttaatcgctaatagctagtctggaccagacacttaactgcgctttgggaatcatcctgggctaatcaggaaataaacttgacttttctatttttctctgaagctttacaggacatactcccactcccatttttttctaagcctacagcatcttgattcatagtataattcctgaagtatgctgaatggactttttaaggttcctttagcatttttgtatagagttatatgtgatctttctataaccatgccattcacttaaataattcatgaagggaatggtttaatttaaaggaagacctaataggaagaagattaaaggaagcttttagtcagcctgtggctagatttattgatttggtgatcaaacctgtgctatttcctgaatttcagctaatggccaactgtggtcaaagaatggctttcagttaaagttttgacttcttattataaataatataaagaatgtctcagtaattagaaatcccttaataagtagaacaaatgtggcaagtaggactcctatcggtatacaaattccatttctttttataagaaaaacacataaaccattatcatttattcatgagccaaagccattaagaagataaatccagttatcagcttcctgtctctgaagtttggatcattttatagatccacgcaatagagagcttccttcctatgaaacaaaaaccttgagatctctttttttttgagacagagtctcgctgttgtcagcccaggctggagtgcaatggcgcaatctcggttcactgcaacctctgccttccaggttccagcaattctcctacctcagctcccaagtagctgagatgacaggcgtgtgccaccacgcccagctaatttttgtatttttagtagcgatggtgtttcactacattggccaggctggtctcgaactcctgacctcaggtgaccacccgcctcagcctcccaaagtgctgggattacaggcatgagccactgtgcccggccaagatctaactcacgcttacttttcattaaaatatttcttgtcgcttttagctattgtcagaatccaataaacagcttacgcattcattttggtaaagcaaatttcacaggaaaatagacaaaattataagagattcctggagacaacacaaggaaaacaatgtttaaaagcaaaatagcctgtgtaatgttaggtaatgtaatgcccaagtgaataaaagatttttcgtcaagcaaactactgtttctactttgggggaaaaaagtcagttttacatttgtaatttaaggaaagaacagaaagcacaaaggtttttcttttctttattaatggcctactagaaatgagcagtgcaagagtctacctgtactattctaatacagtaagatattggacacaaaatggaggtaactttttaaaatagattggcttggaagttgaaatgtagattaatggatataacccaatagaaagggattttcaaataaaaccaaagtctatttttttatttactttctaattttgaacagatgactcagtcctaaatctttgcctttatttcctataaaatgtaggtgatacttgtaactcgacttcctggagttaattcttcagcaagaggtgaccctgggagcgtactttaaaataattgctgtacagccattgagtactaacatgatgataggttttcaaaatatctttgtagtggatgctgcataattacattcacttctcttagactgtaaaagactttcttgacttgttttaacagtagagatagcagtacaatttgaatttatggtttaggctctgcaattagaggaacaattgcagtttcctcctacccttcatatggtctgtgtaaaactgatgtttgcttaacttattttaaaagttgattacgttttcagaaaataaagataatcacttttgccatggttataatcaaatctaagctttcagacttgagagccatggtgtaaaactcaaggaggtttatttaaattatgctgactttgctagaattggataaattctgtataagccaagtatgagttcacatgtactcgaatatacagttttcacaaagctattactctcatcagtcaggcttgtatgatctattccttaccacaaaagaagtagacaattgccacttttatttctaatccttaagttgaatgtttcttcttggatgtaagttcaaataaattgatctggataaattttcatttctacttaattaaaacttcctatgtaaaatccaaaaaaaaaaaaaaaaaaa

SEQ ID NO: 999 - DNA, 6320 bp, Homo sapiens
aatccgctcagctcctgcaatggggcctgcctgacacttgggcgctccttcagtctcgatgttgatggcaggacaaaggggcgcctggaccatgggtgatgtggtcgagaagagtttggaagggcccctggcaccttctacagatgagccctcccagaaaacaggagacttggtcgagatcttaaatggggaaaaggtcaaatttgacgacgcgggactctccttaattcttcagaatggcctggaaaccctgcgaatggaaaacgctctgacagatgtcatcttgtgtgtggacattcaggaattctcctgccaccgcgtggtgcttgccgcagccagcaactatttcagggccatgttctgcaacgatttaaaggaaaagtatgagaaaaggatcattattaaaggggttgatgctgagaccatgcacactctgttggactacacgtacaccagcaaggcgctgatcaccaagcagaatgtccagcgggtcctggaggctgctaacctcttccagttcctgcggatggtggatgcctgtgccagcttcctcactgaagccttgaacccagaaaactgcgttggaatactgaggctggctgacacacactcgctggacagtctaaagaagcaggttcagagttacatcattcaaaactttgtgcagattctgaactctgaggagtttcttgacctgcccgtggacactctgcaccacatcttgaagagtgatgacctttacgtgaccgaggaggctcaggtgtttgagaccgtgatgagctgggtccggcacaagccatcagaacgactctgcttactcccctatgtcctcgagaacgtgcgcttaccgcttctggacccgtggtactttgtggagacggtggaagcagatcctctcatcaggcagtgcccagaggtcttcccgctgctccaggaagccaggatgtaccacctttctggcaatgagatcatttcggaacgcaccaagcccaggatgcatgagttccagtctgaggtgttcatgatcattggcggctgcacgaaggatgaacggtttgtggcagaggtgacctgcctggaccccctgaggcgcagccgcctggaggtggccaagctcccgctaacagagcatgagctggagagtgagaataagaagtgggtggagtttgcatgcgtgacattgaaaaatgaggtctacatctcaggtggcaaagaaacacagcatgatgtttggaaatataattcttcgatcaacaagtggattcagattgagtatttaaacataggccgctggaggcataagatggtggtgttgggtggcaaggtctatgtgatcggaggctttgacggcttacagagaatcaacaatgtggagacctacgacccctttcacaactgctggtcagaggccgcacccctccttgtccatgtcagttcctttgcagccaccagccataagaagaagctgtatgtgatcgggggagggcccaatgggaaactggccacagacaagactcagtgttatgacccttccaccaacaagtggagtttgaaggcggccatgcccgtggaggctaaatgcatcaatgcagtgagtttccgggaccgcatctatgtcgttggtggggccatgagagcgctgtacgcctacagcccgctggaagacagctggtgcctggtgacccagctcagccacgagcgggccagctgcggtatcgcgccctgcaacaaccggctctacatcaccggcgggcgggacgagaagaacgaggttatcgccacggtgctgtgctgggaccccgaggcccagaaactgacagaggagtgcgtcctgccccggggcgtgtcgcaccacggcagcgtcaccatcaggaagtcgtacacccacatccgcaggatcgtgcccggagcagtgtctgtctgacggcaggatggggagctggagagcccccccgaccctcagcgtacccgcctcacctctcaccctcctccagtcccacttcaggcagcaggctcgagtttgaggccatacatcaggggatccccttgactcactttgggggaaccttggaagtcacagtttggggtcacttgagaccggccaggaatgtttgcatgacctacctcaggaggggaggcgaggaagagtaatatttagcattcaggacccacccaccctatgccggcttctgtgccaggcacttccttttatcggttcatttaacctggtgactggctcttatcacttctagtttacaggtgagggaaccaagtttcacagaggctaagtggcgtgcccctgatcactcagatagcaagtagctaccccaggagtctaaaatccaggtctttcatctccgaagtcaatgctctttccaccatgctgcctatctcagagcaggaaaaacaaacaaaaaacaacaacaaaacctggctcttgctgggcgtggcggctcacgcctgtaatcccagccctatgggaggctgaggcgggcggatgacctgaggtcaggagttcaagaccagcctggccaacatggtgagaccgccccgtctctactaaaaatacaaaaattagccgcgtgcagtggcaggcgcctgtaattccagctactcaggaggctgaggcaggaggatcacttgaacttgggaggtggaggttgcagtgagccgagatcgccacactgcactgcagcccgggaaacaaaagtgaagctctgtcttcaaaacaaaaacaaaaacaaaaacaaaaacaaagaaacctggctcatttcttgtttcggcaagtctgctaaaagattcactcagcacagcagggaaataaaggtgtttcctgctttctttccttttctttcttattctgcatcctccctcgtccccgccctttaccaatatttaaaccaaggagtcatttgggctccttgccaagaacatctcataggttcttccacttgaaaggtctgggggatgggcttgggaaggcctgtttgctttgaaagagatgaaatacttgtgttctgtcctcctcccattgaaaccctcttttttttttttttgagatgaagtcgcccaggctggagtgcagtggcatgatctcggctcactgcaacctctgtcaccctggttcaagtgattttcctgcctcagcctcctgagtagctgggattacaggcacctgccaccgcgcctggctaatttttgtagttttagtagagacggggtttcaccatcttggccaggctggtcttgaacgcctgaccttgtgatctgcccgcctcggcctcccgaagtgctgggattacaggtgtgagccactgggcccggtctttttttttttaaatgatcataagatggcccattttggaccggaactgtcattgccagacagaattgtacctttagcacattctggtgccctggcctcttagtgttcaccagttgtactgcaatatagacaagatgtctctagagactcaaactactgttttattaaaaaagtaaacacctgagcacagctggcctacacaggagcgacagattctccttgatggtacactttctagtttttacacagtgatttaggtccacgttcctgataccccatcctcctgaagccttcgttttcaagacttttaaaaagcacttctacttggttttttgatcagtgtagctcaattgtgacttaaagaacagaatctgtccttcactgtaagagctacagctttcaaatgagctcactggaaattcattctaatccccaagctggagaaacaggttaagagatcctgtttcatatgctgtatttaaaaagcaacaatgataacaacatagtaactgcgttacccaatggactttattttcatcatatgatttcaattctctttatagagttttatttcatatccggtgtggcttgttcttttcagcagtttgggaagttagttattagagttgatagtgaattgaattttcattaaacagtcacggttagaagaagctaatatttgaaacagattttaaaaacttgaaaaattacaggtgagatttctgtttatgccagattattgaagataaatataaatgtatgttggtgtgtgaaatgctctgtgccttagaagcgtgacagttcagctctctgctgtggaaagtaacacagggcaatagaaacatatttgtggaattttagaacaaactattgctgactcatgagcactataataaccatcaggaagctcccaactgaagcaatgtaacagtgtaatctagttcaattcagcaaacattcatggagttcttcatgtctgtcaagccttgaggacacccacgaatggcaaatctccacgctagacactcaatacaggtaaataggccaccagttaatattcttgtttttattttcttcaagttagctaaaaatgagatgcgtatgaagtgaggaggctggatccaagtcttgattgcctttcagggggtcaaggtggtaagctgtgcagtgaagtcaaccagtggccatggcttacatgtttgtctctttgagatcgccaccagaaccatttgtgaactgatttgtgaaggaaaagtcagtcttactccaaagactattgcagggaggaacttccagagaggaaatccaatgacaatggtactggcatacacagggagcctcccttcaaaaagacagcgcccctagtcagggaggggatggcggtcctttgataagacccataggcaaacttcgagcccatcagcaggtcaaccctatgctgggaaagtgaggatttgggatttctgtgctataaacctgattctaaatgtaggacccaagtttctggactacttcagaatacctaaatgaatcatggaaacactctttatgattttttacaacaccagatatgcaggtgaattgtggaaaatgtcatgtagctgacactcaagaaatagggattcctaataatggcatgggtagggaacagatacacctggttagaaggtctagggttctgtatatgaagctgccagtctgtagctcttcgagaaagaaagttcaagtcatttgggggaaacttaagaatagtcatcagggttttagcttctaggcaccagccaaggatgagaacttctaaaatctaaaatccatttcaagaaataaagacgaacacatttgcaggaaggtaactgttataacccacaccatcagcagggggaaagccaagctgagaataaacccagagacaaagaaccctcggactcaggcaggacatggcaggatgttctggcacagcagactggagactgaggcagggcctgtgagtggacagagcacccctggctgggaagaagaagatggggtaggaggaggtcaggttccaaggatgcaggtctggaaaatgatatcggaggccctggagtttgtgagcttggctctagtcccaagaagggtgagggagaataagggtaagggagtattctaggcaaggaactaaggaaggaatccccttcttagagcagaggcacaagttagagcaggcccagcatttgggccaacttactgtggggcctctgagctgctcagctgggtctcctgtcctagagggaaggtggcccagagtctttggtggagcggaatctgtagatgaggttaagggactccagttgccaaggttgatctgaaacaggcagggagctaagctcatcagaacaccaacagattcatgttctcgtcttagctttcatctattctggtctcaatggcttcgggaaacacacatatacacatacaccatgcccttgaactcaaagcaaactacgctctcagggaaatacaaatatcacgttcttatagctgtaaagtatagcttagctatttatagaagactatgaggtactgttgtgagttatttgcttatcctgttttattctgaaaaatgaaagtgctcaatagaatttttaacgttggcaacaccataaggatttcttatgttaagtcccaacttggggttgcaaaatcattttttcccttaatacctgggtgttgtattagatctcataatttgacaagttaaccttttagaaatccacatatatctcaaatctggctactgcaaaaccagttttgacaggtcagattttcatatgtataggtataaatagccaacactcagtgaacaaaatcctttaagcattttggttacataaagttgtatgttttaagtgatcaaactaagaatattgtttataggttttaaaaaccaaaccaataaaatttttatttattcaataaaatatgcacagaacagatgcaaatgtgttatatacaa

SEQ ID NO: 1000 - DNA, 4242 bp, Homo sapiens
agtgtatccagaagctactgtcaggaggacactgtaagagaaccttggcacctctgggcccaaagggaaagacaccagtggaaagaggtgagcatctcctggaccaccctcaagcttcaggtgagctgagcttctaacactaccatcaaagcaactggaaccccttgaatttgatttctggagacgcgagcataatccttttgcagacatctcaacgctggctctccaggtggagcaccatggaaggcgactgtctgagctgcatgaagtatctgatgtttgtattcaatttcttcatatttctgggcggggcctgcctgctggccatcggcatctgggtcatggtggaccccaccggcttccgggagatcgtggctgccaatcctctgctcctcacgggcgcctacatcctcctggccatggggggcctgctctttctgctcggcttcctgggctgctgcggggccgtccgtgagaacaagtgtctgctgctatttttcttcctgttcatcctgatcatcttcctggcagagctctcagcagccatcctggccttcatcttcagggaaaatctcacccgagaattcttcaccaaggagctcaccaagcactaccagggcaataacgacacagacgtcttctctgccacctggaactcggtcatgatcacatttggttgctgcggggtcaacgggcctgaagactttaagtttgcatctgtgtttcgactcctgaccctggatagtgaagaggtgccggaggcctgctgccggagggaaccccaaagtcgggacggggtcctgctgagccgggaggagtgcctcctgggaaggagcctattcctaaacaagcagggctgttacacggtgatcctcaacaccttcgagacctacgtctacttggccggagcccttgccatcggggtactggccatcgagcttttcgccatgatctttgccatgtgcctcttccggggcatccagtagagggtatggcctgaagcctgaagactcgccccacccaccactgcccagcacccaatgtcctcccgtgcccctccccgctgtcctcttggccccaggggagaagatgaggccatcagagatggccaggagaagggccaggggaatagagctatttttttaacaaaacaaaatgaagacaaaaatatggactgatgtatcctcgcctggactcagggcaggtgccgtgggttctccagagaccccagcaactggcccaggatgcaggctgctctagagaccaaaggaacaccaggcccagcgccctctttggtccagccagaccctgggccctctctcctcactgcaccaggacctgatgccaagaaagtgaggatttaggcaacaaggaggcaaaagcaaatctcagagaagtcatcaaagcccaggggctgcacggagattcagctgccatgtctttgaggactcggaacccacagcgcaatccctggtccactggaggatggactgttccccccttcaggccggggccaagagtgagctgctaacacggcatccaagaatggcccagctggtaggatccttgctttccccatctgttggaccaaataatctcaaaggcccagagaggacagtgaccatccacagacacacagcacaggcgtgacagttctgaaaagaagctgagttgtctccaggctgctgtcactgcatccaggactctgtcagctctgctgcccacatgcacccctggcctcagcatcccggttcccccagacaagagagggcaagtcagccaggaactgcctcctccctgctctacagctaagaaaacaccattccatgacttcccaccgcgccctcgctcctacctccccacacctctctctgagtccccaggaacacacagaggtgcacatcacattcccttgtccacactgcccgcctctcccacatgccacccccttccctgtccttccccaactccccagctccaagagtggaagaaatccccaagatcatctgggtctccctctccacacccagaactgaggcttggatatcttcttcaacatccttgccaagacttctccaccctcttgcatacctccagggacagagagcttactacctcccaaggcagcctcctgcctttggactgctctgactttagcatcagcttaatacacagaagaggtttctgtttttctgtggctctgtccatggcatcccacttgcccactctccttcctggagtgttgaggtcacacattgactcccctgagccctcttctctccaggctaaagaatcccgaaggcatcgaggccatttctgctgcaacaaggtttcctgtctcttcactgtccgcacatttcttagtattccctccaggcttgggcagggagactcgcagatgcacacccacaagtattcagttctcaaactctagacgagtgttggcaactggattgcaagatgctcctaccctgatagatcaggggtggctgctggaggctgtgctggggatctgaggtttggtctgggctcagtgggagacggcagtgcaatcctgatgagtgatgtctgccaggcaccgtaagtttgattagtgatgtctgccacgggcagggatggaaggagcagtgtgatgtctgctctcttctctcccctctgtccctcttcaggaagaaagagctcattctgtctcacaagccaccggcatcctgtatcagcttccagcctcccctcaggctttccagtcaccagggacactcggagccacagcctagagccccgtgttccctggcctgtgcgtctgcccccttctgagatgcagccagaagctctgtgcctgctgcaaagattcaggtggaccctcctctaatctcctcctgctgtgcccgccagtccttgccctcccaccaggtctctgagctcagtgttaccaaattcgccctttaacagcttgctctggcaaccccataaatgacacctgaggtccgtagaagctaagctcctgagacccagggggacctgccactggtaccgcggcccagcctggggcctgggggctgcccctcttgaaccacccacatgcttagccccagctttttggaagaggcaaatggctggtctgaggatgacacacaaaaacaaaaacaaaaaacaaaaaacccatgctgggcaggactgaggcaaattgcacagctttatggctctaatccaggggcatcccaggcttctggggcccacagaagtcagagggaggacccaagagaaagggctggtcatgaagggaaatctggctaaggtgggttcaagggcagacacaagactgcccctcagcagctttctacaaatgtgccaaggaaccctcaatcagccctgattcagctcgccagccagccactggccaccctcttaggctggaaagggaagacaggcagtttctgctcctgttggcattcgctcaggctggtagctatttgcaagactgcctgaggccattccttggaggcaaggcaaagaaagctcagcccaaatcaggcttgagcctccctccagagcacagggagaaacagggtttagctggcttggtccagatacaacccacagcaggttctggtggtggctggggttgtgggggaggggtgggcagggatacctctttgtttcttttcaccccgaaatacaacagcccataacagagacttcctcggaccccactaacagggcaaggaacaagaagactacaccgctcatcacaaaccctgcctgtatcgaaagccactttcctgctctgaagctactgcctcttagagaaagggaatagctctttatgggctgggggtgagggcccctccccagggtccctgttaatttctggccttggtgctcaggcctgtccacagcctcccttgtctatgtctctatccatgcttaaggggcccggacaggatttcccaaaccagccgaggccccagcacccgccgtctccccagaagccccctcctccttcccccatgggtcatatgttgaaagtctattttaaaaactatgttccttgccgtagattgcagagctaatttatcacgtttctctcctgtgagaccccccttttatatgatatatccagaggaagttttgtaatataaaacaggacgcccacactgatggttttgcactggtttttgtgaatgtttcttacaaaaagaaaaaggaacaaagaataaatagtgaccgtgaagaaaaaaaaaa

SEQ ID NO: 1001 - DNA, 3749 bp, Homo sapiens
gcattgctgcgctcccgtgcccaagggagccacgcgccgcgtgcgcccggcagccggccgcccggaggcagcgcagtccgctggcatgggccccgggggcgccccgagctggggctccgggctgaggcgctaaagccgccctcccgcccgcggggccccgcgcccggcccgcccgcctgcccgcccgcggccatggccgtccggcccggcctgtggccagcgctcctgggcatagtcctcgccgcttggctccgcggctcgggtgcccagcagagtgccaccgtggccaacccagtgcctggtgccaacccggacctgcttccccacttcctggtggagcccgaggatgtgtacatcgtcaagaacaagccagtgctgcttgtgtgcaaggccgtgcccgccacgcagatcttcttcaagtgcaacggggagtgggtgcgccaggtggaccacgtgatcgagcgcagcacagacgggagcagtgggctgcccaccatggaggtccgcattaatgtctcaaggcagcaggtcgagaaggtgttcgggctggaggaatactggtgccagtgcgtggcatggagctcctcgggcaccaccaagagtcagaaggcctacatccgcatagcctatttgcgcaagaacttcgagcaggagccgctggccaaggaggtgtccctggagcagggcatcgtgctgccctgccgtccaccggagggcatccctccagccgaggtggagtggctccggaacgaggacctggtggacccgtccctggaccccaatgtatacatcacgcgggagcacagcctggtggtgcgacaggcccgccttgctgacacggccaactacacctgcgtggccaagaacatcgtggcacgtcgccgcagcgcctccgctgctgtcatcgtctacgtggacggcagctggagcccgtggagcaagtggtcggcctgtgggctggactgcacccactggcggagccgtgagtgctctgacccagcaccccgcaacggaggggaggagtgccagggcactgacctggacacccgcaactgtaccagtgacctctgtgtacacactgcttctggccctgaggacgtggccctctatgtgggcctcatcgccgtggccgtctgcctggtcctgctgctgcttgtcctcatcctcgtttattgccggaagaaggaggggctggactcagatgtggctgactcgtccattctcacctcaggcttccagcccgtcagcatcaagcccagcaaagcagacaacccccatctgctcaccatccagccggacctcagcaccaccaccaccacctaccagggcagtctctgtccccggcaggatgggcccagccccaagttccagctcaccaatgggcacctgctcagccccctgggtggcggccgccacacactgcaccacagctctcccacctctgaggccgaggagttcgtctcccgcctctccacccagaactacttccgctccctgccccgaggcaccagcaacatgacctatgggaccttcaacttcctcgggggccggctgatgatccctaatacaggaatcagcctcctcatccccccagatgccataccccgagggaagatctatgagatctacctcacgctgcacaagccggaagacgtgaggttgcccctagctggctgtcagaccctgctgagtcccatcgttagctgtggaccccctggcgtcctgctcacccggccagtcatcctggctatggaccactgtggggagcccagccctgacagctggagcctgcgcctcaaaaagcagtcgtgcgagggcagctgggaggatgtgctgcacctgggcgaggaggcgccctcccacctctactactgccagctggaggccagtgcctgctacgtcttcaccgagcagctgggccgctttgccctggtgggagaggccctcagcgtggctgccgccaagcgcctcaagctgcttctgtttgcgccggtggcctgcacctccctcgagtacaacatccgggtctactgcctgcatgacacccacgatgcactcaaggaggtggtgcagctggagaagcagctggggggacagctgatccaggagccacgggtcctgcacttcaaggacagttaccacaacctgcgcctatccatccacgatgtgcccagctccctgtggaagagtaagctccttgtcagctaccaggagatccccttttatcacatctggaatggcacgcagcggtacttgcactgcaccttcaccctggagcgtgtcagccccagcactagtgacctggcctgcaagctgtgggtgtggcaggtggagggcgacgggcagagcttcagcatcaacttcaacatcaccaaggacacaaggtttgctgagctgctggctctggagagtgaagcgggggtcccagccctggtgggccccagtgccttcaagatccccttcctcattcggcagaagataatttccagcctggacccaccctgtaggcggggtgccgactggcggactctggcccagaaactccacctggacagccatctcagcttctttgcctccaagcccagccccacagccatgatcctcaacctgtgggaggcgcggcacttccccaacggcaacctcagccagctggctgcagcagtggctggactgggccagccagacgctggcctcttcacagtgtcggaggctgagtgctgaggccggccaggcccgacacctacactctcaccagctttggcacccaccaaggacaggcagaagccggacaggggcccttccccacaccggggagagctgctcggacaggccccctcccggccgaagctgtcccttaatgctggtccttcagaccctgcccgaactcccacctctccatggcctgcctagccaggctggcactgccactcacactcggccccagggcccaggagggacagtgcctggagcctgggccaggcccagcccatctgtgtgtgtgtatgtgcgtgtgatgctacctctcctcccgtccctctccaggggccccgcatacacacggccatgcacgcacacactgggcctgggccagggccccagagctcctgcctgagctggaccttatgcaaacatttctgtgcctgctgggtaggggcacgtctgaggggccctgctccaagcctgcaggaccgagggccacagccggacagggggtagcccctggattcaggcacacgaccaccacacgagcacgtgccacgcatgcctcgtgtgctcatctcacacacacccccctcccgggtcacgcagacaccccccaaccacacacatctcatgctgtacacctgaggctgctcacgtctcacgcccagtgttggtgcacatttgcctctcacatgctgccctctccacccacccagggacaccccacggctcctccctgcccctgcccctcccccagccttgaggtgccctgcccggcggggcctgtgaatatgcaatgggagtcccaggctgtacagtggtgagtgtgtgtgtggcgtggcgtgcccgtccccagggctggctggtgccccacgcggggcctgtcatgtgaagctcgtgtcctgactttgtcttaagtgcattcacgcacttactcttggccttatgtacacagccttgcccggccgccggggcacataggggttttatcgggcgtgaatgtaaataaattatatatatatattgctaaaaaaaaaaaaaaaaaa

SEQ ID NO: 1002 - DNA, 7771 bp, Homo sapiens
cagagaggaagtagcgagagaagagagaaaatgaagtcggcgctgggggagcctgcaggagggtggccaacagtggaggaaggtggatttggcttcttttccgcaccccgggcgtgaaagccctctccaacgcgaccccaggaaataagtgggtctcgcctgggcagaaaaggaaaagaatccaggcgagagcgcgtcgctcctctgtcactgctgcccccgaggaactccggctgcttctcatcccggccgcctcgcggggccggacgcagtgcccgaggcgccctgcagatggggcgggcagggaacgggcgctccagctgcgggtgacaggcgccggcccgcccgcctgcctgctcagcgcagtgaccgggcgggcagaggatgccaggcggagggacctgggagcgggatctgagactgccggaggcgcgctacgctccaacttgcatggcctagagaccgctccagctcctgggaccgcttcaccgagtggagtgaagctgcgcgcgggacctggaggcggagacctcaggcagcggctgcagaggggcgagccgggcgcaggagggggcgcgctttctccctgcgggtctcagtaatgaggagactgagtttgtggtggctgctgagcagggtctgtctgctgttgccgccgccctgcgcactggtgctggccggggtgcccagctcctcctcgcacccgcagccctgccagatcctcaagcgcatcgggcacgcggtgagggtgggcgcggtgcacttgcagccctggaccaccgccccccgcgcggccagccgcgctccggacgacagccgagcaggagcccagagggatgagccggagccagggactaggcggtccccggcgccctcgccgggcgcacgctggttggggagcaccctgcatggccgggggccgccgggctcccgtaagcccggggagggcgccagggcggaggccctgtggccacgggacgccctcctatttgccgtggacaacctgaaccgcgtggaagggctgctaccctacaacctgtctttggaagtagtgatggccatcgaggcaggcctgggcgatctgccacttttgcccttctcctcccctagttcgccatggagcagtgaccctttctccttcctgcaaagtgtgtgccataccgtggtggtgcaaggggtgtcggcgctgctcgccttcccccagagccagggcgaaatgatggagctcgacttggtcagcttagtcctgcacattccagtgatcagcatcgtgcgccacgagtttccacgggagagtcagaatccccttcacctacaactgagtttagaaaattcattaagttctgatgctgatgtcactgtctcaatcctgaccatgaacaactggtacaattttagcttgttgctgtgccaggaagactggaacatcaccgacttcctcctccttacccagaataattccaagttccaccttggttctatcatcaacatcaccgctaacctcccctccacccaggacctcttgagcttcctacagatccagcttgagagtattaagaacagcacacccacagtggtgatgtttggctgcgacatggaaagtatccggcggattttcgaaattacaacccagtttggggtcatgccccctgaacttcgttgggtgctgggagattcccagaatgtggaggaactgaggacagagggtctgcccttagggctcattgctcatggaaaaacaacacagtctgtctttgagcactacgtacaagatgctatggagctggtcgcaagagctgtagccacagccaccatgatccaaccagaacttgctctcattcccagcacgatgaactgcatggaggtggaaactacaaatctcacttcaggacaatatttatcaaggtttctagccaataccactttcagaggcctcagtggttccatcagagtaaaaggttccaccatcgtcagctcagaaaacaactttttcatctggaatcttcaacatgaccccatgggaaagccaatgtggacccgcttgggcagctggcaggggggaaagattgtcatggactatggaatatggccagagcaggcccagagacacaaaacccacttccaacatccaagtaagctacacttgagagtggttaccctgattgagcatccttttgtcttcacaagggaggtagatgatgaaggcttgtgccctgctggccaactctgtctagaccccatgactaatgactcttccacattggacagcctttttagcagcctccatagcagtaatgatacagtgcccattaaattcaagaagtgctgctatggatattgcattgatctgctggaaaagatagcagaagacatgaactttgacttcgacctctatattgtaggggatggaaagtatggagcatggaaaaatgggcactggactgggctagtgggtgatctcctgagagggactgcccacatggcagtcacttcctttagcatcaatactgcacggagccaggtgatagatttcaccagccctttcttctccaccagcttgggcatcttagtgaggacccgagatacagcagctcccattggagccttcatgtggccactccactggacaatgtggctggggatttttgtggctctgcacatcactgccgtcttcctcactctgtatgaatggaagagtccatttggtttgactcccaaggggcgaaatagaagtaaagtcttctccttttcttcagccttgaacatctgttatgccctcttgtttggcagaacagtggccatcaaacctccaaaatgttggactggaaggtttctaatgaacctttgggccattttctgtatgttttgcctttccacatacacggcaaacttggctgctgtcatggtaggtgagaagatctatgaagagctttctggaatacatgaccccaagttacatcatccttcccaaggattccgctttggaactgtccgagaaagcagtgctgaagattatgtgagacaaagtttcccagagatgcatgaatatatgagaaggtacaatgttccagccacccctgatggagtggagtatctgaagaatgatccagagaaactagacgccttcatcatggacaaagcccttctggattatgaagtgtcaatagatgctgactgcaaacttctcactgtggggaagccatttgccatagaaggatacggcattggcctcccacccaactctccattgaccgccaacatatccgagctaatcagtcaatacaagtcacatgggtttatggatatgctccatgacaagtggtacagggtggttccctgtggcaagagaagttttgctgtcacggagactttgcaaatgggcatcaaacacttctctgggctctttgtgctgctgtgcattggatttggtctgtccattttgaccaccattggtgagcacatagtatacaggctgctgctaccacgaatcaaaaacaaatccaagctgcaatactggctccacaccagccagagattacacagagcaataaatacatcatttatagaggaaaagcagcagcatttcaagaccaaacgtgtggaaaagaggtctaatgtgggaccccgtcagcttaccgtatggaatacttccaatctgagtcatgacaaccgacggaaatacatctttagtgatgaggaaggacaaaaccagctgggcatccggatccaccaggacatccccctccctccaaggagaagagagctccctgccttgcggaccaccaatgggaaagcagactccctaaatgtatctcggaactcagtgatgcaggaactctcagagctcgagaagcagattcaggtgatccgtcaggagctgcagctggctgtgagcaggaaaacggagctggaggagtatcaaaggacaagtcggacttgtgagtcctaggtgaccacactgcttccctttctcagttcctgaccttcctctgagcccttgagacactttgtaatgctcttttgtaactatcgacaaaggtgtggggaagctgaggtctaggtcttcttaaaggtcaagtctgctctccctcgcctaaagtgcagcagcagctcctctcaagctcactctctaggtctccagggtaggagtgtttttctagcaagaatcttagtcaggagtaagctctgtgcgagagatctgtgaataaccagataaccccagctgccgttaaccttttcaccaggtgccacagtaatatttctggtttttagccctttctctgcactaccaacaagagataaaattgttactcacacttatgtcttactgggttgctggttttcatcgtaacacagaacgaggttatctagggttgtagcttttgatacaactccccgatctagatttattcctacattctgaatggggagcaggtaagagcagagcacctcccactgggggtggggtatttaaaaattaactcattagtatcataaacgtcaaggattgattggaccaggcaagagccatgtttttgagaaggttctggatctctgactccatcctgactgtttagtaagagcatgcttacaccctactgtgaaaaggggaggggatgtggtaagcggaaacagaagacaggcagcagaggcattaaaaatgcataccatgctttcagaacaaaagctctgggccagaaaggcaatttggctaaaaaatgaataagactacttctaatgtaactaagcatctccactatggtgtgtgccttttataaaggaaaagagagaaaaaggcaaagcaaggttgtggccttaggttggacctggaatatcccttattgcctataatggaatatgtgacactgtgggtgaaatgttctacacaccacacactaggccattttcagatcagcagtcacccatcgcttagcatagaaatcccaaaacctccagcccgggaacactataagcttcgaccattcaggaatctgccctgcactttgcatatctgtatagaaaatcaagtcaatcccccatcctcacacccactcatctctgaggagctatgaactggttttggtccctctaatgatcctccagcctcatctaatgccccccaaagactgatacaagtaacctcccctctgcttaggtgtcactttctcagcatatcaagtttaggcagcaagggaaaggaatatgggtcagttctcaaatgtcaatgtagataagagtcatctagtagagaactcatcagagtgcggattgccaagacccttctccagagattatggggttgggggtggaggtctagaggtgagctcagaaacctactgttaaccaacacccccaagtgactgacacaggtggtctaaaaattacttttctagaaacaccattctggaagtttggctgcccacaggcaggaggagaagcatgaagagaaaacctgtttgagaagttttgttttgttttgttttgctttttaataattttagcacacatctgctgactctccttcaacatcctcacccccacccctgggcaccatttaggacaagacttccttatttatcaattacttgatttatcttctcaggactcattgttccacccccaaccaatttgaatgcctacaataagttcaggagctgtgccaagcactttcctcttttacagctggagatcactggaaaggtgtctcagtcacaaaacttctccctctactactggatgaaatgtctgcatttccaccaaaatctacccagtcacccagggaataacaacttaagctgtagttagataacacctagtgattaattggctgagaaaaccctggagtggagggaggctcagagatactgatatggatgtgggagggctctaaagttagaggtcaccaactccacagatgaaacagttcaataatgaggaaacaggtgagccctgaaaacacaaaaggacagttctgtgttgaaacaccccatcccctcacgttctcaccccaggcccagaagtaggttgcaactgcctttggaagattttgccccttagccatccccacccacttgtaccagctaagaatgctggagactctgccaccatgctctgcgtgcccctgaacctctgtgcagcccggaaggctgatgtacaggtgtacctcaatccacattacagccatgctcctaatgtacatggacatttttgtaactcagctcatattctgactgtatttgagaagctggctgtttaagggaacccagaagtgaattcttttgtaaagtaaagcacccttttgtaatgcaattaattatcccttaatgtatctgttttgtaagtctgcatttttgtatatcggatttaccttaagcttctctagtgaggcattctgagcagtggtgatcacatgccagatcgccctgcctatccacaaagtagatgaccaatgcacgctcctcaaacatctttggaggaactacctggccaaaacactggccaggatgcagcaagcagcagcaggggctgacagcaggcttactgccatcaacattgcttgaaatgcctctatgttctgaataaagaaaaaccataattgcttgtggtgaaacgaagcagtcttcatgttaagtagcaatggttatttttattggtagtaactgaacagtgttttgcaatttgtgaaacagtgtattgtgttttgtaaaatgatgtcatgaaatggtgggtccttggaaacctcctttccgttcagctctgcctctgttctttcaactcctttgaggctcaaaaaaaacacaaagatcagaagccttcagatagagggtggtattctggtaaagaagaaagagataagggacgctaccttgcttttctggcacaggaagcacatgataaagcatgctcagatgagctggaacagatatagctacctggttcgtgtaaataagaataatcaaggccccagagtgtgtatgcttccaggtggaggagaaaggggaatctcccaaaatttaaaaacaaattggaagaataaccaggacagccaagtgaagcagccacagggacccaagcagtcgaggtctttaatgtgcctggagatgactctctgctattcatgaatcttgctattgcacaaaccctatcaagagctgctgcttcccttccagccagaaaagtggtaagcggagcaagtgccaagcagaacagaccttatcatctgggtaacagacttctcagtgttggtgctgtgtctgttagagccttagagcaagttaagcacttccttggtgtgggtaaagaataaaggggaaagaaactactttagagcctctttttctcccaactcatatttttgataggaaaaacagaaaacccatccagttcttcagaaattgctttctaggcattaatactactttactatctatactgtttagttattcctttctttacccacctaaactatccatctaatccaggattccctcactctttttttttagttactaatcattttatgaaaataatgtatttataagtattttcttaaggtttgtgaagagtatttgcattgtgtcttcattttaatgtgtttgcaatcgctccgctccaggaagaacggaaatgctgtcttgtgagcatgaagtgaacgggctgttttgctccagccacttttcttgtacaaccacatggatggattagatgtcctcaggtcttttccatcttcagtttctatgactgtggaataaatgttcagatagaaacttca

SEQ ID NO: 1003 - DNA, 3227 bp, Homo sapiens
ggttccggttgctgccgccgctggcgggcggcgagtctggagagagcgcgcagtttgcgcggcggctcggcgcttccctgtcgtcgcactttgtggttgctgcagctcgggggcctgggctgcccctgacaccccttctgggcgatggtgcagcccaagggcgcctccatcccccgccgctgccgctaacccgggtcccccactccatggccgcctcggcgccgcccccaccggacaagctggagggaggtggcggccccgcaccgccccctgcgccgcccagcaccgggaggaagcagggcaaggccggtctgcaaatgaagagtccagaaaagaagcgaaggaagtcaaatactcagggccctgcatactcacatctgacggagtttgcaccacccccaactcccatggtggatcacctggttgcatccaacccttttgaagatgacttcggagcccccaaagtgggggttgcagcccctccattccttggcagtcctgtgcccttcggaggcttccgtgtgcaggggggcatggcgggccaggtacccccaggctacagcactggaggtggagggggcccccagccactccgtcgacagccaccccccttccctcccaatcctatgggccctgctttcaacatgcccccccagggtcctggctacccacccccaggcaacatgaactttcccagccaacccttcaaccagcctctgggtcaaaactttagtcctcccagtgggcagatgatgccgggcccagtggggggatttggtcccatgatctcacccaccatgggacagcctcccagagcagagctgggcccaccttctctgtcccaacgatttgctcagccaggggctccttttggcccttctcctctccagagacctggtcaggggctccccagcctgccgcctaacacaagtccctttcctggtccggaccctggctttcctggccctggtggtgaggatggggggaagcccttgaatccacctgcttctactgcttttccccaggagccccactcaggctccccggctgctgctgttaatgggaaccagcccagtttccccccgaacagcagtgggcggggtgggggcactccagatgccaacagcttggcaccccctggcaaggcaggtgggggctccgggccccagcctcccccaggcttggtgtacccatgtggtgcctgtcggagtgaggtgaacgatgaccaggatgccattctgtgtgaggcctcctgccagaaatggttccaccgtgagtgcacaggcatgactgagagcgcctatgggctgctgaccactgaagcttctgccgtctgggcctgcgatctctgcctcaagaccaaggagatccagtctgtctacatccgtgagggcatggggcagctggtggctgctaacgatgggtgacgctggtgaagtggcccagggaagtgcacatgtctctccctgctcttccagggtgatttttttgatgtttggctcttggtccttgtttccactggctttccatccccatggggcagaaacagtggctcctgggagcagaaaaggaattgaggtgggcaggcagaagagcctggattgctcactgttttgggaaacttacatgttgagatctacagagatccaggaaaccaaagccctgctgagcagagccattttgtggctatttctggaggcccaggagtgtggctgcaagagaaaaggggctggaggaagatccggagggcaggggtgttccctctgctgatgatggatgcccctaacacctgtgcctaacacccctactgaaccccacagctccagccttagtttttggagtcaagtgttaaaggtttctggccagaggaattggggtcttgccatccctgcaatagcccttttatgggctctgggagacagctttagggaataaatggggattttcccctttttctacccactcctttgcttcctccaagacttacccaactccttccccctcagagaaccaaatagcctgaggaagcaggagagttcctggttatggcagtttcttggtgatttggggcttcaagacagtaggtgagagatgctgtcaggacgtatcttcttcataccaaagtcactggtcctttctcagcctctctcgtgcttttctcctaatgaccatatttttgccaaaaattgggatatgttatctgacagaccagaatatttgaagtttgggctgtcctgaaagtctggactttggtggtaccctcctcccccagcccatctgttgcacattatactccgtgtgttcttcaactttcggcgcccttattcccctgccttcctggcttgattgaaggaaagcttgaaaaggcgcagagccctatacctcatttcctccatgataaaaggatccaagtgaggccctgtcacagcctgtgggtaggggatgcggcgggatcctcattgccatggtactcaaaggtagaagagcctggagtttgttgcttctctttgctattctttcatatcctcttgggcctggtgattaattagcaattctcattcctctcagccaaaggcctgcactgggctttatttgtctttttttattttttaagcactgcctgccagagatgggcctggggcctgatgaggaccttagcgctgctcgttctccttttctgttcatgcacacattcctccatggggtggggaaggcaggcatggggtgtggccctcggagaagttaggagtcccccagctcaagatacagtggcaaagacctagtggtcccctacccccacttctctcagttcctggcatgaggagagaagaccctgctctggtggagctgacaacctttgaggctgggaggagagcagcctctgggcatcgttcccagtgtccctcacactaaaacggcgtagatggcaaccccccacccccaccccgctgctcaactcttgtgtttgttgttctgtttgccccatttatctgttgctgtttttgtgttgtcttcccctgctccgcattttgtaaaatggcccctgggggagtgtttttgctggatctgctccctctcgctctctcactccactactttttggaacaaagtgatggcagaatgcggtggtggtgggggtcttttgtactgttggattaataaaatgattttaaaatcccaaaaaaaaaaaaaaaaaaaaaaaaaaaaaaaaaaaaaaaaaaaaaaaa

SEQ ID NO: 1004 - DNA, 2274 bp, Homo sapiens
gtgaaaatggcgcccagctcgaaatcggagcggaacagcggggctgggagcggcggcggcggccccgggggagccggagggaagcgggcagcagggcggcggcgggagcacgtcctcaagcagctggagcgggtcaagatcagcggacagctctcccctcgcctcttccggaagctgcctccccgggtgtgcgtgtccctcaagaacattgtggatgaggacttcctctatgcaggacatatcttcctgggcttttccaaatgcggccgctacgtcctctcctacaccagcagcagtggggatgacgacttctccttctacatctaccatctgtactggtgggagttcaacgttcacagcaagctcaagctggtccggcaggttcggctattccaggacgaggagatctacagcgacctgtacctgaccgtatgcgagtggcccagcgacgcctccaaggtcatcgtcttcggcttcaacacccgctcggccaacgggatgctcatgaacatgatgatgatgagtgacgagaaccaccgtgacatctacgtcagcaccgtggccgtgccaccgccaggccgctgtgctgcttgccaggatgccagccgagcccacccaggagacccgaatgcacagtgcctacggcatggcttcatgctgcacaccaagtaccaggtggtctaccccttccccaccttccagcccgccttccagctcaagaaggaccaggtggtgctgctcaacaccagctactccctggtggcctgcgccgtctccgtccactcggcaggtgacaggagtttctgccaaatcctgtatgaccacagcacctgccccctggcgcctgccagcccccctgagccccagagcccagagctgccccctgccctccccagcttctgccctgaggcggccccagcccgttcttctgggtctcctgagccctcgcccgccattgccaaagccaaggagtttgtggctgacatcttccgccgggccaaagaggccaagggcggggtccctgaggaagcccggcctgccctgtgcccaggaccctctggcagccgctgccgtgcgcactctgagcccctagccctgtgtggagagacggcaccccgggacagcccccctgcctcggaggcacctgcctccgagcctggctatgtcaactacaccaagctgtactatgtgctggagtccggagaggggacggagccggaggatgagttggaggacgacaagatctccctgcccttcgtggtgactgatcttcgtggccgcaacctgcggcccatgcgggagcggactgctgtccagggccagtacctgacagtggagcagctcacactagacttcgaatatgttatcaatgaggtcatccgccacgacgctacctggggccatcagttctgttctttcagcgactatgacatcgtcattctggaggtctgcccagaaaccaaccaggtcctcatcaacattggcctgctgctcctggccttcccgtcccccactgaggagggccagctccgaccaaagacctatcacaccagcctcaaggtggcatgggacctcaacacagggatcttcgagacagtcagtgtaggcgacctgactgaggtcaaagggcagaccagcggcagtgtctggagctcctaccgcaagagctgcgtggacatggtcatgaagtggctggtgccggagagcagcggccgctacgtcaacaggatgaccaatgaggcgctgcacaaagggtgctccctgaaggttctggcggacagcgagcgatatacgtggatcgtgctgtgagggccaggccgccccggacactgactccaactacctccgtggcctgggaccggcccccttcctggggtggcctcttcctggccggctggcccaccgactgatgaccggcactagtgttagcctgcggaacggggctgggcagggcagcctctgttggcctgagggtctggacgctttttatttatgcctatttaagttgggaaggggcagagagagggcgccccctgccccaccagcctgagtgccccgccttcaccccgagctgggcatgggcctggcccctcgtgcatttgcccttttctcggctacagctgtggacgttgccctcggggaggtcgaatggaccccattccccctgccctgcccgcccccagcctccccacccaggccggcaacctggccatccccattccgttcttcttcatgtaataaatgttttaatttctgaaaaaaaaaaaaaaaaaa

SEQ ID NO: 1005 - DNA, 3102 bp, Homo sapiens
attggctttccggccggaagctgcggcgcgacccggctgcgcatgcgcctctcacacgtgctgtcagaacgccgcctcctccgcttgcggccggtctgcaccatgctgcgaacgtccgtcctccgcctgctaggacgcacgggggctagtaggctgtctctcctggaggacttcggcccacgctactacagttcgggctccctcagtgccggcgatgatgcttgtgatgtgcgcgcctacttcactacacccattttctacgtgaacgcggcgccgcacatcgggcacctgtactcggcactactggcggacgccctatgccgccaccgtcgcctccgaggtcccagcacggccgccacgcgattctccactggtaccgacgagcacgggctgaagattcagcaggcagcagctaccgcgggcctggccccgaccgagctgtgcgaccgagtctctgagcagttccagcagcttttccaggaggccggtatctcctgcacagatttcatccgcaccacggaggcccggcaccgggtggctgtgcagcacttctggggggtgcttaagtcccgcggtctgctctacaagggcgtctatgaaggttggtattgcgcttccgacgagtgcttcctgcctgaggccaaggtcacccagcagccgggcccatcgggggattcgtttcctgtatctctcgagagcgggcatccagtctcctggaccaaggaagaaaactacattttcaggctttcccagttccggaagccactccagcggtggctgcggggcaaccctcaggcgatcacccccgaaccatttcatcacgtagttcttcagtggctggacgaggagctgcccgacctgtccgtgtctcgcagaagtagccacttgcactggggcattccggtgcccggggatgattcgcagaccatctatgtatggctggatgccctggtcaactacctcactgtaattggctacccaaatgctgagttcaaatcttggtggccggccacctctcatatcataggtaaggacattctcaaattccatgccatctattggcctgccttcctgttaggggccggcatgagcccgccacagcgcatctgtgtccattcccactggacagtctgtggccaaaagatgtccaagagcttgggcaacgtggtggatcctaggacttgccttaaccgctataccgtggatggcttccgctactttctccttcggcagggcgtccccaactgggactgtgactactatgatgaaaaggtggttaagttgctgaactccgagctggcagatgccttgggaggtctcttgaaccgatgcactgccaaaagaataaatccttctgagacctacccagccttctgcactacctgcttccctagtgagccagggttggtggggccgtcagttcgtgctcaggcagaggattatgctctggtgagcgcagtggccactttgccaaagcaggtagcagaccactatgataactttcggatatataaggctctggaggccgtgtccagctgtgtccggcaaactaatggttttgtccaaaggcatgcaccatggaagctgaactgggagagcccagtggatgctccctggctgggtactgtgcttcatgtggccttggaatgtttgcgagtctttgggactttgctgcagcctgtcaccccaagcctagctgacaagctgctgtctaggctgggggtctctgcctcagagaggagtcttggagagctctatttcttgcctcgattctatggacatccatgcccttttgaagggaggaggctgggacctgaaactgggcttttgtttccaagactagaccagtccaggacttggctggtgaaagcccaccggacctagaaactcagttcttaccggcttgtggtaaaaaagcaaatgtgttatctttttattttttattttcaggaaagttatactagtattttcttaagtgtggaatcaaatgagcacataagctgtgtccctgtgaaaagaggtttgtagcctttcaggtgcctgctcctattcatttctctgtgaccattgatcactgtcctttgtgcattgtgtgtctaagatgtcttcaggggaaagatgggtaagagacagtgttgctaatgctgttccttctttgtgcctccttccaaaccacagttatttgcccaaactacctctcgtggctggtttttcattggcctggcctctgcttctcaggctaattagtgactcctttctttgagggtcagggttggaggccccttactggtggttttacagggggatcctactttgttacacatgttgggtttcctgataaaaagagagtattttattaaacccttgaaccagtgtcctagaccagatgatttttgcccatgtgtatccccatttaaattcctacaactaagtctccctgctttgttaatagtccaacagttgggttgtgtaacatcacacttcaaccggtagatggctctaatctcacacatttacttactaaagattgaggattcggaatatttagaataaattagttttctgctttctaattttgcagatctttacatttttattgcttttcttaaaataagggatagctttgcaaccactattgttttaatggaaagcaaaaaacccccccaaacttatcagaatcctcgttctttttcagactactgaaaaatgacatttactctgttaaatgtttaataagtgaataagtaaatgtatcaagttgtttatataataaattataaaactcttgaggcacttggtatgttaaaaattttaaactttagtaacattaggttacaggtatgatttaaaaatttgtaaatagttcaaaagggcaatgttttctttatatttcttatagtcttaattttgttatccatgtgcataatttacctcatgatttcttttggtcaatcaggatctttaatacaatatagaaattgtgtaatagttattataaatgttaatacacaactttcaggtaattttaactgattatttcttttgctcttttaacttaagttattaaagtttaaaagttcgtaagtaaaaaaaaaaaaaaaa

SEQ ID NO: 1006 - DNA, 2985 bp, Homo sapiens
gaaggagccgccatttgccaccgccgagcgcacgggccgagccaagcctgatcccggagccggagggggactgggaccgagagaacggcgatggggggcggccccgccgcaggaggacccgggcgcgtaaccccgggggcccggcccgctccagacccagacccgcggggtgcggcaccctgagcccccctccccgccccctgccctggccatggccgcccaccccgccgcccccgggccgccagcccgctcggccccgcaagcaccggagccccggcggtggcagcagtgaacggctgtcgcaggccccgaagaccccggcccggctcggctctctagcgcgcgcccccttcccggccttgtcctctcccctccccccgccgctagcgagccccccttgcacgctgccccccgcccccggtgtccggacgatgctcaagtctcggctccgcatgtttctgaacgagctgaagctgctggtgctgacaggcggggggcggccccgggccgagccgcaaccccgggggggccggggaggcggctgcggctgggcgcccttcgctggctgctccacccgggacggcgacggcgacgaggaggagtactacgggtcggagccgcgggcccggggcctggccggcgacaaggagccgcgggccggacccctgccgccgcccgcgccgccgctgccgcccccgggcgcgctggacgccctgtcgctcagcagtagcctggacagcggactccgaacccctcagtgccggatctgcttccagggcccggagcagggggagctcttaagcccctgccgctgcgacggctcagtgcgctgcacgcatcagccctgcctcatccgctggatcagcgagaggggctcctggagctgtgagctctgctacttcaagtaccaggtcctggcgatcagcaccaagaacccactgcagtggcaggccatctccctgacggtcatcgagaaggtccagattgctgccatagttctgggctcgctcttcctggttgccagcatctcctggctcatctggtcctcactcagcccttcagccaagtggcaacgacaggatctgctctttcagatctgctacggcatgtatggcttcatggatgtcgtctgcataggcctcatcatccatgaaggctcctctgtctaccgcatcttcaagcgctggcaggcagtgaaccagcagtggaaggtcctaaattatgacaagaccaaggacataggaggagatgcagggggagggacggcagggaagtcaggccccaggaactcacggacgggccccacctctggggccacgagccgccccccagctgcccagcgcatgcggacgctcttgcctcagcgctgcggttatacaatcttgcacctccttgggcagctgcggccaccagatgcccgttccagctcccattctggccgagaggttgtcatgagggtcactacagtctgaactggactccaggagcagggatcttgagtcaatgcatcagtcagagaagaactctcatggctgctggaggtaccagctggacaaggtgtttggggcatgctgcccccgtcaccgaggatctgtgtgggtagcctcaagctggagacattgtctggcctcactgcccactgggtagagacacctggatgacatttcagtacccgctggcagctcctcccactcatccagagacggccggtgggcaggcggggagagcagctttccttccctggagagaaccgtctttacctcagctcctagggcctccagccccccagctccaccacggtgacttggtgaagggggaccaatgccagaagaaaggggctgtagacccctattccccaccccatggccacagggcatctggcaataagactagtatacattgacctcccgttccctgcatgagggcggggagttccccctgctccatcccccattgcatgggggaagggcataaagaatcatttatatgcacgtggagactcctttctcatctggggcttttctggagggttgggagatgtggggaggtttctctgcacaggttgcaaatcccaaatgcagcagtgggttctgagttgtaggtgtgactcccacttgctggtgaataattcatgttggctgctaggtggcagcactccgaggtatctaaagggtagacctggacctgccacctatgagttgtgtgatatagaaaaaaatctcttagctctggttttcctgtctacttcatagggttggaataaggataaatgagggacaggttggatgccgttgcagagaaaatcagcaatgacataaagagatttctagaatagttgatggtccatttatttcaaatagtagctggtgtaacaaattctaaaatgtgtttttcatctggagttgcacagaatcatggaattttgtgttgagtgacataataggtatggaaatatgaggggaaatagacattgcaaatgtgaagcatggtggttatttgttaagaatgagaactcctctgactctaaatatttgggcctgtgggctggggaaggctggagccatctgccttgttctggagatcatctgggttctatcagtccttctcaagtactgtgctcacccagaaaagcagtgtgaagtgaatttggactcatttggagtgagatggagggaatccccccactcagtgttatgagtctccaaccccagtttaagctatttccatggcagtttagggtcacaggtttgatcccggtgtgcccagccagtggtattaatggatggcattatgtttggaggcagcagcatagaggactgttgtttatagagaaaagatttgggaaggactgtttacaatgtgggtcagcctgaagcctgggcactttcttctgtgaccttggggttgtgtattatatgaatgatgctgtttttaagtaaaccattcaacagcaattaaataattccttcattcacggctaaagtc

SEQ ID NO: 1007 - DNA, 3565 bp, Homo sapiens
attacacttgagggcaaagaggttaggaagccggcatggcgctccggtcaataaaatcgatagctggaagctgcctgtgttccaggcaaaggcggtgcggtagcagcgccgccattttccccgaaggcatcttccggtgcctttcacccaagttcgggcaggagtttcctgaataacagcaaaaggtttccgttagccccgcgggcgaccaattccgattccctccgggcctccccggccacgctcagccctggtccggcaggggctcctcgatcccaggggccgccagcgcccgagggccgaggcctggacacggaaggccgtggcgccggcttctcgggtcccatggcgccaccttcggctccgctccctgcgcagggaccaggaaaggccagacccagtcggaaaaggggcaggaggccgagggctctgaagttcgtggacgtggccgtgtacttctccccggaggagtggggctgcctgcggcccgcgcagagggccctgtaccgggacgtgatgcgggagacctacggtcacctgggcgcgctcgggtgcgcaggtcccaaaccagccctcatctcctggttggaacgaaacaccgatgactgggaaccggctgctctagatccgcaggagtacccgagagggctaacagtccagagaaaaagcagaaccagaaagaagaatggggagaaggaagtattcccgcctaaggaggcaccccgaaaggggaagcgaggccggaggcccagcaaaccccgactgattcctaggcagacgtccgggggccccatctgccctgactgcggctgtaccttccctgatcatcaggccctggagagccacaagtgcgcccagaatctaaaaaagccttacccttgcccagactgtgggcgccgcttttcctatccatccctgctggtcagtcaccggcgggcacactccggcgagtgcccctatgtttgtgaccagtgtggcaaacgtttctcccagcgcaagaacctctcccagcaccaggtcatccatacaggggagaagccctatcactgccctgactgtggtcgctgcttccggaggagccggtccttggccaatcaccggaccacacacacaggtgaaaaaccccaccagtgccctagctgtggacgtcgcttcgcctacccctccctgctagccatccaccagcgtacacacacgggagagaagccctacacttgcctcgagtgcaaccgccgcttccgccagcgcacggccctcgtcatccaccagcgcatccacacgggcgagaagccctacccgtgcccggactgcgagcggcgcttctcctcctcctctcgcctggtcagtcaccggcgtgtgcactctggggagcgtccctatgcctgcgagcactgtgaggcccgcttctcccagcgcagcacgctgctccagcaccagctcttgcacaccggagagaagccctacccctgcccagactgtgggcgtgccttccggcggagcggctccctggccatccatcgcagcacgcacacagaggagaagctgcacgcctgcgacgactgtggtcgccgctttgcctacccctcactgctggccagccaccggcgcgtgcactcgggcgagcggccctatgcctgcgacctttgctccaagcgttttgctcagtggagccacctggcccagcaccagctgctgcacacgggggagaagcctttcccctgcctcgagtgtggccggtgcttccgccagaggtggtctctggctgtccacaagtgtagccccaaggccccaaactgtagccctagatctgctatcgggggctccagtcagaggggcaacgcccattagaaggggaaggactgcctacgttcatttcattttatggagggtcccagaaaagggaaggaggagccccaggtcatacagggcagagtcagaactaaacccgggtctcctgctgcacagagctgaactttgtatcttgcaatgcgctggctgcctccctgtgcgtgtctggaacagtcccattaggagaggtgacgtcatttgcttaaagttttccaagctaccctatcctaaaatagtttgtgtggatatcagggctaaaagttctccccatctattttaggggctgtctgcttttctagtctgtccacacagggattacctgtcatcttgcatgcaatcaggagaatctcataggggcaggaccttcccctactctgcctcttcctccatactaggttggaaaaatctggtttagcccactttttgcaacactcctgccaagtggtcttctacccattgcttgaaaatctctcttgacagggagctcactacctcacaaggcaggtcatttcattgtgggatctatagaaggttaagtaccacattctcctctaaaccttgcctacgacatgtttaatacttcatctacatagcagcccttcagataatcacaaccactttgcccccaagttttcaggttaagtagcatgaatttggtcattccttaaagacagggtttcaatttccacacatgatctctgcaaacaggcactgggttttcagtgtcctttttgaagggtcatataaaaataaggtaacaccacagtgccactacaccttctggggctggacttgtttcagcagctttggttgcactgaatttgggggagctgcatggtaccaggggtttattgggttgcagatatataaatgccctaaacttaaaaaaaaaaaaaaaagctataaaactaagtcttcatcttgtatttggaaaattggttcaagctgggtatgagacataagtgtagtcagctctgggagaaggttgctcttaaggagaagcagggacctgtggtttagcagcaggaagtgcaaatgggactggcttgtgctctacctggcagacctggattggcttcaggcagccagtgcctggaaaagcctggagaattgggccgtacttgaccctgattctcatcaggcacagatgaatcacaggcacctaagaatcggcacagaacttccatgaggcctcagtcagcattttttcacaaaatgagctgaggccattcaaggaggctagaaagagggaactgaatccagagaggaagagtctatagtcatcaagttgtatccatgccagcctccctccacagaggtggcagcagcgtggctcaatctgatccacctccatggcacccactgggtaggtgcttcataaagctttaccgagttaaatgtgaacaaggcctaccactttgccttgggcagctgcaccaaattagaatttccagatgtgactcatctcatattccaacagctggagtgggtcatcctttacccctgtggctccttcctacagctctcctgatctcagcacaagcaggggagcagctgggggaacacagctttatgtaattacctctgttcaatatttagcaagttgcattgtaacattgtaactgtttgtttctccttggatgatgagctacccccaagaaggggtcatatcagattgggtctcattaaaatgtctgatgaatgaaaaaaaaaaaaa

SEQ ID NO: 1008 - DNA, 1279 bp, Homo sapiens
gggagggagagaggcgcgcgggtgaaaggcgcattgatgcagcctgcggcggcctcggagcgcggcggagccagacgctgaccacgttcctctcctcggtctcctccgcctccagctccgcgctgcccggcagccgggagccatgcgaccccagggccccgccgcctccccgcagcggctccgcggcctcctgctgctcctgctgctgcagctgcccgcgccgtcgagcgcctctgagatccccaaggggaagcaaaaggcgcagctccggcagagggaggtggtggacctgtataatggaatgtgcttacaagggccagcaggagtgcctggtcgagacgggagccctggggccaatggcattccgggtacacctgggatcccaggtcgggatggattcaaaggagaaaagggggaatgtctgagggaaagctttgaggagtcctggacacccaactacaagcagtgttcatggagttcattgaattatggcatagatcttgggaaaattgcggagtgtacatttacaaagatgcgttcaaatagtgctctaagagttttgttcagtggctcacttcggctaaaatgcagaaatgcatgctgtcagcgttggtatttcacattcaatggagctgaatgttcaggacctcttcccattgaagctataatttatttggaccaaggaagccctgaaatgaattcaacaattaatattcatcgcacttcttctgtggaaggactttgtgaaggaattggtgctggattagtggatgttgctatctgggttggtacttgttcagattacccaaaaggagatgcttctactggatggaattcagtttctcgcatcattattgaagaactaccaaaataaatgctttaattttcatttgctacctctttttttattatgccttggaatggttcacttaaatgacattttaaataagtttatgtatacatctgaatgaaaagcaaagctaaatatgtttacagaccaaagtgtgatttcacactgtttttaaatctagcattattcattttgcttcaatcaaaagtggtttcaatattttttttagttggttagaatactttcttcatagtcacattctctcaacctataatttggaatattgttgtggtcttttgttttttctcttagtatagcatttttaaaaaaatataaaagctaccaatctttgtacaatttgtaaatgttaagaattttttttatatctgttaaataaaaattatttccaacaaccttaatatctttaaa

SEQ ID NO: 1009 - DNA, 2004 bp, Homo sapiens
gccccggattgagccctccccgcccgggctcccgacgcgccgaggtctcggggaggcccggacgcgccggtcgcaggcccggccggcgagcggcgggcgggcggcggggagggggctgcgcggggcgggcggcgggcccggcgctattccggccaggaggcgggaggcggttgccggctgcgcgccgaagcctgcgcgccagtcctccggccactgctatcgcccacggccgcaccatggccctaaaggccgagggcgccgcactcgactgcttcgaggtgacgctgaaatgcgaggaaggggaggacgaggaggaggccatggtggtggccgtaattccgcggcccgagccgatgctcagagtgacccaacaggagaagaccccaccgcctagacccagcccgctagaggcaggcagtgatggctgtgaggagccgaagcagcaggtgtcttgggagcaggagttcctggtgggcagcagcccaggaggcagcgggcgggcactgtgcatggtgtgtggcgctgagatccgggcaccctcggccgacacagctcgctcgcacatcttggagcagcaccctcacaccttggacctgagcccttctgagaagagcaatatcctggaggcctggagtgaaggggtggccctcttgcaagacgtgagagctgagcagccgtccccacccaactcagactcgggccaggatgcccacccagacccagacgccaacccagacgctgccagaatgccagccgaaatcgtcgttctccttgactctgaggataacccatccctccctaaaaggagcaggcccaggggactccgccccctcgagcttcctgctgtccctgccacagagccaggaaataagaagccccgtggtcagagatggaaggaacccccaggggaagagccagtcagaaagaaaagaggcagacctatgaccaaaaacctggaccctgacccagagcccccatcgccagactcgcccacggagactttcgcagcaccagccgaggtccgacacttcactgacggcagcttccccgccggcttcgtcttgcagctcttctcccacacccagctcaggggcccagacagcaaggactcacccaaagacagggaagtggcagaaggaggccttccccgggcggagagcccctctccagctccccctccggggctccgcgggacactggatctccaggttatccgcgtgcggatggaggagcccccagcggtcagcctcctgcaagactggtccaggcacccccagggcaccaagcgtgtgggagcaggtgacacctcagactggcccacagttctgtcagaatccagcaccactgtggcagggaagccggaaaaagggaatggagtgtaaattcttgctttcctggggagggagggagggatgaggcagcgtcccccagtggcttataactcagagctgcctggctcacccacctggtggagagagtagaaacaggtgccagggcaggagggggctggggcagcatccactgttatttcggggcactggaaagtgtctgttcctggccaggcctgaggtcggcgagggtggctgaggctgttgtgcagtagggcactgggcctgtggagaacacctaccccagtccttcgctgacccccacctctgtttgtcccccatgacctcctcccaccctccccctgctccccaccattctcccttggcacagtgccttacacaagagtggtcataagggggtttgaactgagtcccactacctcgggggacacctctcctccccacttgttcaggcttctaaaccaggaggcctccattacctcttcctgtcccaaccctgcagaggcctgaagctgggcctgggcaccccattcactcccgttctcatttacatctgttttcctgttgtatatatcacctttgttgacaataaattatttttttttattaagaaaaaaaaaaaaaaaaaaaaaaaaaaaaaaaaaaaaaaaaaaaa

SEQ ID NO: 1010 - DNA, 3755 bp, Homo sapiens
aagacaagcgggcattggccacagcagcgcgaggcgggcacggggtattgtccggctccggcggcggcggtcggtgctgcgagagcggcggcggcggcgcgggtcggcagcgggagggcgcgcggccgagcggaggcggagtcggcgccgagaacatggctggaggcaaagctggaaaggacagtgggaaggccaaggctaaggcagtatctcgctcacagagagctgggctacagtttcctgtgggccgcatccacagacacttgaagactcgcaccacaagccatggaagggtgggtgccactgctgccgtgtacagtgctgcgattctggagtacctcactgcagaggtgctggagctggcaggtaatgcttctaaggatctcaaagtaaagcgtatcactccgcgtcacttgcagcttgcaatccgtggtgatgaagagttggattctcttatcaaggctaccatagctgggggtgagaagagaaggtgttcttagatcagaagatgccattgtattaggtgacggcaaggttttgctgatttagtggaacaagattctactgggatgtgtgctgagctgaaccaaggaactgcccgaatgtgctgaacaaggacatttgcttctcagatacgtgaattcaattttaagcaagattcttgatctgcttcagagcagctttgatttaaagtaatttcagagcgcttttccttgcatgagtaattttctgaatgtataaaatattctatttatgtttgaccttttggataaactgtgttgctgcagtgttggtccacactaccatcctaagtgaagacttagtaagtctgaggatctccaggcactggaaagagtgagaacctgggagtgaaagggttatagttagtgttcatttttcgggttttgtttcatagggagtcctgagtggggtaacctgaaatgttttaacagttgaagatcatcctattcctatccccagtaaaaataggcctttccacaatcttctaccagttaacttagctttttttttttttttttcctttaatagagtctcattcttgtcacccagactggagtgcgatggcacgatcttggctcactgcaaccctccctcccgggttccagcgattctcctgcctcagcctcccaagtagctgggattacaggcgcacgccaccatgcccagctaatttttgtatttttagtagacgtggggtttcaccatgttggccagactggtctcaaactcctgacctcaggcgatccgcccgtctaagccttccaaagtgctgggattactggcaggaaccaccaggcccagccaaccagcatttcttaaggtgaaaatacatggtgttaatttatattttgagtgagacccagtccagctgctataactgcttggacacttggcagaggacagagtactgcaaaagtgtctaagggagacagcattttgccttgggtgctgtagatgtacaagagaggttccaggagggggtgataggcagaattttggtccccatcaccttccctgcccagtgttatgcctatgaatgtgttacattatgtggtaaaagggactttgcagatgtaactaaaatttctaaaatagagatattatcctggattacctgggggaacccagtgtaattacatgaacccttaaaaatggaagaggatgcaggagtcagattcaaaggaaggcccaaggtgctattgctgacttgaagatagaggggccatgtggaaatcaagagaaggaagtgaatccttccagtgagcttggaagaaagcaccttgaggcacagatgagaagcttggccttacctgatgccttgattttagcctggtgagaccctgagcatataaatttgctgtgctatgccacacttctcacctacagaaacttagtttaaagccactaagtttgtggtaatttgttggctttaggcccctgagggtagagatttatggcttgtgttacaagtagagagcagtggagagttgggctttgtaattctttcaagggtgattgtagttctggagtcctatctacctgggttcagatctttgttggccagtccctggctgtgtgacttcactgctttaagcctctgtcttcatccttaaagtggtgatgatagtacctacctcactctgatctctgaatgagaacacatgtaagacacttagcacagttcctggtgctcaaagagttccaacacctgaaagcaccatggccctgtttgtttttcagtcaagatttctaaaagccgttattaccagaggttcagtgagaacatgggcagggtaaactcaaaatggagaacataaaaactgggactcccagaccagtcacttagaagactgctgcaggaagtaccaaggtcgttaagaatcagtaataataataagtaatgtgtgaatccattagaatgttgagaagtagacctttgacatttcagaaaaatgtatatctcagacacagccatatgtattgttatccctgagttggaagagcatcacagggcatagtttcacaaaagcttcaaaaaatatactaattgctggtaatatgtgaactaacagaaaaaaatagccatgttaaaataggagtgcctgacaattagctctattcatcttgtctcctagctgtaagcaccctagattcaaattatgcacctagaaaactaaattactatgtatgttataggcctttgaaatggatacatgaaaattagtgaaatcagaatgaacgtttcgcctgccaaagatatgtatttttataagtgatacaagggccccatgagctccatggccacatctgtacaaaacaggccctcctttcaggaactggtctcgagagagcaaaggggtcaactccctaaatggcagctgagacagtcctccctggtggcatggccctgtttcctgttgatatggtgatagttggagagtcaaatttttaccagaatttgtgaatatcatctctggttaatgattacacaaaaccttttaaaattttaaaaaattatttctaattctataaataaactctgcagttgtacagccactgtacagctaacatctcaacactggaaatgaggctggtttcttccagtttggctcagattcttcagggaagcccagttaagacaaacagctctctatactcaatccttactttgctgagaagatacaggcctgcccactcgctcccacctgctcttcacgaggagtcctttattcctgcatgtttcctgttctttgggacctttaggagctaacctccacagatgctgatagtctgtagagtcaggaataccatgtaacatgttgaagtagactaaagattagttctttggcaatagcccagtctggacttactatgtacttttgaaaataaaactgcttatttgtaaactctgtaattaggaccttttgctatttgagttatattcctttctaacttcaaacgtctgcattcatgtataatagccattttatgcacagatgaggtgattcccacactttttttcgcagatgtttcattatctggatgagtgtattacataataaatttgaataatggtagtcttccaaatgacaaaaagcaagctagttgatttgtcaattttgagtttaaatgttttgactgcttatcagcaaaaaaaatcaaagaatagcatactaatattaatggaaatgcagagtatatttaattggcatgattttttcatggatgtgtgc

SEQ ID NO: 1011 - DNA, 2272 bp, Homo sapiens
attgctgtgtcaagttccagagaaaagcttctgttcgtccaagttactaaccaggctaaaccacatagacgtgaaggaaggggctagaaggaagggagtgccccactgttgatggggtaagaggatcctgtactgagaagttgaccagagagggtctcaccatgcgcacagttccttctgtacctgtgtggaggaaaagtactgagtgaagggcagaaaaagagaaaacagaaatgctctgcccttggagaactgctaacctagggctactgttgattttgactatcttcttagtggccgaagcggagggtgctgctcaaccaaacaactcattaatgctgcaaactagcaaggagaatcatgctttagcttcaagcagtttatgtatggatgaaaaacagattacacagaactactcgaaagtactcgcagaagttaacacttcatggcctgtaaagatggctacaaatgctgtgctttgttgccctcctatcgcattaagaaatttgatcataataacatgggaaataatcctgagaggccagccttcctgcacaaaagcctacaagaaagaaacaaatgagaccaaggaaaccaactgtactgatgagagaataacctgggtctccagacctgatcagaattcggaccttcagattcgtaccgtggccatcactcatgacgggtattacagatgcataatggtaacacctgatgggaatttccatcgtggatatcacctccaagtgttagttacacctgaagtgaccctgtttcaaaacaggaatagaactgcagtatgcaaggcagttgcagggaagccagctgcgcatatctcctggatcccagagggcgattgtgccactaagcaagaatactggagcaatggcacagtgactgttaagagtacatgccactgggaggtccacaatgtgtctaccgtgacctgccacgtctcccatttgactggcaacaagagtctgtacatagagctacttcctgttccaggtgccaaaaaatcagcaaaattatatattccatatatcatccttactattattattttgaccatcgtgggattcatttggttgttgaaagtcaatggctgcagaaaatataaattgaataaaacagaatctactccagttgttgaggaggatgaaatgcagccctatgccagctacacagagaagaacaatcctctctatgatactacaaacaaggtgaaggcatctgaggcattacaaagtgaagttgacacagacctccatactttataagttgttggactctagtaccaagaaacaacaacaaacgagatacattataattactgtctgattttcttacagttctagaatgaagacttatattgaaattaggttttccaaggttcttagaagacattttaatggattctcattcatacccttgtataattggaatttttgattcttagctgctaccagctagttctctgaagaactgatgttattacaaagaaaatacatgcccatgaccaaatattcaaattgtgcaggacagtaaataatgaaaaccaaatttcctcaagaaataactgaagaaggagcaagtgtgaacagtttcttgtgtatcctttcagaatattttaatgtacatatgacatgtgtatatgcctatggtatatgtgtcaatttatgtgtccccttacatatacatgcacatatctttgtcaaggcaccagtgggaacaatacactgcattactgttctatacatatgaaaacctaataatataagtcttagagatcattttatatcatgacaagtagagctacctcattctttttaatggttatataaaattccattgtatagttatatcattatttaattaaaaacaaccctaatgatggatatttagattcttttaagttttgtttatttcttttaagttttgtttgtggtataaacaataccacatagaatgtttcttgtgcatatatctctttgtttttgagtatatctgtaggataactttcttgagtggaattgtcaggtcaaagggtttgtgcattttactattgatatatatgttaaattgtgtcaaatatatatgtcaaattccctccaacattgtttaaatgtgcctttccctaaatttctattttaataactgtactattcctgcttctacagttgccactttctctttttaatcaaccagattaaatatgatgtgagattataataagaattatactatttaataaaaatggatttatattttt

SEQ ID NO: 1012 - DNA, 5676 bp, Homo sapiens
atgcttctgctgggcatcctaaccctggctttcgccgggcgaaccgctggaggctctgagccagagcgggaggtagtcgttcccatccgactggacccggacattaacggccgccgctactactggcggggtcccgaggactccggggatcagggactcatttttcagatcacagcatttcaggaggacttttacctacacctgacgccggatgctcagttcttggctcccgccttctccactgagcatctgggcgtccccctccaggggctcaccgggggctcttcagacctgcgacgctgcttctattctggggacgtgaacgccgagccggactcgttcgctgctgtgagcctgtgcggggggctccgcggagcctttggctaccgaggcgccgagtatgtcattagcccgctgcccaatgctagcgcgccggcggcgcagcgcaacagccagggcgcacaccttctccagcgccggggtgttccgggcgggccttccggagaccccacctctcgctgcggggtggcctcgggctggaaccccgccatcctacgggccctggacccttacaagccgcggcgggcgggcttcggggagagtcgtagccggcgcaggtctgggcgcgccaagcgtttcgtgtctatcccgcggtacgtggagacgctggtggtcgcggacgagtcaatggtcaagttccacggcgcggacctggaacattatctgctgacgctgctggcaacggcggcgcgactctaccgccatcccagcatcctcaaccccatcaacatcgttgtggtcaaggtgctgcttcttagagatcgtgactccgggcccaaggtcaccggcaatgcggccctgacgctgcgcaacttctgtgcctggcagaagaagctgaacaaagtgagtgacaagcaccccgagtactgggacactgccatcctcttcaccaggcaggacctgtgtggagccaccacctgtgacaccctgggcatggctgatgtgggtaccatgtgtgaccccaagagaagctgctctgtcattgaggacgatgggcttccatcagccttcaccactgcccacgagctgggccacgtgttcaacatgccccatgacaatgtgaaagtctgtgaggaggtgtttgggaagctccgagccaaccacatgatgtccccgaccctcatccagatcgaccgtgccaacccctggtcagcctgcagtgctgccatcatcaccgacttcctggacagcgggcacggtgactgcctcctggaccaacccagcaagcccatctccctgcccgaggatctgccgggcgccagctacaccctgagccagcagtgcgagctggcttttggcgtgggctccaagccctgtccttacatgcagtactgcaccaagctgtggtgcaccgggaaggccaagggacagatggtgtgccagacccgccacttcccctgggccgatggcaccagctgtggcgagggcaagctctgcctcaaaggggcctgcgtggagagacacaacctcaacaagcacagggtggatggttcctgggccaaatgggatccctatggcccctgctcgcgcacatgtggtgggggcgtgcagctggccaggaggcagtgcaccaaccccacccctgccaacgggggcaagtactgcgagggagtgagggtgaaataccgatcctgcaatctggagccctgccccagctcagcctccggaaagagcttccgggaggagcagtgtgaggctttcaacggctacaaccacagcaccaaccggctcactctcgccgtggcatgggtgcccaagtactccggcgtgtctccccgggacaagtgcaagctcatctgccgagccaatggcactggctacttctatgtgctggcacccaaggtggtggacggcacgctgtgctctcctgactccacctccgtctgtgtccaaggcaagtgcatcaaggctggctgtgatgggaacctgggctccaagaagagattcgacaagtgtggggtgtgtgggggagacaataagagctgcaagaaggtgactggactcttcaccaagcccatgcatggctacaatttcgtggtggccatccccgcaggcgcctcaagcatcgacatccgccagcgcggttacaaagggctgatcggggatgacaactacctggctctgaagaacagccaaggcaagtacctgctcaacgggcatttcgtggtgtcggcggtggagcgggacctggtggtgaagggcagtctgctgcggtacagcggcacgggcacagcggtggagagcctgcaggcttcccggcccatcctggagccgctgaccgtggaggtcctctccgtggggaagatgacaccgccccgggtccgctactccttctatctgcccaaagagcctcgggaggacaagtcctctcatcccaaggacccccggggaccctctgtcttgcacaacagcgtcctcagcctctccaaccaggtggagcagccggacgacaggccccctgcacgctgggtggctggcagctgggggccgtgctccgcgagctgcggcagtggcctgcagaagcgggcggtggactgccggggctccgccgggcagcgcacggtccctgcctgtgatgcagcccatcggcccgtggagacacaagcctgcggggagccctgccccacctgggagctcagcgcctggtcaccctgctccaagagctgcggccggggatttcagaggcgctcactcaagtgtgtgggccacggaggccggctgctggcccgggaccagtgcaacttgcaccgcaagccccaggagctggacttctgcgtcctgaggccgtgctgagtggggtcatcgctttctccccctcactctccaccccactgatatgccagcgttctgccagctggagtagcgggcagaggacggtggccaggggctcacgccacgatgtcacccacatccggggacaaggaccatgggctggggcgagaggttccctcctcctccctggactgggcagagggaagcccaggaactcccgcacagtctacctcaggccccgctcctcgggccggttgcggggagaggctttgaggtgcagggcagaaggtgctgaggcccagtttccaaggaacttggaggatgggcaccttccaggcagaacttcagggaccccggcccccagaacggaggccacaggctgctggaagagccatgtcccagcagcttggcaccctcaggtggccccatgggctctgagccgtgtctgaacgaggcagggttttcacggtgcttttagcccactttcctttttgaactgacatggactaagcaataaaagctggctggggctgggcagaagccacggggagagtgagattagggcccctggagcctggcactccaccttggaagacgtggacgtgcacagggagtcccgaggtttctcatcctgcactcttggccctcctataaagaagcagcctctccttcctctgatgtgcagggtgtaggactagtggtagggctgccacggaagtgtcctctgaggctctgcaggtagcggggaaagccagtagggagtctgctgtcttcttcaagatggagccggccattacagaaagatgttgacatttgctaggggctatgcagtctgtggctgatgcagggagttttcagaaagttctggagggttctgctgtcactggactggggttggtgctgagctctgggcctggctttgggagatgtcaccctgggatagggaggaggaagctgcatttctaatggcttcctcctccagagaggcacgtatatgcaggctgacatccgagggtctgtgtcgcctcagacagccctgacagtggccacagtcccgtacccattgtgaggggctggggcatgcctaggagggctaggtgctgaacatctatgtgcctataaactcgtcttcgttccaaacagctactgctgtctgccctgggcacgtcacgttgcatcctaggccttagcttctccactgtttgctacctcagattatgccctctgggaacccagccgtatccctcccctaggacagtggtgacctggtccttccaccacactcagtctttggagagcgagctgtccagccacagaaatgagggtgtggtgcgtggcttcctgctccccacagcccagccccctgttggggctccaaagccgaagacagggcctcttcagactccttgggagtaggtttcaggaggcaccaagaatcaatgactgacccagggggcctggcagccactagtatgaactgctggagacctgtctgtcttatagacatgtcaggaaaatagaaacaggcattttctctagctccaagtggggagatattttggggtcacagcttctttggctaagcagggtgtttcttgaaggttcagatgccccactgtgtacatgggatattctgcttctgagtgtaggtgatgaatccaggtcctcagtggagaattttctggagctaagatcaaagcatgtgtcttcctgggagagaagagttccgttcttttatgtgggtttccctaatagtcagaatccacaaaccagccagccagccagccaagcctctgcgatgatgttctcatccggtctaacgctgggctggaaaccttggacagagttcatgcgggggcagagggggtgccagtctctgaggcagggctgcagtcacccctgaagaactaagtgaacaggaacccctctgtgccagtgaccactgtggggctaaagggacaaaaaggaccagggtaccaggcagaagcagatccttgatagctgacgacagcactgcgccctgtgcttggtgcactccctccttcaggaggagagggtggcatggggtctgtgcgggatggcagggggattgggtgggtgggaagagaggtgccatcggtaggaggctggcctccagtagaggagagcagcttttgccatcagtcactttacaaaccatttcaaggaaggacaacctctctggctcctgacacaagccaggcctcggtgcttttatctgttgtggtggtttttcttctttccctttttaaaagacgcatgaccaagacaacctagggagtttgtcttgcttgcctttgactatttccttaatccaaccatgctctcgagggctgagcagagactagactcaaggcacaggtttctggtgatggagtaaagttacagcggtatctcatgtctacacaagaagaggaacgttctgaaagctccaacaacttcttgagggggatggaccaatacagctttgggctcaggattccctagcctcctctgcccatcgcgtgcactgattggaggagtctggcccaaacactctcatatgaacctcgacatgctggagtggggtctggcaggagctgatgacagtttgagggacttgagtgtccctagcctggcagttggctcccggaagcactagacactgacactcattggtagaccctccctccccgccgttgtgtttggttcttttgcactccatgtactgcagaaggatggaaggacctgggtgctggctgggctgtgtatactgtgtatacaagggagctggctgctgaggtgaccacagccttctcctaataaagctgtaagtatttaaaacct

SEQ ID NO: 1013 - DNA, 2478 bp, Homo sapiens
ctctgagtcgtctgagctcactgtgagcaaaatcccacagtggaaactcttaagcctctgcgaagtaaatcattcttgtgaatgtgacacacgatctctccagtttccatatgttgagattctacttattcatcagtttgttgtgcttgtcaagatcagacgcagaagaaacatgtccttcattcaccaggctgagctttcacagtgcagtggttggtacgggactaaatgtgaggctgatgctctacacaaggaaaaacctgacctgcgcacaaaccatcaactcctcagcttttgggaacttgaatgtgaccaagaaaaccaccttcattgtccatggattcaggccaacaggctcccctcctgtttggatggatgacttagtaaagggtttgctctctgttgaagacatgaacgtagttgttgttgattggaatcgaggagctacaactttaatatatacccatgcctctagtaagaccagaaaagtagccatggtcttgaaggaatttattgaccagatgttggcagaaggagcttctcttgatgacatttacatgatcggagtaagtctaggagcccacatatctgggtttgttggagagatgtacgatggatggctggggagaattacaggcctcgaccctgcaggccctttattcaacgggaaacctcaccaagacagattagatcccagtgatgcgcagtttgttgatgtcatccattccgacactgatgcactgggctacaaggagccattaggaaacatagacttctacccaaatggaggattggatcaacctggctgccccaaaacaatattgggaggatttcagtattttaaatgtgaccaccagaggtctgtatacctgtacctgtcttccctgagagagagctgcaccatcactgcgtatccctgtgactcctaccaggattataggaatggcaagtgtgtcagctgcggcacgtcacaaaaagagtcctgtccccttctgggctattatgctgataattggaaagaccatctaagggggaaagatcctccaatgacgaaggcattctttgacacagctgaggagagcccattctgcatgtatcattactttgtggatattataacatggaacaagaatgtaagaagaggggacattaccatcaaattgagagacaaagctggaaacaccacagaatccaaaatcaatcatgaacccaccacatttcagaaatatcaccaagtgagtctacttgcaagatttaatcaagatctggataaagtggctgcaatttccttgatgttctctacaggatctctaataggcccaaggtacaagctcaggattctccgaatgaagttaaggtcccttgcccatccggagaggcctcagctgtgtcggtatgatcttgtcctgatggaaaacgttgaaacagtcttccaacctattctttgcccagagttgcagttgtaactgttgccaggacacatggccataaataatagaaagaaagctacaaccacaggctgtttgaaagcttcacctcacctttctgcaaggcagaaaaagtatgaaaaaaaccaaggcttttttcagtagcgtcctatggatgtcacattgtacatcaaacaaccttgtgattataaaacgatcctgggaaggagcccctaactagggcaagtcagaaatagccaggctcgcagcagcgcagcgctgtgtctgctgtgtcctggggcctcccttgttccgacctgtcaattctgctgcctgtcacgcgggtggttctgcccatcgcggctgcgggtcaagcatcttcaagggaaggacggactggaggcctcaccgtggactcaactctgcattctccgtgccacattcctccagttcccacacgtagaagggaacgaaactgacgtctacctcatggggctgctgtgtgggtttgggaggcaaaaatctatgaagggttttttgaaatcccataggtgccacatctatgagatgtttgataaatgtgaatatgcttttacatttgggcttatctaatttgcaataagagagcctctctctatcaacaccagcttctctctcgggctgtttgctcagggaaggcaagaaagccacgtgctggccctctgccttctctaaagtgctgttggagcatggaggagctggaggagatggggatggactgacagctaagagggcggctgctgggactagatagtggatgaagaaagaaggacgaggaagccgtggggcagcctcttcacatggggacaggggatggagcatgaggcaagggaaggaaaagcagagcttatttttcacctaaggtggagaaggatcactttacaggcaacgctcattttaagcaacccttaagaaatgtttatgtttctttattaccaatgtaatctatgattattgaaggaaatttagaaaatgcgtagatacaaaattaaaaaaaaatactgtccaaaaa

SEQ ID NO: 1014 - DNA, 3748 bp, Homo sapiens
ggctgaggcggaggagccgccgcttctgacctcgctctggctccggtgcgcgcggctgagcgcgtgcgaggccccgcgcgtcgggcaggggcggcggcggccactgcgcgccgccctgaggagcgccccagcggcggcgcgactgcggctgaggagagagccggctccgggcctccgcgtcctcctgctcccccggccccccgcctcctcgggggggcggcggcggcgatgttctcggtcctctcgtacgggcggctggtggcccgcgccgtgctcggcggcctctcgcagaccgaccccagggccggcggcggcggcggcggcgactacggactggtgacggccggctgcggcttcgggaaggacttccgtaagggcctcctcaagaagggcgcgtgctacggggacgacgcgtgcttcgtggcccggcaccgttccgcggacgtgctcggggttgcagatggtgtaggaggctggagagactatggagttgatccatctcaattctcagggactttaatgcggacgtgtgaacgtttagtaaaagaaggacggttcgtacctagtaatcccattggaattctcaccacaagctactgtgagttgctgcaaaataaagtccctttgctcggtagcagcaccgcctgcattgtggtgctggacagaaccagccaccgcttacacacagcaaacctgggcgattcaggcttcctggttgtcaggggtggtgaagtcgtgcaccgatcagatgagcagcagcattacttcaacactccattccagctctcaatcgctccccctgaagccgagggagtcgtcttgagcgacagtccggatgctgctgatagcacgtctttcgatgtccagctaggagacattatcctgacggcaacagatggactctttgacaacatgcctgattatatgattcttcaggagctaaaaaagttaaagaattcaaattatgagagtatacaacagactgccagaagcattgctgagcaagctcatgagctggcctatgacccaaattatatgtcaccttttgcacagtttgcatgtgacaatggattgaatgtgagaggtggaaagccagatgacatcaccgtccttctttcaatagtggctgagtatacagactagctgaggtgtcaagtcctgcctttcctttcatcatcccaaatttcccctgccatgtgtgctgatcctgctggcaggaccacatttctttgccactgatctcaatggccagtgatgtaagtcttttgcctgtcttcttgagactcgttgagatctttgttgagaaccactactatcattcactagctcatatctgccggcagcaattgaagagatccaatatttgaagattggccttcatttctcgatgttctttccatgatggggatggaggtgttcagtgccaccgtggctgttacttttcaaagtagttgaagtattgaaaatgagtaatgttggtaaagtgaattcaaaatcctagtatgctaaagggatggtacaagtctaacacaaattgtacgtaatgatacatctactagaaacatacattattcatcaaaagaaatgttacatgtgtactccacaggcatagtctttgttatgatgattggtgtggctttatgtctttgttataaactcctatttttcaggggcttatgattctgctctaaaacattgctctgggttatacagttttgatcccaaaagcttttttgttacaaatcgggagaaaaatccattttagttctatggatggaaatatttcatgcttttaaaaagatgtttgtgttcctgtggttaaagttttggcagtttattgattagtccaaatcacaggctaaggcctgatctccaggaggggtaggggagacactttaccagtatttttttatggaaataatactcaaggttgtaaaacccctcaaagcctagaaatttaattgttatggctgaaattcctcctagttgtctgatagaatgcccctgaatgggaactctaggtcccaaggcctgaagggttgagaacagacagctgtaactttgaattttgttggctttcagtggtcatgctacctacccatactcgtactctcagaccttttattagtagccttgctttctatagagcatgcaccaaatccagtgagtccatgtggagagagcactgtgtgcgcagcggcagcagcacagacgtccatgaggaaaactcccagtgatgatctgacatttacaattaccccacatggaaatttaggggtttctgaatcaagcttaatgtttacagtttccaaatagccattttgcagtgtatagtttccttacaaaactaccccgcattcagttttcacattatctgcaagctgaaacttatttttaagttttgtgtacaagttgactgctgtaaagatatatatttttgggtcagtttttttccttcattaacttggtggtagaaaaaaatatatacttagaaatccttaaattaaagccatgttttatatataagtcaggtaacattggtgtatagatgagaatgcaattaaacctgatgagaatctacttgagaatatagaaagtctttctctaaaggagatactgactccctggtttattgcattaaaatttatgtttgaggttacctcaacttgttttaaaagattttgttttgtgaatttgtactgtatatttgagtaactgtcaggcttttatttaaaattgtttaacatgtaccatgtacatgtcattactatatttcaatgcatcatgcttgtaacaggcatttcatttataataagaatgagttattcatttgtaagccgttcagtaatttatctactattcctaaattggcataatgttagataatctattttgaatcacctttaattacatgtcagaatgccttaactaccctaacttgacaaaacagaattctttggtagacgcggtgggggcggggtggggggtctggacggagtctctatttaaggagaaatcatcatgctatgataaaacacagaagcatgagtggcaagtggcggggtatttattttgcacaaactatttgcagtctctgtgtatttaaaaagtaaagaaagttgcatccagaagggttttgttagaatgaatacatttatattaggactgacaacttcagctcttttgtttaggttttcaattatttttggtaagagtatgtagccttatgatctggatatattttgcattcattttccaacgcctacatttaattcctggtaagagcagtgctcgtcaagtttctggtttttctctgctctcatttaacccgtcaaacacaatctttgtaaagctagattggtggtgttttatacaacttatttactcagcttacctttttgagaaacgattgttagaaattgacgatgtgtttgttccagtgatactgaaagtagtgggggcaagaattgagtttcacagtggaattggctttggatctggcctatagattagtgacataaaatattttctctattttcccctgttctttttgtgttatgcacttaattttatgactgccgggggggtcagctggagtgctgcttaacaagtatctctcctactctcagtggtcagaggctgtgttggacccatagtagaattttccaggtcacagacccaagcttccatgggttgttactgtgctgtaccacttggtgggtctgattctgaacctgatgtgtgtgtt

SEQ ID NO: 1015 - DNA, 3617 bp, Homo sapiens
agttgattgcaggtcctcctggggccagaagggtgcctgggaggccaggttctggggatcccctccatccagaagaaccacctgctcactctgtcccttcgcctgctgctgggaccatgggggctggggccagtgctgaggagaagcactccagggagctggaaaagaagctgaaagaggacgctgagaaggatgctcgaaccgtgaagctgctgcttctgggtgccggtgagtccgggaagagcaccatcgtcaagcagatgaagattatccaccaggacgggtactcgctggaagagtgcctcgagtttatcgccatcatctacggcaacacgttgcagtccatcctggccatcgtacgcgccatgaccacactcaacatccagtacggagactctgcacgccaggacgacgcccggaagctgatgcacatggcagacactatcgaggagggcacgatgcccaaggagatgtcggacatcatccagcggctgtggaaggactccggtatccaggcctgttttgagcgcgcctcggagtaccagctcaacgactcggcgggctactacctctccgacctggagcgcctggtaaccccgggctacgtgcccaccgagcaggacgtgctgcgctcgcgagtcaagaccactggcatcatcgagacgcagttctccttcaaggatctcaacttccggatgttcgatgtgggcgggcagcgctcggagcgcaagaagtggatccactgcttcgagggcgtgacctgcatcatcttcatcgcggcgctgagcgcctacgacatggtgctagtggaggacgacgaagtgaaccgcatgcacgagagcctgcacctgttcaacagcatctgcaaccaccgctacttcgccacgacgtccatcgtgctcttccttaacaagaaggacgtcttcttcgagaagatcaagaaggcgcacctcagcatctgtttcccggactacgatggacccaacacctacgaggacgccggcaactacatcaaggtgcagttcctcgagctcaacatgcggcgcgacgtgaaggagatctattcccacatgacgtgcgccaccgacacgcagaacgtcaaatttgtcttcgacgctgtcaccgacatcatcatcaaggagaacctcaaagactgtggcctcttctgaggtgcctgaattcatgcgtgtcagtcaccctgagacctggtagccctagctgccttgcagccccaaaccccaggaccctatcagccccctgggactccctggccccaacctgccacctcaccaaagctctgagccctgctagccttgaggcgcggaccctcccccatacctcccacagtatcccagcgcctcatgcccccaaccccaagccctgcccttcaccgcccggctgcactggcctctaggactcacagcagccagccccagctaggaacgggcaggacttggggcagctgaagctcacggtgactcagcagtgcccaactgaccaatctcccgcagctctcctgcccctgggggcccacgactcacctggtgggcctgggctcagcaaacagccctccctcccagtatttcatcaaggacagggaatatccctcccacacacaggccagctgctcaccctgccacctccatgtgacaagtttgacacctgtctacccagagccagtgactgtccctcccagcagcctccaaagggtccaaagtccaagctagctctggcctgtgtggcccccacataaataaattagtggggagggggcagacctgggggcccttgggtgccagagtgagacacagcaggacccttccccaaatactaggctcagagcaacctccagccttctccagcaggatctgctccctgtgtccttggacagcagatccacacaccacttccccacccacacacagtaccctgggctggttggacaacaggatggtgtgttaaggggttaagggagggtactgttgacaccagctatggccaatagctgggctgtcctgaggggtggctggggacagagtccagctcccttggatcagcccagaggattcaggataggacaaaggccctggctgtgcccaaaagggtctacctcaggtggggttacaagcaaacctgggtgaccctcttgtccctaccagcagcttctcttgccccttccattcagggttccctggcaggggaagctgagagccatggctgaactatcagggacaaaggcccatgtccccacatccctgctccctccttcctcatccagcaccaaatctttgcttatgtccacaggccagggcctgtgctgcagtcggggacaaggagcttccgtctggcaaggccggggcacaatttgcactcccctcagctagacgcacagactcagcaataaacctttgcatcaggctccagctgtcctttcttggtggaggacttaattatcacaagtcatgggcatttattaagtgcccagtgctgggttgggcatgaagtgggaagatggcccctcccaggaagaagtacctggcctgacaaggtggggcactcttgggggtatgggaccaactcatggcttttcacgggagttgaggagagaggagctgtggaaaatattcactgggacagtcttggatcaagagggagttttgaggtggaggctcattctggcagggaccgtagtgtctaccagccccagaaacatgggcttatggccacaggagttcagtggagcaagagcaggggaggagagacgtggacaggtgcccaaagccagtcggagggcctgggctttctcagaaggtgatggagagtcttggaagccctcgaggcaggaacataattgcagggctgggattagggtgagggaagtgaggcacactcaccttgggtgcaacatttaaggcgatgccaaaaaatttagtaaccaaggtaaataatattaggataatatttttaaaaatcaaatgaatgcaaaaccccacaatgaatgaaatatcaaaatccaacagaggatcaaacagaggcatgctaagatatattggggcttgaagcaaagggaaaactatttgttgctatatgtttgtagggattttttgccagttttaaaaatacatgtatcataaagtttactatctcagccacttgccggtgtatagtttggtggtgttaagtacattcataatgttgtacaaccaccgcaactgttcatctccagaactcctttcctcttgtaaaactgtaactctgtacccatgaaaaaataaccccccattcctgccttcccccggctcctggcatccaccattctactttccatctctatgaatgtgactgctctaagtgcctcagatgtgtgggtccatgaagtctttgtctttttgcaactggcttatttcacttagcatcatgtcttcaaggtttattcatgtgtagcatatggcagaatctccttcctttttaaggttgaataatattccattgtatatattccacactttgtttatttattcatctattgatgaatggttacatctgccttttggctattgtgaataatgctgctatgaacatgggtgtacaaatctctcaaaaaaaaaaaaaaaaaa

SEQ ID NO: 1016 - DNA, 8794 bp, Homo sapiens
gcgcgcgcgcgcgcgtgtttgtgtgtgtgtttcccctgccgcggggaaatggctgctgttgcttctgggccagaggaagagaatgagactaatagggatgccaaaggaaaaatatgatcctccagatcctcgcagaatttataccatcatgtcagcagaggaggtagccaatgggaaaaaatctcactgggcagaattagaaatctcgggtagagtgcggagcctaagtacatcactttggtcattgacacacttgacagcgctgcacctaaatgacaattaccttagtcgcattccacctgatattgccaagcttcataatctggtttacctggatctgtcatccaataaactcagaagtttaccagcagaactaggaaacatggtgtctctcagggaattgcttttaaataacaatctgttacgggttttgccttatgaacttggtcggctcttccagctacaaactctaggtttgaaaggcaatcctttatcacaggatattctcaacttataccaggacccagatggaacccgaaagctactgaacttcatgcttgacaatctcgcagttcatccagagcagcttcctccgaggccatggattacattaaaagaacgagaccaaattctgccgtcagcatcattcacggttatgtgttacaatgtgttatgtgataaatacgctacccggcagctatatggctattgcccatcctgggcattaaactgggaatacaggaaaaagggaattatggaagaaattgttaactgtgacgcagatatcattagtcttcaggaagtggaaacagagcaatacttcactctctttctgccagcattgaaggagcgtggatatgatggatttttttctccaaagtcacgtgccaaaatcatgtctgagcaggagagaaagcatgtagatggttgtgcaatattcttcaaaacagaaaaatttacattggtgcagaagcatacagtggaatttaaccaagtggcgatggctaattcagatggatccgaagctatgctgaacagagtgatgacaaaagataacattggtgtcgctgtggtattagaggtccacaaagaactatttggagcaggtatgaagcctattcatgctgcagacaaacagctgcttatagtggcaaatgcccacatgcattgggacccagagtattctgatgtgaagctcatccagaccatgatgtttgtctcagaggttaaaaacattctggagaaagcctctagtaggcctggaagcccaactgcagatcctaattccatcccgctggtgctatgtgcagatcttaactcattgccagattcaggtgttgtggaatacttaagcaatggaggagtagctgacaaccataaagacttcaaggaactaaggtacaatgagtgtcttatgaacttcagctgcaatggaaagaatggaagctcagaagggagaatcacacatggcttccaacttaagagcgcctatgaaaataacttgatgccttacaccaattacacctttgatttcaaaggcgtgattgactacattttctattccaagactcatatgaacgtgcttggtgtcctggggcctttagatcctcaatggctggttgagaacaacatcactgggtgtccacaccctcacatcccttcagaccacttctcactgttaacacaacttgaactccaccctccactcctgcctcttgtcaatggtgttcacttgcctaatcggaggtagtggagtactgccccgccaagacggggatctgttgctatggacctgtacagttgtaaatcaaagtatgtaggagtgaagtatggccatccttaagctgcttcttcaggtttctttcattatgtgtttgctgtaagactttgtacatttttgtgcatattggtatcatttggcagtagggctggaaccaaagtattactctctttacaaaattttaatttaacatgtttttaaattggaccttctttatattgtattaacagccagcattcaaaattgataaattaccaatttgaggcccaataacagtgtatttgtttttccaaaacaaatactttcttttgaatggtttcagtgagccaaccattttataaaaggcaatttttaaaaactataaatacagtattttaaactgaatgatgatatgccttccagggaaaaccttgaatttttcctttataactgacttttggattccaaagtcatttgcacattaacagagtacttaaatttacttgttcagtccataaactatgatatagcctctatacatggtaagaaaatttgaaaaattaaagatggttgcacagtatacttttataatccagcatgtaacaccacatgacaatttgttggccaaatgctggtttggagtttttttgaggaatcactttggtttttttgtcctttatatataaccttattggaagtattaattctaagcctgtctctcaagtttatttatagagaaaaagtaagtaatctgtattgccacataccttgaaaatagaatgtggtatgtttaggatgcccacggaatgaatttttccttattccaattcaaccttctgtctggttgtgccaggaaaacagatgttatatgacctatgtcatttttgccattatagtcaaatgttaaaagaagaaaaaagtctgctgaataaaaaggccttgatcaaagtttcagatggggaaaatcatacagatattttatgtgtttccaacatagattatgtggctgttggtttcttgagatgacagtgcaaaggatttgggagagagaacaaatttggggcagtagttgaaaacgttgggtcattttcctgactctagctgccaaatggccatcatatgcttttaatctttgtttcagttgtctgtcagggttgaattaagaagctactggtttattcccaattgttgatgcctttaggtatgttggaatcttttttttgcctaggaggggccagttgaaaatctgtgactcaagaggcagtgaacagaatactgttttctggggaaaaattggttggctacttgatgttaattatggcacagtaacaggaaaaggttgtgtctgtgtttttaagtttttctttattctgcttttttgctgctataagagttttctgaaatttatattttaaacttttcatgcactttactgtttctagtctcaaaatgtgatatttttaataaacaagaaattttccattatgtgaatgaaattttaaaagacaatagcctatatttgtgtctcactaatatataaagtataggtcaaatttaaattatttaattagttttaaatatacacaatttgtctcctctttcaaacctgacatcttcggctgttttattagtcttaaatgatgcatttactttggtcattttatgctaatttcttccatagtaaattaatcaggctatataaggtaatatttccccagagggtaattttagtgggacgagggtggtgggatgatgtcatatcatacatgggattgcatcagaagggttctgtaaagcctgaactcccttttaaaagtgcctagtgatagaggcgttgtttgtcatctattataattggaatgtcattgtagttcagtgaattttgatgtaaataaaatatcttttaaaaatgttaaagtaccaggataaacaaacaaaaagaaacaacccttaagatgacagattttcctcaacatgcaggtttcccttcttatatacctcaagtatccaacatctagccatgcaaattgattacctgaagcatagtactggaaagtagaatagcatgaaaaacttaattttgtggacattacctttttttgtaatcagctactgtatgttttattttagatcttttgttttgggtgggttttctgctctggaggtatatgcactaacaaaacattttcctcctttcatatacgcatgttaattagcaatgtgagcaatatttcctaccatacttcactcccaatattttttgagatgtttgtataaaatggaatttaaagttcacttatgattgtatatgaaccacagaggagcccatttattaataaaaaacttttttaatagttaaatgtagagggaaaaaataaaaaaaaatgggaaacattgtaaacagcttaagtttattttgtgtatgatcgaggcactctgttgcaggaaggtgtgtaattgggttctctctgcttcaaatgcgctctttcaaaccattcattatcctgtgtatttttaatgtggttttagtaaatgttggtagtagctctgttgaagtaggtaattgtgttatgttttgggtggtacacacttggggcatggtaacccaaatttcatgtgcacggtttccctttagcccactgcccaaatttcacatacccttcaccctttgttccctttgtaaaaggagtggtatctgttttgagctgccaattcagatgatcagaaatgctgctttcctcagcattgtcttgttaaaccgcatgccatttggaactttggcagtgagaagccaaaaggaagaggtgaatgacatatatatatatatattcaatgaaagtaaaatatatatgctcatatactttctagttatcagaatgagttaagctttatgccattgggctgctgcatattttaatcagaagataaaagaaaatctgggcatttttagaatgtgatacatgtttttttaaaactgttaaatattatttcgatatttgtctaagaaccggaatgttcttaaaatttactaaaacagtattgtttgaggaagagaaaactgtactgtttgccattattacagtcatacaagtgcatgtcaagtcacccactctctcaggcatcagtatccacctcatagctttacacattttgatggggaatattgcagcatcctcaggcctgacatctgggaaaggctcagatccacctactgctccttgctcgttgattttgttttaaaatattgtgcctggtgtcaacttttaagcaacagcactgcctaaaagcaagcagagaacagaatcccagcaccattctataggcaactttttagaattcagatatagtaaatctgttccagatttatgatgttttatgtaaaaaaaattttgtataataacatagctgaatatttttgtttcatttctttgatgtaaggcgtgtgaacattcgtttgaatatcacatgttgaagtcaggtatggcacaatgggttctgagaccagcttttcctcccctcccatttgccttgttccaagctctttcttttcaaattacttttctgatattcataggcaggtatttaattttactaattagcatcctgtgtgaatgtattaaagaagccactgtgttttagtgtagttggcaaaaatataaaagctgtttcttatttgcccctatttttttggtgtcttaaagttatatattaaatcacagagaagcaagggagaaagttgaaagatatctaaggctcatatcacttgattctatggtagattatattagaattgaggatgtggcacattaaaactggaacatgggcaaatatagtgttccattttaaaattctaagtttatattgttaaatgggtgaaaatttaagtttatatttgcatttccaagcgtttctaaaaatcactaatgccatctatacttttagtatgaaacagcagactatagaaagcacagggaagaataggctaaatacattctttgaagaaccagaggcatataaccacatcattatgtcattcctaatacatggctagattttctaatgataaaattgactgtgtcccaatgcttatttgattctaagcttttttattctgtttctgagatattttaatagctttgcaaaatatgctgaccagtttttggaaaataatggtttttatagcaagcaaagactttatggcacattttcaaaatagcactcatacatacttacattttgacagaaatgtgaattctcacattgatgagatattctttttcccacctgccctaccctttaaaaaaggtcacttttctaatgtgtagtagattcatttacgcctttccctttgagtcataccatgtttggagaactgtgtgaattgtaggtagagaaattaactagggaagccagaagcttgaactaaagttttaaatttgtaggcagatgagaacttttatactatggttgctttgggcgattctaattttgtaatagcatcatgatcaccaaaattaattcaaacattttagtacatctttaatctgtcttatttaccaaagttctaatctgtttaagaacaggatgccaagagcatctttcattttatagaatgatatgctcacctttataagtgtcacctaaaagcttgagggtaaaaaagaagcagcccatatatctaaactacaggatgtcttgaacaagattcacagaaagaaagaaaaaaaagcagttctttccaggaaggtggtaaggaagagcatgcatatttcttgttttaaccaaataccttttttatgtaaatgtctctattaaaccccaggtcctacaccaggaaatagggtgataaccaggaaaataccaagctttaacccagttggcagttccttgtggcatacatttggttagacttgggtttttcctggaaccaaaggaaaataagcatgttgagttcttcgttcaacagacatgacattgaagtaatagaatattttttaagtaaaatagttttcactttcaaagcctatgacataaggacatttgtgcttattaattgttaatttttttttatggtacattgtataaactgagtagcattgaactgcattttagaagtatgtcatcagaaacaaatcacattatggaaaggatatacaaatgccaagtgatatgactcttttggcatggtggtagcatggtccattcagctttcagaatctttcggaggctctagtttggtgcctagtactagttatttttgttagaacaatctctcaaaatttagataattttccagttgtatgtctgtcacttttaactctaaagcgtaagaatcatggtaaccctctcagaagtggtcctttcttgctcatttcagtttcgtattaacttcaaatcactgatgtattgtctttcaagctatcaattgttatatgtaccaatttaatttagtttgtagttatctgaagtcacaaaattggttcagcattgatgtcaaacaatggctttgcttcttaccaaacagacttagtatcctgctgcttgtttcaatcttgatgcagtaagtgatgcagtatctgggtctgtatttacttagaaactgtactgtcctttctctgtgcttaacttgctaaaaatatattcccttacctgtgaaattcctgagcggtgctctgccaacttttcaaggggagggatttggatggctgtgttactgcacactggatctggaattgttcagggttatgagtgacaaatttcttaaacaccagcagcactgagatgtgcactatgggcattcgtacagttgttgtccaaatgcaaacaactttttcatcttggagaagctgagatacagagttcaatagaactacttggaatattttgagaaggttgaatgtttcatctttggctttgttgtctctggagtggggaagtatggagggctttttttttttttttttttttttttttttttttttttaaagagagtgtgtatgtactttttctctctataagggccagggtgttggtcaaattcaccatcgattaatttatatcttctgttgtgatttttttcaactatataacaagtgccaactaattgtccatgggacaatctacttttccactcaatttatcgttttgagtagggaaaggttcatttattttcattacctggcattaagttaaagaattcattattttgcatacatttgagtcattctgtgacctataaagtgtttttgtaactatctaattctaatggttgcaaagcaaagcacatgactgtaaaaccaagcaaggtgttttagtaactttttccctgaatacttggtagtttccattgatactattccaaaacaaattctgctgttttaggttgtatatttactttgcttttgttctaagaaaaagccaaggactaaatcaacttgtttttgtgtttcagtaatcagtttaaaatctaagatttttttttaaattagactatttaatgaagtgccatgtaattgtagcttgctagtgtttaatgtttaatagactggttctgtaggtgttttaaccatttaacactctctgccatccctggagaaagtggttctactcttactgaacacattctctctgacaaaatcaccagctgctttatttttctatttattacagttaaacagttgatgaggtctgaatcttgaccaaaactgctcagctgagatgtttttcacaatagacactgtacaaagtgtgcgtgcaaaaggacacggttggtagtattttttcattaatgtgaacattgactaaaaaaaagcagtcctgccttttaaatcttgtggcagctcagaagggaggtgcttaagaaccttaactactatgtcagataacaaaatatttttttccattttggagattggttactgctcacacatgatgtatagggctaaatatatgcttgtttccttgcacctgtgtacttcccctctctccctccctttccttcccctgtaggcaataaatggccattttgcaactgca

SEQ ID NO: 1017 - DNA, 6469 bp, Homo sapiens
ggcgcttcctgttccggcgccaggaggagccgcgcgctgctggtgctgttgccgccgctgctctagctgccgtcagtcaggctgcgcccgcgtcttcagggcccagtccctcggacccatcgccgcttctagaccctactgcggtctcggatattgccgggaaaatgtctgatgaattttcgttggcagatgcactacctgaacactcccctgccaaaacctctgctgtgagcaatacaaaacctggccaacctcctcaaggctggccaggctccaacccttggaataatccgagtgctccatcttcagtgccatctggactcccaccaagtgcaacaccctccactgtgccttttggaccagcaccaacaggaatgtatccctccgtgcctcccaccggaccacctccaggacccccagcaccctttcctccttccggaccatcatgtcccccacctggtggtccttatccagccccaactgtgccgggccctggccccacagggccatatcctacaccaaatatgccctttccagagctacccagaccatatggtgcacccacagatccagctgcagctggtcctttaggtccatggggatccatgtcttctggaccttgggcgccaggaatgggagggcagtatcctacccctaatatgccatatccatctccaggcccatatcccgctcctcctcctccccaagcccctggggcagcaccacctgttccatggggcaccgttccaccaggagcctggggaccaccagcaccatatcctgcccctacaggatcgtatcccacaccaggactctatcctactcccagtaatcctttccaagtgccttcaggaccttctggtgctccaccaatgcctggtggcccccattcttaccattaagttaacaatggacgaagagatgacgctttgctttttgaagtacatgtatatgcacatgaatgcatatataaaaattgctggtttcactattagagggcattcatgaaagaacaactcttgcacctctcagagaagataactgcctcttgtacttggatgcgtagtacatcatatgtatacaatcagataaaagcatagaagtaaatcattcggatgtgatttttatttggttttcatggaaagttaaagtgataaagtatattgaatagttctttgacagaatttgtttaaactatgaaactacacacttaaaaatctaagatgtggattattgttagaatctgcaacttcattggcaaattatttcaagtatttttctataatcactttccccttctaaataaataaacttcgagaataacccatcataatccaaacaaatgatgcctcaacattttgagctgctctgtcggacaaataaacctggtcctcttgaggttatattttggatatacatttttaaactgtcagtaattattgtcagatgtggagttcaatagccagccagtgttcatttttatccttgagcttttagtaaaaacttcctggttttatttttagtcattgggtcatacagcactaaagtctgctatttatggaaactaacttttttgtttttaatccaggccaacatgtatgtaaattaaatttttagataattgattatctctttgtactacttgagatttgattatgagatgtgcatattgctttgggaagagctcgaggaaggaaataattctctcctttgttttgaacctcaaactagataaaccctaggaattgcttaactgcaacaagtaattttcattcccacaaaaacctgaggcagctcttttgcccagagcgttccctgtagccacccccaccccacttgcccttggttctttagaaggagcacacacatcccttgattcctccctgatgtggtaaactggcacactccaggggtctaaaacataaaacagttgtgtttagggaaccttaagtcatgcagacatgactgttctctttgtacaagtgtgaatcaaaatatgtatctctttttcagagtctggttaagctatgtcattgtctactgcatagtttcctgagtctgtttgtaaagtgcttatggctaacagttcagttctgtatttgttgacaggtaaataagtggagttgagtgccatctttgaaaaaattaccctctagctctaacactgaaaataataataaattgtagatctctgcaactaagtttaaagcagtgtgactgtgttgcttaaatatcaagtattgtttataaccaccaaaaaaaaaaagccctggtagttttttggcaccttatgtttaaatcagattcttagatttggagtagacctgaccttgttatttattagataacattttgaatgtatccattggatttctaaaatgtattgtgaatttctcagacaaacaggatttatgctggagctctgttttgcttagaaataaaatatttagtagtttatttctgctctaattaaaatgtcaagaatgccaaatgctgccagttttttggtttgatagctacctccttctaagaaagcaaaatggttacctttgagaggaacattcagtgtttaatcatcccttatgttaactagatgatagattcaagcttttagaaatgagaaagtagaaactaatttgttaagatattttcagactgcggaatgttgttagctttttctttcacttctcttcaaggacaggtgttagctgtctacaatactgttgaactctgttgtcaaagtagcccccttagtctacaaggcaggtagccttggcttgaattatcaatatcaaaatgtcagttaaccatggagggataaagtaatgtgaaaagtgagatggctgcaaagatagctctccttacagttattttggctgtcctacattgggataagctgacaaattagcagtatttagtttaacactggagcaaatataatttgagtaggaagaagagatagcaggtttgggaatctataattatgaagtccattgattttgggagaaaatctgttgctaaaggatttgaagggccatgaacacaatttgggattattactccctataagtataataattttgctagtgacccatactgtccagtgtgccctaaatcatactgctattgtactccctttgttttcaaggactttgcaactggtatttgggggagatttttttttttttttgagacggagtctcgctctgtcgcccatgctggagtgcagtggtgctatcttggttcactgcaagctccatctcccaggttcacaccattctcctgcctcagcctcccaagcagctgggactacaggtgcccgccaccatgcccggctaatttttttttttttttttttttagtagagatggggtttcactgtgttagccaggatggtctcgatctcctgacctcgtgatctgcccgccttggcttcccaaagtgctgggattacaggcgtgagccaccacgtccggccgatttttttttttttttttaatgtaagaatggagataaaagggataatataatttgcttttatattgttatttttgtaaagcatcttttcttcaattcttgttggcattctgggccaaaatatttcaggttggttcggtgtggagttaagaaaagcaggcgttttagtggagaaatggggaacagcatcaagaaaggcttttttccttttttcttttttttttggagacagagtcttgccctgtcacccaggctggagtgcaatggcgtgatcttggctcgctgcaacctctgcctccaggttcaaacgattcttctgcctcagcctcccaagtagctgggattacaggtgcccgccaccacacccatttttgtatttttagtagagacgggggtttcaccatgttggccagggtggtctgaaactcctgacctcgtgatccgcctgcctcagcctcccaaagtgctgagattacaggcgtgagccaccatgcgtgacctttttttctttttaaaagggaacaatgttgctttcaaaacaagacatgctaggctgaaactgatttatggaaaagactgcttgttagcaagtatatttggtcttgagggggatacagattatagaatatgctgacatttgggcttcagaggaagaattttcaaatctaatggaaatagttgaggtgttcaggaatgctgtttcttggagttggaagcttaggttttgaaatgttgaaaccaaaaagacaaaaattaaaacatagaccttaggtcgtcattcacacccggttctcaagaatcaagtggagcacttcaaagaccttggcttgtctgtcccatcctgccactttctcatcttttcatgcttttgaagacaccatttacagctctgactcagccctattttgtgtaaagtaatatattgattattcagaaatagacaatacattttttaattacccaaggactgactgttttgtgcattttactgttggttgtcttcagtagagaatagtaatagggcagagaaaagtatatattttgcctcagtcagtcccaccaccacaatggactattgggatattttctaaaaaaccaatcaatttgcccatgattacctcacaaataattagtgctacctggggtactctcaaatatacagcttttgaaactgtagatgaaaaaagctctactcagagtttttgtcaagactgtgcctgggttgaatatcagtcaattgcctacacttctaaacaataagtgccaatgtctcaattttctcaccctgaatgatagaagctagctttatcaaatgccaaggttagaaagcctggaaataaaacttaagcacagacattcaagtttttgaaaagcataagcctaaattcagataaatcacactgatatattgtactatgcatagaaagttgtaggtggcgttcagggaagactttgattttaataaagcaatatttagtattgaagacaaacactttttattttcagatttctgccaagtaaaacagaaattgccaataaaataatcagtattttgtaaatggcaggcaagcttctggctgtcgaaaacatctgagtcatttattcagtagacaatatgtccttgatccaggttctttgccagctataagggaatccctgtccttgagaggctcatagtctataagtaacattacagaatttgttagcatacccattcattattagttttacctaaacgtgttaggatcactactggtggaaattgtaaccagcctttgggcatcttaaagggtgacatgtggcatgcctttttttttttttaagaatttaatgtttttcaagattgtagtgttgatcagcgcaacaattcaagtgtgcaaagtaacaggatagtttgcctcttcactttacccctggataaaggcactttcactgcctgtcactgatcagcagatactgacttgttgccattaagtgaacttgacttcttatgtgtgctctatgagtttgttgtaattttcttcttgaaattgtgatttttcactgacagtaatgacaaatttaatgtatgtaattgtctatgcattttaagttaaactgcctaaaatgtgatttgagacatatacatatgtttgtattataaattgtaagcaatcagtttgagatactaggttttatcacctgctgctgtatttgtaaacaaagacaaatgttgctttaagaagtaattataattaggaataggctatggatgtgatacttggtattttttaagataaacttgtttgcttttgtgtattatacctggaaactttttttaaaaaatgtattttcatggtttcacagatttttcatgttattttattctttaggcccaattctgggcttctctgagcaagtccagagcctaattaactgtaaatttgttgtcaaaaaggaagaaaaaagggcctgagatacctctttgcatgtgacctgcattcactaaggatatctggaaaccacccttcctccgcaaaccctctcagcaacatggtgtccattgtggtgattttctcttcttttaaggctaggctactcttggtaaccagattatccgtatatatgataatatgaagtcagggaactttctctgtctgtccctactcccctcactcccccactttctgttatgaaagatagttctacttttatcattaactgctacgcatttagtgagggtcacattattaaacttggagtttaccattttcccacaggagatttcgctggcattccttggaactcccaatttcagtagggcaatgaatgaatgaatactttgcagtgctacttttggaaggaatttctgctttttgccttatgattggacaaaatgcagctgtaaaattttaaattgtttttgatatgttattcaatatcccatgaaagtattcacctaaagtggagttatgaaatggatggtgaaataataagaccattctggagcagg

SEQ ID NO: 1018 - DNA, 3381 bp, Homo sapiens
gtcgtccgcggggcggggacgcggcggcggcggcggcggtggcggctgtgtgtcgccggagccgaagcgcgcaggcccgtcccggtggccggggagcgggcgggtgggggcgccatgtggttcatgtacctgctgagctggctgtcgctcttcatccaggtggccttcatcacgctggctgtcgcggctggactctattacctggcagaactgatagaagaatacacagtggccaccagcaggatcataaaatacatgatctggttctccaccgctgtactgattggcctctacgtctttgagcgcttccccaccagcatgattggagtgggcctattcaccaacctcgtctactttggcctcctccagaccttccccttcatcatgctgacctcgcctaacttcatcctgtcgtgtggactagtggtggtgaatcattacctagcatttcagttttttgcagaagaatattatcccttctcagaggtcctggcctatttcactttctgcctgtggataattccgtttgcgttttttgtgtcactttcggccggggagaacgtcctgccctctaccatgcagccaggagatgatgtcgtctccaattatttcaccaaaggcaagcggggcaaacgcttagggatcctggttgtcttctccttcatcaaagaggccattctacccagtcgtcagaagatatactgacccccatgcaggcaggatgtggggggcaagatcaggagagtcaggcccctgggcctctatgccaggtggggaccagaagtcgggaaggcacctaccacctgccctggctttcttcccctcaactctggagccccatccccaccctccttggggggctcagcttggctcagatctgatgcttcaagaggctgtaacctcagagggcaccaaggagggtggcagagcctgcttagccaggaggccgaggtccctcagtcctcccctgtcccttccaaggtgggtcaggaggttctggccccgctggggcaggcagggcagggtctgtgaagcttaagagcagatggtgacaagttctctgggcaggtggccatggggaggggccatggcttggcatgtccaacagaaatagtttttgctgttgaacggtgatttctgtccaagtgcagatttccgtttgaataaagcttcgcttctaggtggcactgtttgccttaataccctgacagttcatcttcctttcttcctgctaaccttctgctctggactggactcacttttctgctccagggactccttttctgggtttgggtcttgcccttcccaagggactgttcttgtggcccttaatgggaagggggcaggggtgaggagctgagcctgctcaaggagtgggaagtggggctataggcagcctctctgatgcactctcttccatctctttccccaaggctccgtgactgtcaaactgggagtaggagaggggacaatttaggactgggctagattttcagaagaacatctacaatatcctatttataaatcttcctctgggaaaaggagtggtttctggctgaatactatcttaggctcaaggagaaacaaaataaaaattagcttccaggcagcctgtttttaaagaaatgggactaatgggagaagctgtttgtcactctaagagcatccaagccctggcccgtctgtgcactcttggctcctggggagatatatctgccttctaagaaggcaggccaggtcttgggcacagacctgcatttgttgaccttgcactccaactatagtgccttgcaagtgctcaacagtacatattggaatgaagtccctatgagagccatttctggccatgttctatacctcaaagtgaggctggcaggtacagagatgaactgtacacatgtgatacatttaagccactggaaaaacccctgtgcttgaaaatatttcctctatatcatgcctggagttccatcatagcccttcatttccttggctttagcatttaccttctcttaagaataccagctttcccctttccctgagaggaagagcacatgttggtctcctcttagtgtgaacgagattgccaggcccttttctcctatgcacaccaggatagacaaggcaggggatactggcagcctgcatcatcctcccattgggctgacagctggccctactttcctccctctgctgcttggtccctcaccttgatgatgtggcttcgccccctccactctactgccagtgttctcccagggcttgctaaatccagcagacccctttcctgtcttactagatctgggcagcatttgacatggctgatcaccccttgcttcttggatggcacttccctggcacctctgtggctagttgtcctacctccctggctgttcctttcaggcttccgtgcaggcttctccacttgcccatgcacagtagggtctttcagggttctgctgtgggctccctagggaagcccatccatctggatggtttcaaggatggtgaggaatttagagttgacctccagccccaacatccttcctgatcacctgaaccacagttttgctgccctctaggtgcacagacaattcaggtccatggcccagatggtacttgctgtcttctgcaaacctgccccttctgggtacttcccttgaccccgagatcactcaggagccagacaggaaacttattctattcctgttttctctttctgcccaccacatccaatctctcaaaacggtcaggtctaccttaacatctcttgatttgagccactcccactgtcatcagctttcacctggattatcgtgacagcctcctactgcttctctatcatgtggccagagctatcttcctaaaatgcattgcatagttgatcaagtcactctctggcctaaaaccttccttggctccctgctgccctcaggataaagtctggacccctcagcatggcttgtgagactcatggtgtccttgtccctgctcacctctctggtctcatcacttgccttcttgcattctgggtcccagcctcctgtatccagagatgcagtggctctccattgccactctgattcctcctttcttttggtcacagagaaagggtactttctctgtcaaatctcaacttagacttgacttcctccaaggagctttggctatactctctcctcccgacccccaccctggcatactacacagatcactctgggctcacttgcctgcctaatggtcatctccccagtagactgtaagctccttgagggcaaggattgtgttggaatttttgtattaacagtgcctggcttggtgcctggcacctagaaagcactcaataaatgtttgtttaatgaatgaaaaaaaaaaaaaaaa

SEQ ID NO: 1019 - DNA, 2250 bp, Homo sapiens
gaaaaatggcgactgtggcagagttgaaggctgttttaaaggacaccttggaaaaaaagggggtattagggcatttaaaagcaaggatccgagctgaagttttcaatgccctagatgatgaccgtgaaccccgaccatcattgtctcatgaaaaccttctaattaatgaattaattcgagagtatttagaattcaacaaatataagtatacagcatctgtcctcatagcagaatctggtcaacctgtagttccgttggacagacagtttctcatccatgaactaaatgcatttgaagaatcaaaggataatacaatacctcttttatatgggattttagcccatttcttgcgtggaactaaggatggcatccagaatgcatttctgaaagggccttcacttcagccttcagacccaagtcttggcagacaacctagtagaagaaagccaatggatgaccacctaagaaaggaggaacagaaaagtactaacattgaagatcttcatgtttctcaggcagtcaacagataatgctttgtttggggtatcttttgtcttaaaattgtattattaattaaataacttatttattgtcccaatgttaccaaaatgcaccactaatgtttgtagaaattggagtttctacaaaacacccctcatgtttaactacatttgtgaataaaagctaactcttgtcatctagcttattggatttgacttgaaaaaaaaagtattgtttttacgaagtattttttgtttttttgagatggagtctcgctctgtcacccagactggagtgcagtggcacgatctcggctcactgcaatctctgcctcccggattcaagtgattctcctgcctcagcctcccaagtagctgggaaaacaggcctgtgccaccacaccggagtagtttttgtatttttagtagagatggggtttcaccatgctggccaggctggtcttgaactcctgacctcaggtgatctgtgtgccccagcctcccaaagcgctgggattacaggtgtgagccactgagcccagccatttaggaagtattataaaggcccttaaagtttgtaaggaaatgaaagggctttgtattaccttttcaataggcaacaatgtactttttctttccttagactttggcttactggaagatttaattaaaaggtagaggagaagtaaatttgctgtaataattttgctgtaaataaaacaaagagtttattttattagataaagaatgtgaagtaagcatgaagagacaggctttgggagaaataccagaaagggatttttcaaagatggcattgtttaatctccgtgtggccctcggttgtgcaatcacagatgagccagaagagggccagccccctacttgtttgggctccgaaactcttaccaaacatcaatttttattcttgggatagaaaaatagtatgtgctatctctaatacgctacttcgatatttattaaagaagtatttttaatgtagtgtccacaggctcatttcattgaaaacaactgactatgatgatagacagctcctgattggcaaaagttcgatggtatattcagaattaaattttgcctgcgcacctaaacactgacaacatttagcttaaaggttttccatggagaagagtggtaagagctgtagttagcaaaattggcatcctctttagggtgtcaattctgtgctgctttgcaaattgttgaaacttttgattttctgtttggcaatgctagtcagtgttcacttcttacagattagccaagaatttttatctaaatgcagaaacttattaatgaaatccatttaaactatacttacacaacattttgggaggccctgctggtaaaattatatatggatgcagaagtattgcaagagtccattttccatttttaaatctgcaatatctgattacattgatgaattccgttgtattgtatgtgtgaatataaatatctgaattctcccgggggacttggttttcgtccaaggatgttggcagtggacacttagtttacctcaggaattgcaatcatgtaagactatattcggaaaaaatgctggagtatataattttggatactgatataaaatcatcaagatggaagttaagcagaattgtcacgtgtagtccatagcgcttttatatgcattattctgtaatttgtttgtactgcggcaactttttatactttcaatgtatcatttaataaaaaaaataagcaagtc

SEQ ID NO: 1020 - DNA, 4089 bp, Homo sapiens
acggcccggcgacgggggagttcccgcgagtggcctcgcgcccagaccgtgcggggggctgttcgggtggaggcgggggagccgccgggacaccaaaataggagctgcttgtggggtggagcggcactagctggcggcttccgagcgcctcttccaaagatggtcagaggggccggaggcgtccccgctcccgctcgctactagcccgcgggccagcgccgcgtcccgagccccggcgggagccatggctctaaaaggacaagaagattatatttatcttttcaaggattcaacacatccagtggattttctggatgcattcagaacattttacttggatggattatttactgatattactcttcagtgtccttcaggcataattttccattgtcaccgagccgttttagctgcttgcagcaattattttaaggcaatgttcacagctgacatgaaagaaaaatttaaaaataaaataaaactctctggcatccaccatgatattctggaaggccttgtaaattatgcatacacttcccaaattgaaataactaaaagaaatgttcaaagcctgcttgaggcagcggatctgctacagttcctttcagtaaagaaggcttgtgagcggtttttggtaaggcacttggatattgataattgtattggaatgcactcctttgcagaatttcatgtgtgtccagaactagagaaggaatctcgaagaattctatgttcaaagtttaaggaagtgtggcaacaagaagaatttctggaaatcagccttgaaaagtttctctttatcttgtccagaaagaatctcagtgtttggaaagaagaagctatcatagagccagttattaagtggactgctcatgatgtagaaaatcgaattgaatgcctctataatctactgagctatatcaacattgatatagatccagtgtacttaaaaacagccttaggccttcaaagaagctgcctgctcaccgaaaataagatccgctccctaatatacaatgccttgaatcccatgcataaagagatttcccagaggtccacagccacaatgtatataattggaggctattactggcatcctttatcagaggttcacatatgggatcctttgacaaatgtttggattcagggagcagaaataccagattataccagggagagctatggtgttacatgtttaggacccaacatttatgtaactgggggctacaggacggataacatagaagctcttgacacagtgtggatctataacagtgaaagtgatgaatggacagaaggtttgccaatgctcaatgccaggtattaccactgtgcagtcaccttgggtggctgtgtctatgctttaggtggttacagaaaaggggctccagcagaagaggctgagttctatgatcctttaaaagagaaatggattcctattgcaaacatgattaaaggtgtgggaaatgctactgcctgtgtcttacatgatgttatctacgtcattggtggccactgtggctacagaggaagctgcacctatgacaaagttcagagctacaattccgatatcaacgaatggagcctcatcacctccagtccacatccagaatatggattgtgctcagttccgtttgaaaataagctctatctagtcggcggacaaactacaatcacagaatgctatgaccctgaacaaaatgaatggagagagatagctcccatgatggaaaggaggatggagtgcggtgccgtcatcatgaatggatgtatttatgtcactggaggatactcctactcaaagggaacgtatcttcagagcattgagaaatatgatccagatcttaataagtgggaaatagtgggtaatcttcccagtgccatgcggtctcatgggtgtgtttgtgtgtataatgtctaattgaatctgcagaaatgaccaagcaatcacttttttggagtatagttttataaaaaaagaatgcagggtttgaagttccttacctgataattgtgtctggcacatgataggggatcagtaaattgtaattcctaaccctactgtactcccaaacatggtgattcatggtcaagaaaaatcttatatatatatatatatacacacacacatatatgtgttcatatatatgtatacatatatatgtgtatatatacgtatgtatacatatatgtgtatatatacgtatgtatgtatacatatgtgtatatatagtatgtatgtatacatgtatgtgtatatatacgtatgtatgtatacatatatgtgtatacatatatatgtgtgtatatatatacacatatatacgtatatatgtgtatatatatacacagttgaatcagtgggattaatacctataatctctggttttcaaaggtaatatagaatatttgacacttggtaaaaggtgaactacctttgtagtgaatcttttcctcttggtagcatcaacactggggataaatcagaaccattctgtggaatgaaatgtttctcaagagcctataatatagtagatagtgcatattaagatgtctggctgggcatggtggctcatgcctgtaatcccagcactttgggaggctgaggcgggaggatcacttgagcctagaagttggagactaacctggcgagaccctgtctcaaaaaaaaaaaaaaatcaatttagctagcaggaatttgacatttaaagagggaatcttctctacctctacaaaatcaacccttaacacttttttcaccttcagaattatttagaatgtggatttactttgtctagttttttcctttatagtgtaatttattgttactctctatttactgactaccagagatatacaaaatactgtgcaaaagattgttactgttcaaagagcttacaaactaaatttaaaagaatagcaagtctgaaaaatagaagatagtcaaatatttgtttatgctaagaactgtttttaattttcagctttgatgtaaattgctagcttagttgtctttagttcaagcatgttaggaaatcctctttattcttaaatatagatacatgtctgcatatatgattgaattttagagccagaaagcatgtagagcagttgtgattagtagaaaatacactgacaagaagatatttgcatttatttcccaaagctgccagtaactagattttgtgacttaagtcatttaacctctccttgattagagcttcctgagccatgcacactggcactgcaaatcacagacaggcctagatacagatcccctcaccccttgctacatccaaaggtggcctgggtggctggagcctctgggccagaaccacctttgtccattttcctcagtgtgcctacagcatcgctttccatgtgtgccataacttgggaatagttgggatgtgttgcttaactcctttacaccattagttatctgtgagaccatctattccacactcttcattttttaaaaagagacaataattatttttaactcactgaagtttaaaactacctagcatttctgattaaaaaaaatttagaaggaaaattttaatgcatttatttcagatggcgttttaaatagatacaaccctttggaaacacaatatggtactacatagcaagggctgtaaaaatgaccatatcctttgccccataaattctacttctatacttttaaccttaaaaataattcagaaaaaagataaatgcatgaagacatttatgtctgcattctttataataacaaaaattggggaaaaaaactccatgtcaagaaagtgggataagaaaaatagtgaagtattatactgccattaaaataattatttggaagactgtagaaacgtggacatgtttgatatggtaagtaaaatgagcacaatacaaaatagtatgcatactatgattgtgactttgtaaaatctttatgcatgtggaaggtaatctgcaaaacaaattcattgtgttagtgtagcgggatatggaatgactttatttatttaaatcttttctttaatattactttgtattttcaataaaaataaatcactgtacatagtaaaaaaaaaaaaaaaa

SEQ ID NO: 1021 - DNA, 8327 bp, Homo sapiens
gacaccaggagtcatgtgatgtcaagatggcggcgccgcggtagcaggatccgggttgtggcgtcctaggagccgcgacggtttctgccctcgggcagtgaggggcagcagcgcttggctgacccctgcggcgtcccgtagcctcgcgttaagccttgttcagagcgggggcttttgctgtcgcagtgggttccggagagtgcaggtgatttcgcagcaggtttcttgtgctggccgcgctcgccggacgaagaagagaagggcagttgggcctgcggccttggcgttcatgaggcctcagagagctccggaggagctacaactgtgagggggctgctagagttcttctcctcgggtgtgtgagaagcagcctaggaccccgggttcggggagtcgcaaagaaggccgtaagggcttcacttccttctccggaggcctgccttctgcgcgtcgattaacaccgcattctttcccacttcctctcaatgttttcttcatatatctggaaatatgatcagcgcccctgacgtagtggccttcaccaaagaggaagagtatgaagaagagccttacaatgagccggccctgcctgaggagtactcggtgccgctcttccccttcgccagtcagggtgctaacccctggtcaaaactgtccggggccaagttttcgagggacttcattcttatttccgagttctctgagcaggtgggaccccaacccttactgaccatccccaatgacaccaaagtttttggcacttttgatctcaattacttctccctgcgtatcatgtctgtggattaccaggcttccttcgtgggccatcctcctggatctgcctaccccaagctgaacttcgtggaggactccaaggtggtgctgggagattctaaggagggcgcctttgcatacgtgcaccaccttaccctatacgacctggaggcccgtggcttcgtgaggccgttttgcatggcttatatctctgcagaccagcataaaatcatgcagcagttccaggagctttcagccgaattttccagagcttctgagtgcttgaagactggcaacaggaaggcatttgctggggaacttgaaaaaaagctgaaagacttggattacaccaggacagtgctacacacagaaacggagatccagaagaaagccaacgacaaaggcttttactcatctcaggcaattgagaaagccaatgaactggccagtgtggagaagtccatcattgaacatcaagacctgctgaagcagatccgctcataccctcatcggaagttgaaggggcatgatttgtgtcctggtgagatggagcacatccaggatcaggccagccaggcatccactacctctaaccctgatgagtctgccgacacagacctttacacctgcagaccagcctacaccccaaaacttatcaaagcaaagtccaccaagtgttttgacaagaagttgaagaccttggaggagctctgtgacactgaatatttcacccagaccctggctcagctcagccacattgaacacatgttcagaggagacctgtgttacctcctgaccagtcagattgatagagcacttctaaaacaacagcatataacaaactttctctttgaagactttgtggaggtcgatgacaggatggtggagaaacaagaaagcataccctctaagcccagtcaagacaggccgccttccagttctctagaagaatgcccaattcctaaagtgttaattagtgttggttcttacaagtccagtgtggagtctgtgttgatcaagatggagcaggaactgggagatgaggagtacaaggaagtggaagtgactgagttgagcagtttcgacccccaggaaaacttggactacctggatatggatatgaaagggagtatcagcagtggtgaaagtattgaagttttgggcacggagaaatccacctccgtgctttctaaatctgacagccaggcaagcctcacagtaccattgagcccccaggtggtccggagcaaagcagtcagccacaggaccatcagcgaggacagtattgaagtcctcagtacctgcccctctgaggccctcatccctgatgactttaaggccagctacccaagtgccattaatgaagaagaatcatatccagatggcaatgaaggagccatccgcttccaggcaagcatcagtcctccagaactgggtgagacagaggaaggcagcatagaaaacaccccatcacaaatagactcctcctgctgtattgggaaggagagcgatggtcagttggtgctgccctccactccagcccacacacactctgacgaggatggggtggtgagcagccccccacagcgccacaggcagaaggaccaggggttccgtgtagacttttcagtggaaaatgccaacccttcttcccgagacaacagttgtgaagggtttcccgcttatgagctggacccgagccacctgctggctagccgggacatcagtaagaccagcctggacaactactcagacaccaccagctacgtgagcagtgtagcgtccaccagctcagacaggatcccctctgcttatcctgctggcctgtcttccgataggcataaaaagagggctggccagaacgccttaaaattcatccgccagtacccctttgcccacccagccatctactccctgctcagtgggaggacacttgtggtcctgggggaagatgaggccatagtcaggaaactcgtgactgcactggctatctttgtccccagctatggctgctacgctaagcccgtgaaacattgggcctcctcccctttgcacattatggattttcagaagtggaagcttattggcttgcagagagtggcctcccctgccggtgccggtaccctccatgccctgagccgctacagccgctacacgagcatcctggaccttgacaacaaaaccctgcgctgccccctttacagaggcaccctggtgccccgcctggcagaccaccgcacacagatcaagcggggcagcacctactacctgcatgtccagagcatgctcacccagctctgctccaaggccttcctctacaccttctgccaccacctgcacctgcctacccacgacaaggagacagaggagctggtagccagccgccagatgagcttcctaaagctgaccctgggtctggtgaatgaggatgttagggtggtccagtacctggctgagctgctgaagctgcactacatgcaggaatctccagggaccagccaccccatgctcaggtttgactatgtccccagctttttgtataaaatctgaggtcggtcccagacactgtgaccaagacctgtgactcagggtatggggaggggaggggttggcatgaccaaacagttgcctgagctggactgtttaagtttctggtgtctggcagcatggttcccacgtggctcctagtagtttttaagttggacatgggcagaagtggagcctggctccctctaaaggcgtctggagggatggtgacagctacatttggctccctggtgaagagtggcccctggatatggagggggccttggttttctgaggactggcagccagggcagaagggaagccaccagtcccttggtggggcagggtgagggcaggaaggccaaagcctgatgggaggagcacactggctgtattcagcattgccggacacttgagtggcaaaatgaacgagggtgacagccaggtaactgttgtggtttggtggaaaacaggagggcagaacacccatcgcctccttcagacccagatgcagccctttatttgcttcctggagcccactgtcctaggggaggccctggaccagccagtgggggtgagaaaggctgccaccctctgggtcgtgggaaacatgcgaccttggcctcagggccacagagcgtgagcagcaccctgtccgctgtcctcgccacctttacctgggagagaagtgcctgtgagcgggccttgggactcactccccatactctttcaccaggaacgagcagagtgttcactagtcctagtgtgaagcgggcacaagtgaccaaagccaatggtgaggaccaccttgggggctggagagcacagcaggcagagcagggctgaggcgccatgaggccatcaccaccatgcaagggaggagcagccagcagctctcctgggtggcccactggctcctgccggccagagcgcatgagcactgaccttcctcgtggggaaggtctgcagacccgtgtgaacatggcagaggccacactccagctcccacccacataaacctttgcaaccacttcactacctctcactgggtctcgtgggcttgggacagcaacggttctgtttagtcagctggtgcaggtggttggcccagccgatgagaactcaaatagcacggatttcctggatgagctaccacgtggcgctcttcaggttctgcctctgggaggctgtgtgcacctcagtcaccacagctcacggccgtccccagttgagtcccccttctgaggacaagtttgaaactgggaaggagacaccccctggttccgccagcacctatcccactgatagtgatcccctggcctccccgagcctccttaggcaatggccactggtttgtagacagagagtttcttgcagccttgaaaattttattccctaagtggggacagctctggtattactgcttctttaatttgttccacaaaaattatgctgaaatggacctgaatcagccctgggtgtgcttctgttggcgcctgctgctgaggcccggcctgcccatcggcctgtagtacgccatcgaggtcatcatggagccagccagcttctcttctcatcaaggaggcagagacccctggtggaagccaagagtgaccgaagagggcttgcatcacgtcactccagtggttccctccttgtccaagtcctcgttttaagggcatggcccgttggctccagccgttggcttctgttcagggtccttgctcccatcagaggtgtttgattttgctcctggggctgcgatggagaaccttttgtggcagatggtgctgcctacatctcattggttctctgtacctgtgcccgttgcgcatgttcacagacaggagagtcgccagcaataccttggcagcctttaaatgtgaaacgtctgttacttgcgctggaggcagaggctgtgcagggagcctgcttctaatcgtgggctcccttatctgttacggttccctcccctcctgttctagatgctgattcgttttctcactggctggttaattgctgtctacttaggcctccaaggccataactgtgcaacattttatctgagaaggaaggaaggtcagaaagtgatcactggcaccaccactgtggcattcctgtcacaccaacacagaaattcacagctcatactgttctcacctgggaaacttgggaagggctgatgagtttggggcagatcctgaattgcagccacacttggccttctagaagctgaagttgtgccctcaagtggtcctaagtagaagtccacttgaggtatttgctggcacacaccctcaagggtggttcagaaggtcctgaaacctaaggcaaaaggctgctggggcatgaacagaacagaccgtctcaggggcagccatgtaagtggcaagcagggctggtctccctcaaggtggttcttcattaagtaaagatggcttcgtgactagtgtttagctcccagatttatatttgggttaaaaactaacttttcaatgtggcagtttcaaaggattacttgatgcaaagtatgtttcctttcaaagggatcttgacgtggtaccaggactgagtcatgatttgggcagaggcagttaacactgggaagccctgcccctccctatgcccccttcactccggggaactgaaacctactctgagtctcacatctctaaacctcagtgctgagacctatgcagtgggactaatctcatcaagaattttcagttgaggccgggcgcagtggctcacgcctgtaatcccaacactttgggaggccgaggtgggcggatcacctgaggtcaggagttggagaccagcctggccaacatggtgaaaccccatctctactaaaaatacaaagaaagttagccaggtctggtggtgcgtgcctgtaatcccacttactcgggaggctgaggcaggagaatcacttgaacccaggaggcagaggttacagtgagccgagatcgcgccactgcactccaccctgggcaacaagagcgaaaactgtctcaaaaaaaaaaaatttttcatttgaggtattcttccagtagaaggttagtaagtttttaatgaaaccattaaaaattacacttcccagaaaatagatgacatcagtgccccttgctactttctcagtcctcactattgctttgagggcccaggtactgaaactggttgtcttgagttttgtgtcagctttttctccagtccattatccccctcccttgcttctgaagcagtctaggttaaactagccaggcaggtagttgtggactggtgattttcaaaagccccactttagagatcaggccacagctttttatatcgcacaggacacatcagcctgagctgctgcctcatgcctgtttccccaggaacctcactcctttggtagaaccttgggattttagaaattgtggcttttccataactcatttactccaacagttgaagttacacacattgctcccaaatttggaaatagaccacagtaccttacctttcattccccatctggcctttaccttctttgcttcagtggttgaaaacagttgccatattcaaagtatagtagatttcaacctcacacaaatgacaagtcccattttacaatcctaggaaggcccaccaatttcatttcacgcgccagggcggctgcagttggaggccgagggcagccctctgctcactgaatgtcttgcatgtgctgactgctgcccgcagtgctgaacatgccccaccgcccaggcccagcactgcttgttgggtcagcatctagtgctgctgtcacatctttgtctgcacagccagtaggattgcctcagccagggggtttatcagaaggtgtgcaaggcctttgggggaactgagcccctatagtgggcagtctcctttaccttcccacctccctgaaaagcacagaagacagtgccttggtttgtgttttgaagcaaacaagtcagctttctggctttgccccaaaactgtgatggaacataataaaactggagatatggtttttaacactgcaaaaaggaaaaagcatcaagtttctacttctggctggaaagcaaaaccaatctcagctgacaaggctgggcaaactaagttttcctgagcccattttcctttgagccctgacctagcctggccttacctcattaaggtttggttaaagcagtggaaaggaggaggaggcaggggtggatgggggtgtggggaggggatgagcactctgcagccgattaatctgttggtaggggcccagcttcttgggagtgcttattcagcccaagagtggaggctgtttacagcgagccctggagatggcagcttgtctccagctggggaggggtcaggcccctaaattgaagaccactttggtagcagaactgtagggactggtgagtcaactcacagattctgcagcagctgctccacccacaataaagcaaacgccgacaggctagaccccagattgcaggggctgccacctacaaggtgggaccacaggctgcctcaccgggattgtctgccactaaatagctggagtcacagattgagataaatgccaccttcaaggttgcagtgaaaagcataatcctatgtgatgaatttatatgtgttattttttaaaaagctattttattactgcatgttcccgtcccgtcttgtgaatgtgagtccccgccaccacgtgaggtgcagtcgttgcagcggctggtgcaggagtgcagctggcgcgtgtgtgatagcatctcgtaggtgttgctgcacaagagttaaccagagtcaatgccaaacacatagtatgagaagtgtactttttaagaaattaatttatttgagttcaaatatttttgaaatataaaaattggttgtattttttaaagctataattcttgtagacattctgtggttaaaaatttgattgtgcttattaaaaatggtcatctatgttttgcacttcagctacgtgaaaataaaatttctttgggaaggtgaaaaaaaaaaaaaaaaaa

SEQ ID NO: 1022 - DNA, 3980 bp, Homo sapiens
tgaggagcagccacttccctgcaggctgagcggagccctggatggagcttggcacccaagcccctcatgtctgccctgctgagtctgtgttttgtgctgcccctggcggcccccggccacggcacgcagggttgggagccctgcacagacctgcgccccctggacatcctggcggaagtggtcccttctgatggcgccacaagcgggatcaggatagttcaggttcacggtgcacggggactccagctctcagtagccgccccccgcaccatgagcttcccagcatccaggattttctcccagtgtgacctcttccctgaagaattttccatcgtcgtaactttgagagttcccaatcttccacccaagaggaacgagtacctgctgacggtggtggcagaggagagcgacctgctgctgctcggcctgcggttgtcacctgcccagctgcacttcctgttccttcgcgaggacacggccggcgcctggcagacccgagtgtccttccgcagcccggccctggtggatggccgctggcacacactggtcctggctgtgtccgcaggcgtcttctccctcaccacggactgcggcctcccggtggacataatggccgatgtgcccttcccagccaccctgtcagtgaaaggagctcgattcttcgtcggcagccggaggagagccaaaggcctgttcatgggactggtgaggcaactggtcctgctgccgggctcagacgccaccccaaggctgtgtcccagcaggaacgccccgctggcggtgctgtccatcccacgggtcctgcaggctctcacggggaagccagaagataacgaggtgctaaaatatccctatgaaaccaacattcgagtgacgctgggaccccagccaccgtgtaccgaggtggaagacgcccagttctggtttgatgccagccggaagggcctgtatctgtgtgttggcaacgagtgggtctccgtgttagcagccaaagaaagactggactacgtggaggagcatcagaacttgtccaccaactcagagaccctgggcattgaggtgttccgcatccctcaggtggggctctttgtggccacagccaatcgcaaagccacatccgccgtctacaagtggaccgaagagaagttcgtctcatatcagaacatccccacgcaccaagcacaggcctggaggcatttcaccatcgggaaaaagatcttcctggcagtggctaattttgaaccagatgagaagggtcaggagttctctgtcatttacaaatggagccacagaaagctgaagtttaccccatatcagagcattgccacacacagcgcccgagactgggaggccttcgaggtggatggggagcacttcctggcggtggccaaccaccgggaaggcgacaaccacaacatcgacagtgtcatctacaagtggaacccggcaacccggctcttcgaggccaaccagaccatcgccacctccggcgcctacgactgggagttcttcagtgtggggccctactcgttcctggtggtggccaacaccttcaacggcacctccaccaaggtgcactcgcacctctacatccgactcctgggctccttccagctcttccagtccttcccgacgttcggtgctgcagactgggaggtcttccagatcggggagaggatcttcctcgctgtggcaaacagtcacagctacgatgtggagatgcaagtccagaatgattcctatgtcatcaactccgtcatctacgagctgaacgtgaccgcgcaggcctttgtcaagttccaggacattctcacctgcagtgctctggactgggagtttttctcggtgggagaagattatttcctggtggtggccaactccttcgatgggcgtaccttctcggtgaacagtattatttacaggtggcagggctacgagggcttcgtggcggtgcacagcctccccaccgtcggctgcagggactgggaggccttcagcaccacggctggtgcctacctcatctactccagcgccaaggagcccctctccagggtcctgcggctgaggacacgctgaggccgcggctgcccggcagcaactggggtggccaggtggggcgggaccccagcacctcccccaactgaccctggacgtccaggtgggcccagcctagggcatcccgggcctgggcatcaggcagggtgcaggtggggccatctgcggccctggttcgggcagggacatccatccacctctgagtccttctgagccacagccccagtgacggtctggtcttgcaggcagaggcccagagcccctgccagtgctcgcccatctgagtgtcaagcggggatttcgctgtcaaggaaccgtttctatacatttttacctcaaacaacaggacctcggttcatgtccctgcggctggcctctcgccagccactcctgcagtgtgcgtccggccgcctgagcaggtgtggtgccgtcccgccattgccgccacctatttattgtgttttatctgaacggaagtgtatttatactgctctttacaaaagcaccggtgctcctctctaggcagcgggtgggcacagcccctcaccacggacacggacagaggaccacctccccatacagagagaggcttccctcccagcctcagtttacccgtaaatgcactagcgcgaggtcagaaatcacaagcctgggcatggcctgggtcgcaccccctccccacggccccacccacagggacctcaacttctgggcccgggattttttccctattcagcagcattttaatcacatgtcctccagctgactgggactcaggctgcgtgcctccgtctgcctgtgtgctggctgtcctagctccctggtaacagcatcctctgctggctctcctgtggtcatcttgtctctgcagctgggagagctgcttgtctgtccgtcacaggcagtgaggatgagagggggtgatgggcgcaaggccccaggggtcctccctcttaacccatgtaggtgccagagaaaccacccccactccatgagaagaggctcagacagcaggctccggggccacgcagcccagaccacacctgccacggtcttccaggaacggtgctcctgcttctgcaacacaaatcggaacaggagcgatcctcagagagtttacaatgtgctttttccgccaatcagaactgtggacaaaacttcctatttcctacaccgcagctgtctgttcaccttcagctcagagagcactcctgacctttcgtaatgaaatggaagcctccccttgtctggcaaataataaactcagtgtctacttttgccggctttgggaccttcgtgtttttccggggctcaggtctcactccagccatcgctgtggccagtggagagccactcccctctgggggcagtcgccgagagcctccttcccctccgtccagccagcaaggctttcccaagcgtcctgggcaggagggttgggccctgctttccaccaagtcactcagaaggtcccaatcacacatgattggcctcattgggtcagcacctgtgaaaggaagattaaaaactcgacaccccaattcactcaaccaagaagaaaaaagctgaaagctgagtcctgcaggaagctgcctttccctttgccctaagcagacagctgcagatgagagggtcagcatctccactagtggctgctctgtgtgccccttatctcatggaaagtgccaatttactgagcacgagataaacaggtaactgactgttcccacctgctccttttctcctgcagcatggagcaatcagtcatgtgaccacaccctcctccctctgccccctccagccggcttttccccttgactgaagccttcaacatcatcttgggagagaggcacagacctgtctcctgggtgcatccttagccttggcaaaataaacttctccattgatcgagaaaaaaaaaaaaa

SEQ ID NO: 1023 - DNA, 10983 bp, Homo sapiens
atggactcagggccagtgtaccatggggactcacggcagctaagcgcctcaggggtgccggtcaatggtgctagagagcccgctggacccagtctgctggggactgggggtccttggcgggtagaccaaaagcccgactgggaggctgccccaggcccagctcatactgctcgcctggaagatgcccacgatctggtggccttttcggctgtggccgaagctgtgtcctcttatggggcccttagcacccggctctatgaaaccttcaaccgtgagatgagtcgtgaggctgggaacaacagcaggggaccccggccagggcctgagggctgctctgctggcagcgaagaccttgacacactgcagacggccctggccctcgcgcggcatggtatgaaaccacccaactgcaactgcgatggcccagaatgccctgactacctcgagtggctggaggggaagatcaagtctgtggtcatggaaggaggggaggagcggcccaggctcccagggcctctgcctcctggtgaggccggcctcccagcaccaagcaccaggccactcctcagctcagaggtgccccagatctctccccaagagggcctgcccctgtcccagagtgccctgagcattgccaaggaaaaaaacatcagcttgcagaccgccattgccattgaggccctcacacagctctcctctgccctcccgcagccttctcattccaccccccaggcttcttgcccccttcctgaggccttgtcacctcctgcccctttcagatctccccagtcttacctccgggctccctcatggcctgtggttcctcctgaagagcactcatcttttgctcctgatagctctgccttccctccagcaactcctagaactgagttccctgaagcctggggcactgacacccctccagcaacgccccggagctcctggcccatgcctcgcccaagccccgatcccatggctgaactggagcagttgttgggcagcgccagtgattacatccagtcagtattcaagcggcctgaggccctgcctaccaagcccaaggtcaaggtggaggcaccctcttcctccccggccccggccccatcccctgtacttcagagggaggctcccacgccatcctcggagcccgacacccaccagaaggcccagaccgccctgcagcagcacctccaccacaagcgcagcctcttcctagaacaggtgcacgacacctccttccctgctccttcagagccttctgctcctggctggtggcccccaccaagttcacctgtcccacggcttccagacagaccacccaaggagaagaagaagaagctcccaacaccagctggaggtcccgtgggaacggagaaagctgcccctgggatcaagcccagtgtccgaaagcccattcagatcaagaagtccaggccccgggaagcacagcccctcttcccacctgtccgacagattgtcctggaagggcttaggtccccagcctcccaggaagtgcaggctcatccaccggcccctctgcctgcctcacagggctctgctgtgcccctgcccccagaaccttctcttgcgctatttgcacctagtccctccagggacagcctgctgccccctactcaggaaatgaggtcccccagccccatgacagccttgcagccaggctccactggccctcttccccctgccgatgacaagctggaagagctcatccggcagtttgaggctgaatttggagatagctttgggcttcccggccccccttctgtgcccattcaggaccccgagaaccagcaaacatgtctcccagcccctgagagcccctttgctacccgttcccccaagcaaatcaagattgagtcttcgggggctgtgactgtgctctcaaccacctgcttccattcagaggagggaggacaggaggccacacccaccaaggctgagaacccactcacacccaccctcagtggcttcttggagtcacctcttaagtacctggacacacccaccaagagtctgctggacacacctgccaagagagcccaggccgagttccccacctgcgattgcgtcgaacaaatagtggagaaagatgaaggtccatattatactcacttgggatctggccccacggtcgcctctatccgggaactcatggaggagcggtatggagagaaggggaaagccatccggatcgagaaggtcatctacacggggaaggagggaaagagctcccgcggttgccccattgcaaagtgggtgatccgcaggcacacgctggaggagaagctactctgcctggtgcggcaccgggcaggccaccactgccagaacgctgtgatcgtcatcctcatcctggcctgggagggcattccccgtagcctcggagacaccctctaccaggagctcaccgacaccctccggaagtatgggaaccccaccagccggagatgcggcctcaacgatgaccggacctgcgcttgccaaggcaaagaccccaacacctgtggtgcctccttctcctttggttgttcctggagcatgtacttcaacggctgcaagtatgctcggagcaagacacctcgcaagttccgcctcgcaggggacaatcccaaagaggaagaagtgctccggaagagtttccaggacctggccaccgaagtcgctcccctgtacaagcgactggcccctcaggcctatcagaaccaggtgaccaacgaggaaatagcgattgactgccgtctggggctgaaggaaggacggcccttcgcgggggtcacggcctgcatggacttctgtgcccacgcccacaaggaccagcataacctctacaatgggtgcaccgtggtctgcaccctgaccaaggaagacaatcgctgcgtgggcaagattcccgaggatgagcagctgcatgttctccccctgtacaagatggccaacacggatgagtttggtagcgaggagaaccagaatgcaaaggtgggcagcggagccatccaggtgctcaccgccttcccccgcgaggtccgacgcctgcccgagcctgccaagtcctgccgccagcggcagctggaagccagaaaggcagcagccgagaagaagaagattcagaaggagaagctgagcactccggagaagatcaagcaggaggccctggagctggcgggcattacgtcggacccaggcctgtctctgaagggtggattgtcccagcaaggcctgaagccctccctcaaggtggagccgcagaaccacttcagctccttcaagtacagcggcaacgcggtggtggagagctactcggtgctgggcaactgccggccctccgacccttacagcatgaacagcgtgtactcctaccactcctactatgcacagcccagcctgacctccgtcaatggcttccactccaagtacgctctcccgtcttttagctactatggctttccatccagcaaccccgtcttcccctctcagttcctgggtcctggtgcctgggggcacagtggcagcagtggcagttttgagaagaagccagacctccacgctctgcacaacagcctgagcccggcctacggtggtgctgagtttgccgagctgcccagccaggctgttcccacagacgcccaccaccccactcctcaccaccagcagcctgcgtacccaggccccaaggagtatctgcttcccaaggcccccctactccactcagtgtccagggacccctccccctttgcccagagctccaactgctacaacagatccatcaagcaagagccagtagacccgctgacccaggctgagcctgtgcccagagacgctggcaagatgggcaagacacctctgtccgaggtgtctcagaatggaggacccagtcacctttggggacagtactcaggaggcccaagcatgtcccccaagaggactaacggtgtgggtggcagctggggtgtgttctcgtctggggagagtcctgccatcgtccctgacaagctcagttcctttggggccagctgcctggccccttcccacttcacagatggccagtgggggctgttccccggtgaggggcagcaggcagcttcccactctggaggacggctgcgaggcaaaccgtggagcccctgcaagtttgggaacagcacctcggccttggctgggcccagcctgactgagaagccgtgggcgctgggggcaggggatttcaactcggccctgaaaggtagtcctgggttccaagacaagctgtggaaccccatgaaaggagaggagggcaggattccagccgcaggggccagccagctggacagggcctggcagtcctttggtctgcccctgggatccagcgagaagctgtttggggctctgaagtcagaggagaagctgtgggaccccttcagcctggaggaggggccggctgaggagccccccagcaagggagcggtgaaggaggagaagggcggtggtggtgcggaggaggaagaggaggagctgtggtcggacagtgaacacaacttcctggacgagaacatcggcggcgtggccgtggccccagcccacggctccatcctcatcgagtgtgcccggcgggagctgcacgccaccacgccgcttaagaagcccaaccgctgccaccccacccgcatctcgctggtcttctaccagcacaagaacctcaaccagcccaaccacgggctggccctctgggaagccaagatgaagcagctggcggagagggcacgggcacggcaggaggaggctgcccggctgggcctgggccagcaggaggccaagctctacgggaagaagcgcaagtgggggggcactgtggttgctgagccccagcagaaagagaagaagggggtcgtccccacccggcaggcactggctgtgcccacagactcggcggtcaccgtgtcctcctatgcctacacgaaggtcactggcccctacagccgctggatctaggtgccagggagccagcgtacctcagcgtcgggcctggcccgagctgtctctgtggtgcttttgccctcatacctgggggcgggttgggggtgcagaagtctttttatctctatatacatatatagatgcgcatatcatatatatgtatttatggtccaaacctcagaactgacccgcccctcccttacccccacttccccagcactttgaagaagaaactacggctgtcgggtgatttttccgtgatcttaatatttatatctccaagttgtcccccccccttgtctggggggtttttatttttattttctctttgtttttaaaactctatccttgtatatcacaataatggaaagaaagtttatagtatcctttcacaaaggagtagttttaaattccatttaaaatgtgtatttattggattttttaaaagcgacaatagtaatggtaaaggatgggcaggaaaggccagtagtgctcccccgcccagtctcgctgggtctggcgagccaagcccctcgggcgctggcgaggtcctcagccatctgcccctcgagagccaagcgcggacggtagccacccagttcatccctcccgacatacaccccttccctttggggaagggagcctcaggacagcttctgtcctctctgataggatgggagagtctgcagaaaaccatctggggtcccttttccagtccccggcttggagtcgaagggcagatgcaccccaggccagccccacgagatgctggcatagctttccccagaaaccaggttggaagtagatggcttcaagcttgctagtctccacactgaatcctctgtccgttatttatggagtcacacgatgtcatggttcactaggcagcacctcacgctggagctggagtgcgaggttcttaggggccgtgcccaccatgttgccaagccaatgcatgctgagctgaaggaatttgtcttagtggcagttttttaaaaaatgcccccaaagtctatgctgatactgaaaaagggctactgtatctttaaaaacaggaagttgaacccaagctgtgaaaagccagtggtgctctgtgcatggtgctgtgcggagcctggtgctgtagtgttgtgctgggactttcttgactcttgggcaggtcacatcctacaggagctcagcagaccagtgtaacaacagttaatgcatctatcctgatccctgaatttccacattggacaatggtgcatgcctcacacctgagcctgcttcctccatgctgtcattgggttcgggggcctacacttaacaattttaaagtgcaagagtcaaacattttcaacaggttgctataattttcctccctaattggtgccatttctccatttgatcattttctttttttcctttctcccctcttcatccactttaatatagctgttctgaaattctggtgcattcattcggttctttgaaatgagaatgtggtgcttaatttttgtgacgttgtcgagagaggttgggcctgatgggagcaacactcatcatcaccaagtcaaactttgttggagtgttggtttttcttgtgatattagcagaaatgatctcatgctagccatgtggatgtgtgtgtggtgaatggggggcttcatcaggacacacagaggggaatgtggccacacggtggatgaccaccaagccctgagatgaacaggtatttactgagcagttgtattcagatatgggtcttcatgaatcatgtttaacaatcagatgaccgctataggcaagttcctgagcttccgggtgccttgagtaagagctgagaaccggcctgctgggtgtttactgtatctgtttggaagcactggcggagggtcgttgtaagatgtcctgagcatttatgtggtctggttttaactgtaaatagtgaaagatttttttaagcacttttgcctagatttaaacagcaacttgaaaaaaaaagtatgttttaacatgtaattgtgggagaaattgtaaatagtagccgaatatttaatgtgctttgtctatcctccacttttaccatattctgtaaagttgcatttattttacaggacaaaaaaatgaaatattattgcttttgaaataaatacccaagagcttatcaggacttagaattattcagaactcagatttataggaaaacctctgaccttcagtttgacaagctaaaggaagcagagtctttaatgagcatgctaattttctagttttgaggaaaaattgggtcctttaaatgctattttgcttatcgcatcagtacttttatgcaggtctcatttgactccgtgcttaggtagatgcgggggtgccttgaaaacttcattttaaatgatcttaagcaagaaatacaatattttacgaaacatttggagaatgtgaccgtctgtatgacccgtggaagccccaggttggctgttggtttggaaggtcccgagtgtaacccaggtgattctgatacttggcatgtgtgaatcttcctgatgtatgttaaataaactcttcccctcatcaccctttggtaggaaagccattagatgaaaggagaaaccaatacaagctaaaagcatgcgacgtctgtcccccagcccaaacagccttggttcatcagtttctgcagtaggagataggctgctgagaggtgagtcaagaggcagtctccattggatgtccccactccccgcagaatggcgtttccagagttaggcggtgtggttgccgtgctcaagcccatgctgatttgtacactacatgtctaacctacctcaaatctcagtcattaaaattagcatgctttagacatatatttaaaaagtaactatgcacagctctttatcccccccttgctgctgaagctttcttaaagagaaaaatcaaatttttattttttactggcactatcattttttaagtcctaaagatgattaacagacatttttatcatgagaagaaaaataaagccattgcaactaaagaacctaacagcatgaccaagttcgaagagtcatattatagcaacggaaatcgatggcgtcttagtcatctccccagtgtgccctgtccacggacaccatccacgtgcagtgcaaacatttggttccttttctgctctgttttgttttccctgcctgttgcgtgcaagggaagtgcttgtaaagttctgtgctacgagatttttaaaataaaaatcgcttcgcagcaggttctcacaaaataactggtgctagctcaagaaatcatcatctgaccatcagaaatcttgactaaaggtgttgcatggatttgggggtctttcggtttttggttttgggtctggcttttagcagggccaatgtttcccacaccccggcttcatgggtactgctttgccttctcaccaaggtgacgatggtgtgcgtggaaagagatgataccccaccgccccctcttggtccttccaccagcctcttttgggaacagtagtttgcagagcaagggatttttaaagcgctaaagcaaggaaagaagtagcagagcttaactgctttgtaccacacagcagtagatgtgcaaggacggttgacaatgagtcgatgataacctaatttcattgagagaaacccagccagacttgcttctagaggtttaatcaccatgagatctcaaaccaaggcaaagctggtggaaaactatatgatatccctgacgtgcctcaaccagtatctctttccttttgttactgaagtgtgttttatggactaggaagcatttttatgaattgaaatagtctaaataaaatggtgctatggtgttttaatgtgactgtccctgatcctgtcttgctgaggtgctatcaacgttctgaaaccacaaccaaccaaaaacaaggtgggctccagtctcttggcttttttttttccctcccctcttttggtgctgtcttagacccgtttaccgtgctataatctgctctgagcagtgttgtgttgtgttgtattgttcttcccttggtggccaaacaaagcaagtcgagaaggcagctatctccctttctgtgatcgggagtgggcctgcctggcttggcaggtgctttttggttccacacctgtcttctcaggcttgatgtgaaagaaagggcgaagggttttttgagtttttgtttttgaggaaggggagttgggtacttctgcctctcctagcatgataggcattctcatagccagggacagattttctcctgcagcccagggtgctaagcagacatctctgggagtcccaagggcacaccaagggagaccagatggatctccttcctcccctggcactggctgggaccatggtgggcaggggcttcattctctgacccagcgttgcttctgcctctcattggtaaccccttatgttcggactaaaggaaggagctttctttgctcactcgatgccactgaggctgctttttagttggtgctaacctaaatttcttcttgggtccacagaagttgatgttttaaaaactcaccaggaagctccattttgtgtcatccactgtcacaataatttttttaaatacctcaaaaacaggacatcatgacaacttcagtaaagtagattccatgagggtctgatacctgcaggttgtccgtctgatgacatacttgaccttgaaaaatctggggtcattttgtttttcattcttcagcagttaagatagcggaacgccgaaaggaaggagcgtagttggctgtatttcatgtttaagttttgcttttgaataaaatgtgaatttcctatgcccatctcattgagctttctcagtcattgttgctgtcatttgaaatgactccctcaaaacctagttttattagccagctgcctctgctgtagtacatggccaacttcaacataccctggaccaaaacatttttgaggtgcatacccccaacataagttacacagtcccacatccaggtgcacagagtgcgagtgcactccgcgagtgcggggggaggggcggccccctctggtgctcccagcccttcctcctgcagagctgcaggcaagagcagagcaataggcttctcccctgagcagagaccgcagcacagaaatgcaaggtctaaagttgctttttgcctaagaatcagcgagcgatttggcctacttcctcattggcttctattctgatatcagggatgctttttgtagtggtattgtttgctccctcttcgcgttttgactacccgtcattcaggggtaactcatcactcttcacacggggatttaaattaagaaactaattggctcatgtgaacattccaaattttcttggtttcaatacccttttttttcttttgaggggaaaagaggggagaaaaacaggagtgatgtcatttctttttcatgtattccaattaaagaaacaagggcaggtcgtataatggcatattaatacattagacttaatctagaacccctgtagctttttgatgtgttttatttcttatctctttgaattcctgtttggttacttggcttccaatggaggtgaacttaacaaccatacttgaatattccgtcttgactttgtaaactgtggctacttgaaatgaagtttatctggggttgatggatgaatggtagatttttgcaatgtctcaaggcaataggatgtgtattaaactgtagatattcttagtacagtaaatttatgctgataattttattttgtataatttttacctttttgttaatattttttccttccactttattggtttgcctcctgagctacccctccttaccctcccttctccctcagtgtttcagtaaatttaatttagggtgcctagaaattgcaagtatgtatcctttttgatttgtattttattataatttacacaaacaactgggtttgtgaactgtattactcctggtatctttaaaatattgtgggtgttttaataaattttatatttattttttgcactcaaa

SEQ ID NO: 1024 - DNA, 4711 bp, Homo sapiens
aggccccgccgccgccgccgctgctgacccggcggccggccgccgttccgccccctcccgtggcggcgagcgggcgggcctccccacacgcccccgccgcccgcgccccgcgtccacccgcgccccgctcccggggactgggagaacaggatagcagcaggagtcggggggccgccgaagatggggaacactacctcgtgctgcgtgtcgtccagtcccaagctccggaggaatgcccactcccggctggagtcctaccggccagacacggacctgagccgcgaggacacgggctgcaacctgcagcacatcagcgaccgggagaacatagacgatttgaacatggaattcaatccttcagatcatcctcgggccagcacaatattcctcagtaaatctcagacggacgtgagagaaaaacgcaagagtctcttcattaaccatcatcctccaggacaaatagcaaggaaatacagttcctgctccaccattttcctagatgatagcacagtcagtcaaccaaacctcaagtatacaattaaatgtgtcgctcttgcaatatattatcacatcaaaaacagggacccagatggaaggatgctcttagatatttttgatgaaaatcttcaccctctttcgaaatccgaagtgccaccagattatgacaaacacaacccagagcagaagcagatttaccggttcgttcggacactgttcagtgctgctcagctgacggctgaatgtgccatcgtcaccctggtgtaccttgaaagacttttaacatacgcagagatagatatctgtccggccaactggaagcggattgttttaggggcgatcctgctggcctccaaggtgtgggatgaccaggctgtatggaatgtggattactgccagatcctgaaagacatcacggtggaggacatgaacgagctagagcgacagtttcttgaattgctgcagttcaacatcaatgttccttccagtgtctatgccaagtattattttgatcttcgttctctggcagaagcgaacaacctgagctttcccttggagcccctgagcagggagagggctcacaagcttgaggccatctctcgcctctgcgaggacaagtacaaggacctaagaagatccgcgaggaagcgctcagccagtgcagacaacctgactctgccccggtggtccccagccatcatctcttaactacggaggcccgccggaggccacaccatcccttagtttctcctttagtttgagaaaagacagacttggggtgggtttgtttttgttttttctttccttttctttttttacgcatagctccgtcaagctgcctggatgagcgcccatgcagcaaggcttggaggaagcgtcagtgccctggagatcccagctcgctctccccactgtcagcaacagcacttccttcgtggaggaagtggactcgaatcctggaggaggaaataaagggaaagggaagtcgtggagaggcagggaaaatggttaagcagcccggccctctggagtccccatgggggcggtagctgaagttggcgagcgcagcggtggatgcagagctggctgcacccagggctgggccagtgtgtcctgtaagacttcttgcattccttctgctgcttttttgggatgggggtatttttgttcatttgtttttgccctgttttgattttggtcccacagagcaggggatgtagtttgtacccaccatggcgcagacttccaaataaatagtactggtcatttctctctgcactatttctgcgcgctgtcttctgagctttcttcctcaccagtgggctgtgcttgttccatttctgtacacccttattttataccgtttttcttcaacaatggcgaaattgactgtagtgctgaaccaaaagtatccctttccctccttattcctcaccccaagaacattctagatcacatgggtgcttgtgccttccgattttcttgcatttgtttttttcctgacctgaagttgttgttacaaaatcagtcagactttgtgggctgaaggacacggtgcagcagagggtgtccctgtgagagttctgcagagtgctgggcatgtgcctggaactaccgagtaggagccatttctttgtacccctgcctaatccattcctctccttccaagtccattgttgcaagcaatattcttctcaatttttatatgtttactttaaatcaaagttagtctatttgtataaaatttttaaaaaatctaaaagaaaaagaaaaaaaacaagggtgggttgggtattccagtgggaagatcattgaagggaaaaatgttactatttactgaggtatttttcacagaatgattgaattaaaaaaaactcaacttgcattttcattgtgggtgcttagagaagttctacaaaattcaaactgtgaaggtttatgcttcattaattatgaccatactttttcattttctgacgatccctgatttccttatggactcaataagaatcttttatatcaagtaaaatgaaagttgatgatagaatatcaaatagtgaatttgatatgaaatctaagagtgtgagtcacttgcatatgtaatgctttgggtttttgcatattttcttaggtcacagtgacaggtttctgagttgtttcccttttcaagtctctgggaggccagtggcagcagcaggtctgtgtttcaccttcttcccatgtgagcttggaaaactttggcatcttaattagtcttgaatcatacacctgatccccaaacattgcctgctctcaatgaaacatgctttggaaatggaagggactcagaaagtcgaaatcccaagaactccaagccaaaagtgttaggttttagtgaaatttgtgtcaggtataagcatacctgtttgggccagaattattatcacagcctttctgacccaaactttcaaaagcaaataaacagcatataaaacgttaattatctttccattgtaattgtgatgatctactctgtatgggtaccaaaatcaccttctctcttcaagtcaaagttgaatttagaactttgaatacaggtcaaaaaatgtagaaaatatcattttatattccctaatctatatagctgaaaaagggttgtattttcttagctgaatatgaatacctcttaaacataaattagttcctctccagtgaagtatcttattttaccaatccatttcaggaaagaggttctgctgccgtaaaggcagaaattttatttttatcccttttatttgaatgagagatttgaaaatcgaattatgtaaatatttcaatgcatctgctattattttgtggagtttattaaactactttaaaaaaattgtatagtctatttattgtatgtatgtacatacagtctgatacctaaaatttaaagtggattccataaaaccagactcaagtcttgtttagactactgaatactgttttagcctgtgccctggattctacctctgtataggaaaattttccatattcattaattagtgttgatctgtattaattggttatgtttcttgcactaaggatgtttaaaactccgctgtaagtgtagattttagttttactggcaggatgaatcacttgacacataggtagatacttgaggttcattttcttttctttttctacatgatgatgaatagttatgttttcttctctgatttgttcaaagtttgccaaaagaaaacacaaaaccagtacagtacttactgataaatcgtagtgactgtaatttgtttgtaaggcgaattaatgctctacaattaaagctggattactattgaggaacacattgtcttagtgtagtttttgaatggaaagtttttgtcattaaggatgaaggaaacgacacaatttgttactttaattttatatttgatttaaacaacaaataaagtcattgggacaataaatatatatcccgatgaatctttttgatttgttttacttttcttatttttttttttttaactagaaaaagggaaagaagaagtcaggagtttaaaaccaaattggagggcagatgagaaatcctgccaagatcgggatgtgccttcatgcatgaggtgaggccagaggtgtgggcacctgtacctgcctcctcttctgggctggctttcctgtctgcctgctctcgggcttgggcagagccatctccatcctggggtttcctttaagctaagctgaaagcaaaatttggggagtgaatgatttaaacttttcctgctgcttttggtaacttctcacctggggccatattttacagatttgaatttttttttttctttttttgagatggagtctcgctcttgtcacccaggctggtgtgcaatggtgcgatctgggctcactgcaacccccacttcccggattcaagcaattctgcctcagcctcccgagtagctaggatcacaggcacccaccaccatgcccagctgatttttgtagttttagtagagacagagtttcaccacgttggccaggctggtctcaaactcctgacctcaagtgatccacccccctcagcctcccaaagtgctgagattacaggcgtgagccactgcccctggcccagatttgaaattttttaaaaataaaacatgattcttggttattgtaggtatttaataaatgttaaataaatatatacatagaacaaagtaaaaaa

SEQ ID NO: 1025 - DNA, 5599 bp, Homo sapiens
aaagccttcggaaatagaaacaaagttggtcacaaatcacattagctttgcccgaagtttttccccacactcttctttagcatgctattatggggaaagtgaccactcctgggagcgggggtggtcggggcggtttggtggcggggaagcggctgtaacttctacgtgaccatggtacctgttgaaaacaccgagggccccagtctgctgaaccagaaggggacagccgtggagacggagggcagcggcagccggcatcctccctgggcgagaggctgcggcatgtttaccttcctgtcatctgtcactgctgctgtcagtggcctcctggtgggttatgaacttgggatcatctctggggctcttcttcagatcaaaaccttattagccctgagctgccatgagcaggaaatggttgtgagctccctcgtcattggagccctccttgcctcactcaccggaggggtcctgatagacagatatggaagaaggacagcaatcatcttgtcatcctgcctgcttggactcggaagcttagtcttgatcctcagtttatcctacacggttcttatagtgggacgcattgccataggggtctccatctccctctcttccattgccacttgtgtttacatcgcagagattgctcctcaacacagaagaggccttcttgtgtcactgaatgagctgatgattgtcatcggcattctttctgcctatatttcaaattacgcatttgccaatgttttccatggctggaagtacatgtttggtcttgtgattcccttgggagttttgcaagcaattgcaatgtattttcttcctccaagccctcggtttctggtgatgaaaggacaagagggagctgctagcaaggttcttggaaggttaagagcactctcagatacaactgaggaactcactgtgatcaaatcctccctgaaagatgaatatcagtacagtttttgggatctgtttcgttcaaaagacaacatgcggacccgaataatgataggactaacactagtattttttgtacaaatcactggccaaccaaacatattgttctatgcatcaactgttttgaagtcagttggatttcaaagcaatgaggcagctagcctcgcctccactggggttggagtcgtcaaggtcattagcaccatccctgccactcttcttgtagaccatgtcggcagcaaaacattcctctgcattggctcctctgtgatggcagcttcgttggtgaccatgggcatcgtaaatctcaacatccacatgaacttcacccatatctgcagaagccacaattctatcaaccagtccttggatgagtctgtgatttatggaccaggaaacctgtcaaccaacaacaatactctcagagaccacttcaaagggatttcttcccatagcagaagctcactcatgcccctgagaaatgatgtggataagagaggggagacgacctcagcatccttgctaaatgctggattaagccacactgaataccagatagtcacagaccctggggacgtcccagcttttttgaaatggctgtccttagccagcttgcttgtttatgttgctgctttttcaattggtctaggaccaatgccctggctggtgctcagcgagatctttcctggtgggatcagaggacgagccatggctttaacttctagcatgaactggggcatcaatctcctcatctcgctgacatttttgactgtaactgatcttattggcctgccatgggtgtgctttatatatacaatcatgagtctagcatccctgctttttgttgttatgtttatacctgagacaaagggatgctctttggaacaaatatcaatggagctagcaaaagtgaactatgtgaaaaacaacatttgttttatgagtcatcaccaagaagaattagtgccaaaacagcctcaaaaaagaaaaccccaggagcagctcttggagtgtaacaagctgtgtggtaggggccaatccaggcagctttctccagagacctaatggcctcaacaccttctgaacgtggatagtgccagaacacttaggagggtgtctttggaccaatgcatagttgcgactcctgtgctctcttttcagtgtcatggaactggttttgaagagacactctgaaatgataaagacagcctttaatccccctcctccccagaaggaacctcaaaaggtagatgaggtacaaggtcctaagtgatctctttttctgagcaggatatcaggttaaaaaaaaaaagttactggctggtttaatactttctaccttcttcacagagcagcctttgaatagactatgtcctagtgaagacatcaacctccgccttaagctatgtatgtatggaggccagtcgcagctttattatgcagacacacaagtggtctggacatgagggtacagtttctgcctaccaagacactacttgcactggatcttacgcaaaaaagaaccagaacacacagtgtggacaactgcccatatattctatctagattaggagagggtcctggctaggattttagtggtaattcctagttacattcaacaagtataaagattatagagcttattttatgaactataaactataatttaatgcaaaatatccttttatgaatttcatgttaatattgtgaaatattaaaataattccacaatagttgagaaaaatgagcatttttttccatttttaaaaaatgcatagaaaagacaattttaaaatcctgggaccatatttatttagaagtagctgttagtaaaacattagaaaaggagtcaggccattaggttatttatccaaatctctaagcaattaggttgaagttattaagtcaagcctagaaaagctgcctccttgtaaggctttcatgacaatgtatagtaatccacagtgtccaattcttcacactcctcaggaatatcactacctcaggttacggtacacaggctataattgatgatgatgttcagataactgaagacacaataaatgacattcagacatcaggacaattccctcatgttcttttctatgatggccacctgtaccagcaacgtgggtttcacccacacaacgatgaactgttctcttacttctccagttgattttaaagacttgttaagaggtcttactaataaaatttgggtatgatagaaaatccacaatcaaatcttgaaccaaataacatattaaattactaatatttaagtgatggaagacacacaaaaaacttaaaagcacgaacaacctaacttgaaaaagaattttaaaatatgattaacctgaagaaaagagaatcctaagagccaaagctcctttttatttagcttggaattttcctattggttcctaacaaactgtcccaatgtcatataaggaaacatgatctattacattcctttataacaatgtggagagactataaacctatgtaagtagtaaaactatatcagagactcaggagactgactaaaaggcctggatctgcagtgtattatctgtataaaaattggcagggggaagctaaaaggaaaggagattggagatctcaattctatcatggtgtatttcatacgcaaatcagagcatgcattgttttttgtttttggaaagagaagggaagtgtgttctgccccatgtttccttccgtgtttatagttcaaactctatatatacttcaggtattttttgtttagcccttcattataaatgggcaggaaattgtttatcaacctagccagtttattactagtgaccttgacttcagtatcttgagcattcttttatatttttcttttattatcctgagtctgtaactaaacaattttgtcttcaaatttttatccaatatccattgcaccacaccaaatcaagcttcttgattttcaaaaataaaaagggggaaatacttacaacttgtacatatatattcacagtttttatttataaaaaaaatttacagtacttatggagagccagcagaagacatcagagcactcacttcttcccatctttgttaaggttagcgaattacccatggacactgttaggtgaggctcattcggcagccctgaaaacaaacctggtcacactgtctttaccctctcccttcagataaagcacttcgattatctattgatctgcccagttttcaagtcatgcgaatactaaaaaggttacatcatctggatctgtaccttggctatataagcatgttttccccctattctatgtttctttttttggtgaacattgaaaaacaggaggtgacttattactgttaattaaaactaaatgaaaaatgtcaagtctttaaaacagtgagcttgtaactctttcatgtaattttattctctatgaatttggctatcctactgaatcttaaaataaaggaaataaacactttttttttaaaaaaaaggaaaaatacaagtctaaaaatctcaatgaaatatttcacaagaaggaaaaatgtaagttagcctttgctttccactttggaataagcaggaggttagggaaggcattgagaagaaaaaagataaaaataatatgtgttgttcagtgcagtgcctaagctaggttttcaagattttataatacagtaaggaaaatgtactatatatggagattaggatgttgcaatttttccacaaaggtttaaaaacattttggaaatacaagtttttgtggaacattgtgttggaatattgtccccattaagtttctcctgagaagctaattggactctccactcagctttatttctaggtataatcactgttggttacactaaactcctaaacctaaatgacagggcacaactacagcttgatcctgtattaccacatcagggctcctgggtgagccagagacactgtttcataaatgcatatttattataactttaagagtagcaatctcatatactgaatagtcactctttaactccattaaataagatacagcaaggggaaggacagtatcacacaaaatggctttcaaattcaagtggggctatttgataattacactgtggcacagaggcagcttatgggcacttcttgttaaaacatctccatgttaccaacttctgacaagactcttagtataggcttgggcatcaacccaagattaaagtcaagaacctcaatcacttctctacaactacaggtgttgagtctttccagaaaaacaaaggtccaaatgaggcaccattcatcacagcttctttctcatttccatctagtgggtaagaggtttctcttcttaaaactacaatttcttaacctttacaagttatttaacattttctatcatattaaattagcaacataaaacattatcctttatctataaacttctagtctggttccctagagtttatatacacgtttttatttctaatctgcaagaaaaaaaattcctatttgttatttggtaacagagcattaaaagatactatacacatgtggtgcatatatatatatatatatacacacacacacacacacacacacaaaatacacttcaaaaagaagccaacacactttagccaaagtctt

SEQ ID NO: 1026 - DNA, 3641 bp, Homo sapiens
gggttaaggcacctgggccaccgcccctgccggcccctcctcccgcggccgggaagaggaaagtcgcggcgggggcgcggcccggtctccgtccccacccgcccgccgtcccgccggcccgagccgtggcgcccagagctgcgagccgctcgcccctccgccgctccggcccgggccgccatgtcgctgtggaagaaaaccgtctaccggagtctgtgcctggccctggccctgctcgtggccgtgacggtgttccaacgcagtctcacccctggtcagtttctgcaggagcctccgccacccaccctggagccacagaaggcccagaagccaaatggacagctggtgaaccccaacaacttctggaagaacccgaaagatgtggctgcgcccacgcccatggcctctcaggggccccaggcctgggacgtgaccaccactaactgctcagccaatatcaacttgacccaccagccctggttccaggtcctggagccgcagttccggcagtttctcttctaccgccactgccgctacttccccatgctgctgaaccacccggagaagtgcaggggcgatgtctacctgctggtggttgtcaagtcggtcatcacgcagcacgaccgccgcgaggccatccgccagacctggggccgcgagcggcagtccgcgggtgggggccgaggcgccgtgcgcaccctcttcctgctgggcacggcctccaagcaggaggagcgcacgcactaccagcagctgctggcctacgaagaccgcctctacggcgacatcctgcagtggggctttctcgacaccttcttcaacctgaccctcaaggagatccacttcctcaagtggctggacatctactgcccccacgtccccttcattttcaaaggcgacgatgacgtcttcgtcaaccccaccaacctgctagaatttctggctgaccggcagccacaggaaaacctgttcgtgggcgatgtcctgcagcacgctcggcccattcgcaggaaagacaacaaatactacatcccgggggccctgtacggcaaggccagctatccgccgtatgcaggcggcggtggcttcctcatggccggcagcctggcccggcgcctgcaccatgcctgcgacaccctggagctctacccgatcgacgacgtctttctgggcatgtgcctggaggtgctgggcgtgcagcccacggcccacgagggcttcaagactttcggcatctcccggaaccgcaacagccgcatgaacaaggagccgtgctttttccgcgccatgctcgtggtgcacaagctgctgccccctgagctgctcgccatgtgggggctggtgcacagcaatctcacctgctcccgcaagctccaggtgctctgaccccagccgggctactaggacaggccagggcacttgctcctgagcccccatggtattggggctggagccacagtgcccaggcctagcctttggtccccaaggggaggtggagggttgaggcctacgtgccactgggtgtggtggggtgcaggtagccagaaagggacctccctgtgtggataattctaggaaactgaggcccaggaacggttggagctgcccagtctggaggccctctctgaggagcgaggcgccaggccctggcagccctcctgacctgggtccgttgctggccccctcagatgtggtgggaggtcctggtgacctctggaggaacgctgtgctcaggtacctgggctaggcctggcctgatgggtctgtggccgcccctcgtcttcacagggaagagtcttctgtgaaatgcctcagtctccccagaggccgggcggccctggcaggagaaactcaaccctgtgcgggctcacaggcaccccccagtccacaccctggtctcctgggagagagggcccagccggctctccgcagccccaggcctgcctggagacgggccgcctctgccacagggcctccactcctggctgtgtcctgtaaggtctggaagggcgaccgctctgactacctcagcgcccctcagaatctccctggggctgcagccctaccccaccccgacacagggcagaagagcagcgctcctggccccccgaagtcccagagctgctgacccccaccccaggcaagtctctcccgcagcccccacacccccaggcctggctccctggctggaaagcagccggtttggccctggaagtggacattcctctattactgtgaagttttatttatgaagaatttggagggagaaggctccaggcttcaggagggggtggtgtcctccctggccctcctcccttccctcccctcattccagctgcctgccctcagcacccccaggcccctcacagcccagccccctccagagccctgccccaccgcaccctgcttctccagggcctagcagaccagcatctgccccggtgaagggatggatcagctgtgggggtgggtgcagaaggttgccacctcctacctcagcgggagtcacctaggaaagatggagggattgacactattttctcaataaaatgggacttttttttttttttttttttttttttggtgtgaaacttcctgttcccagctgcatcagagagcctgtctggggccaaggttgccagagatttctgaagacacagcttgttccttgttcttggctggtgggtgcacaaggacttctggaagggatttagacggggctgagtgctaggattaaagtggggatgggagtacggcaacagaaaaacctgggagctagcaatgcacccagcccttgactgtgccctggtggacagccgagctgtggctctagcgtgagccagtgccttcctgtccctgccaagggtgaggccagagttggccccgaggctaatgtttcagtgggtgagattaggtcggccgtacagaggccggtgggctccctgacatcccttccaggcaacctgaaagcactgaaatagcttatggccctgtgccagggaccttggcccaagctgctgacctccagggtggggagggagctacccccaggagaagagtcactcagacagcagtatgagcaagccagccagcagctccgtgcctgcacccagctcaggggaatcccagggggttcagatgcccaggaaggaaaaggggacagcgctactgctatggaatgagaccaccacttctcctgttgtccttcccagcttctccccaacctccccttttccctagtttataagacaggagaaaagggagaaagcaaaaagctggaaagaaacagaagtaagataaatagctagacgaccttggcgccaccacctggccctggtggttaaaatgataataatattaacccctgaccaaaacgactggtgttatctgtaaatcccagacattgtgtgagaaagcaccgtaaaactttttgtcctattagctgatgtgtgtagcccccagtcacgttcctcacgcttacttgatctattatgaccctttcacgtggaccccttagagttgtaagctcttaaaagggctaggaatttctttttcggggagctcggctcttaagacgcgagtctgccgacgctcccggccgaataaaaacctcttccttctttaaaaaaaaaaaaaaaaaa

SEQ ID NO: 1027 - DNA, 3309 bp, Homo sapiens
cgccgagtctgggcgcggggacgcggggcggcgcgaagcggggccctctgccgccccgcgctcccatgtacgccttttactcgttgctcatctacatcttctacagcctcttccgcagggatggtggcgccgcggcggccgcggagcccggggaccccgcccagagagcccgcaagccccggggtcgccggcgcccagacctgcccgcgccagagctgtggaccgagctgaccggcctggccgccagctccgagcctgaggatgggtcggaaggcgcagccgagggtcgcgcggccgcggtgtccctggaagaggccctactgcgcctcgccgagttcctctccgtccagctgggggcggaagagagctgcgggggcccggcggacctgggccagtctggcgaggtcccctcactgttgacagtgaccagtcagctcttggcccttctggcatggcttcgaagccccagggggaggcaggccctgctccaggggactcagccagcccctcgggtccggcccccctctccagatggatccacatcccaagaagaaagcccttcccacttcaccgcagtcccaggcgagccactgggggatgagacccagggacagcagcccctccagttggaggaggatcagagggcgtggcagcggctggagcagctcatcctgggacagctggaggagctgaagcagcagctggaacagcaggaggaggagttgggtcgactgcgcctgggcgtgggggcgacggactcagagaaaagggttcagcatctgactctggagaacgaggccctgaagcagagcctgagtctcatgcgggacctcctgctgcactggggccccgggccccccatcagggctccgcaggaggaggcggaggcattgctagagctccagggccggcttcaggaggcccaagacaccacagaagccctccgagcccagctgggggtgcaggaggtgcagctgcagggccttcaaggggccctccagcagctccagcaggagacggagcagaactgcaggcgtgagctacagcagatgcatgggcagctggcaggacttcgggcacggatggccagcctgcgtcagggctgcggggacctccgaggtttggtcagcacctttacccagagctgtcagggttcgctgagtgaggcccggggccaggtgtcctgggccttgggggcactgtcatctggagggcctggcactcagctccctgaggggcagcaagggcccccagccggatgcccagggcggctgccagaactcaagggaaatatccgtgtgctgtgtcggctgaggccagggacatcttctagccttgtgagtgtggagcctggcccagggggcaccgtcaccacctgctaccgggggcgccatcgtcgattccgcctagactgggtcttccctccagacgccagccaggaggaggtcttcagagagctggaacctgcggtgctgtcctgcctccgaggctacagcgtctgcatcttcacctatggccagacaggcaccgggaagacctacagcatggagggccctcctgaggaccccggcatagttcctagggcgctgcagtcgctgttccgggagatgggggccggccggcagcaccgggtgacactcagcatggtggagatctacaatgaggctgtcagggacctccttgctccagggcctcccgagcgcctggccgtgaggcagggcccagaaggccagggcgggatccaggtggctggcctcacccactgggacgtgcccaacctggagacattgcaccagatgctgaaactggggaggagcaaccgggccaccgccgccaccgccatgaaccagcgcagctcccgctcgcatgccctggtcacgctgacgctgcgcgcggcgtctccaccgcgcgctccaggcaccgcaggcacgctgcacctggtggacctggcgggatccgaacgcgcacggaaggcaggggcggccggcccgccgcggggagacccagacggcgcccggcgcctgcgggaggcccagaccataaaccgctcgctgctggcgctaggaggcgtgatggccgcactgcgggcccaccggccgcacgtgcccttccgcgactcgcagctcacgcgactgctgcagccggcgctgggcccaggcaccaccgcggtgctgctgctgcaggtgggcgccggggcggggcaggtgtgtgcgtgccggtcgccgcccacccgggcccgcccacccgcgcctcttgcccgcagatctccacgcggccggaggatctcggggagacagtctgctccctcaagttcgccgaccgagtgggtcaagtggagctggggccagcccggcgccgcagggtcccgcgctcctccgggacgccttcttccctcagcaccgacactccgctcaccgggaccccctgcacccctacgccgtcccctggcagtcctccatgccccagtcccgacaacggctcgggctcggctctcgcgcccgcagagggcctgcccctctagtcctgggtcgcggccctgcccatggggtctcaggccaggtctctgctggcagaggcggtagtaaagtccctgtaccccgtctcccagggcacaagctccctagcctctttggatccattgcccctgagctcccagagtcacccctccacctccgcagccagtgaagtgtgttgtgcctgctgaagtgatcaccccccgcccccagccctgcatcaggccacaggtcttggctttctccttatcaccatttgctgttatcacggcacacagcagggaatcccaggcccccccgccaagtggttacccaagtcaccactcctgacccaaaaatcaggcatggcattaaaacgttgcaaattcctttactgttatcccccccaccaccaggaccatgtagggtgcagtctttactccctaacccgtttcccgaaaaaggtgctacctcctttccagacagatgagagagggcaggacttcaggctggatccaccactgggctctccctcccccagcctggagcacgggaggggaggtgacggctggtgactgatggatgggtagtgggctgagaagaggggactaggaagggctattccaggctcagccctgctcctgcagctttgccgctgagtgtaggaaaaacaggcatgacagaccagggtgagggttgtgcccagctgggccacggccatgcgtggggtggcccaataaacaccgtggactcccaaaaaaaaaaaaaaaaaaaaaaaaaaaaaaaaaaaaaaaaaaaaaaaaaaaaaaaaaaaaaa

SEQ ID NO: 1028 - DNA, 3900 bp, Homo sapiens
actagtggcgttcgcgccgcggacccagagagaggcgttccgcggaggagaagaggaagaggaagttgggggagggtcctagcggggagtgaaccggaagtgtaaaggttcctgcctctcctcggccaggcggaacctctctgctgggcccggtggccgcaaaagaactttctttctcccgcccgaacggtcgccgcggccaactgcctcgcccgcctggcagcctaaccctccttctcttcttctcctctccggcttcgcgcggccctgcctccctctcgcccggcggcatccgcttgctgctgccaccgcctcctcatcttctgcccggccaaccggcctgccccgctgcagtgatgtgcgacaaggagttcatgtgggccctgaaaaacggagacttggatgaggtgaaagactatgtggccaagggagaagatgtcaaccggacactagaaggtggaaggaaacctcttcattatgcagcagattgtgggcagcttgaaatcctggaatttctgctgctgaaaggagcagatattaatgctccagataaacatcatattactcctcttctgtctgctgtctatgagggtcatgtttcctgtgtgaaattgcttctgtcaaagggtgctgataagactgtgaaaggcccagatggactgaccgcctttgaagccactgacaaccaggcaatcaaagctcttctccagtgatggatggatggactgataactccggaagaatgactctcctgtggcctcacactgctgcctgtctgtctgtcactctctatctgccagcttcttcagctaaatactttaagaggggtgaggggagagagaaattcataacaaatccgactaccagaaaaaaaaaattgttttggaggaggggcaaaaggaaccatgatcaggcttttactgggattcctgatcaagtaagcctcttccctttctaataaaatatacaccttatacccaagggagagcaaagacaaaatacaccagtaacatttgaccttttcagctccctagctaatttattagattgtgttgaaggtctgattctacaaaggccaactctacatatttggtagccctaactgtctgagcagtagtggctgctgtgatgtaaacttagggtgctgagataagcaattagctctagccttctgccttaagaatgcactctactggggatttcctggcatagttaagagcgctgcctataaggttggtgaccaaatctttcctcggtgactttaagctttatgtgaaagcttagttaaggtgaggaggggcacactcctaaattgctggatgactgaactttggattttctctcccctttcacatggatttcatgtctctttagataaaactgactagttttatttataaaatcttaagttttggaagtctaaaggagaaaccattccagtatgcatatttttttctcctctagattcatacatttatatagcattgaaacactttcaaactcctgctggtagtaaaaggggatttaaaaatagaatcatagccataagcctgttagtatcatatgaagagagaacagttatcttagtacctatggattttctttatttgctgtttgaatggattgaccttggttatgtgttgagaattaaggaacattctttgaaatgcctctctcagacccatcttggaggctgattacttactgcaccaaagctatcactggggtgagatttactgtttggacaaatttagccccatcccttcaaaaatacacttgtaaccaggtttcccagagttgttgataggcttctgctgaacatatgccaacccacctgcataatatatttttgttgcttttataaatcatgcattacataaagtgtgacaacttcaaaatgtattctctgttcttggaatacagtgccctaaaatggtgttcttatgacctgcagaaaatatttacacatatttccaaatatttatttcatgagcagtacagctaattaaaatatataagcttaaattttatatcttacatttaaaatattaagattcctttgacttgccatccatataagcttgctaaaaatattaagaccaagtcatgcaataattgaatgtacctcaaatttttaggggagggtgggttagggactgatactcagattgtggataataattgaattggtttttaaaggcaacatagcattctacagcagggttaatctattatcaagaacagtcaccctggttaataacaagttttactgatcagttgctggttggttggttggttggcatgtgggtgtgtgggtgtataggtgtgtgtgggtgtgtgtgtgtatttttccccatgagtcctttttttaatcctgtggctttttcacttacaactagcctaaccctgtaattttcctacatccaagaaaacaatcacaaagtagtggtttaaatactttgttgtatttggctaattttgctgtcttaatgcagcctattaagagttgggttaaaaatcagtaatcagtactttattacatcactgaactaaaatatggagacatcctcattgaaaatggagggcactctatcagtctataactatcaacgtagtgcaacagggtgttttgatacctttgttttcacctcttgacataatgctatttaaaggcttgaatttttccctttatataattttcacctttactttcaaagtgttttgttgtagttggctattgcagagagtgcattgtcctatcattcctaaacctggtctgctttctacattcatggtatggaaaccatgtgattctttgtacagtttatcctgatgttgcttgtaatgcagtagaggctatttcgccttcgcttttctttctcgacctttttgtaaaccctataattatgaagcgattgcttgagaaaataacatataaacatagaatagaatagactgaccaagatggttcacagtttctttttttaactaggttatttataatgtatttctgaaccacttggcagacaaattcacaacacttaatgttcatattttgagtaaaggaagctaaaaccatgtttgctttctggtactacatgcattagcgaaaggttaagtaagttttgttctccactgaagtaatacttaacatctcagaaaaaattttgcatgttctgtagttttgtattaaatcagtcatttcatatgcactatatcaagtacaaacaggtagtttacctgtttatagtagtgtactaacaaagtctcccttgcagcttcagactgttatctataggcttatcgttcaaatacagcacttgaatatcccaagtagttcttctacgcatagctcacctttctaaacccagttaagcatggaagagaggtagtaggtaggtgcagtgtgtggaagctgcaaacaagtaggccttttattcattgatatcttttcccaagtactggattttaaatctgtatgtatctgtttgatttttttttctaatatttcagttgagctgctgttttcttccatgcaatattgtatactcaattgtgtatagaagaagctggtgagagtgccctcctacataaataagcaattgcagtgttttgcatgcaaaatataaaaaatttaaattgtcctgattctattttgtaaatggagaaacaatcatatctttctaagcggtaatggaggaagactagtgctttgtgcattttgatatatttgagttcattttttccacaatgtcatacttttgacgcagttgggtttctcataagtatcctagttcatgtacatccgaatgctaaataatactgtgttttaagttttgtgttgcaagaacaaatggaataaacttgaattgtgctacagctaaaaaaaaaaaaaaaaaa

SEQ ID NO: 1029 - DNA, 5298 bp, Homo sapiens
attcggaagaggcggagtcttcttccgaggaccattcggaagaaggcggagcctacctctcatcaggaccagtctgactgcacctgcatccttagctcagcgcatccccggagcatcttaagagctgagcgcagctgacaactaggggccggaccgtcgcaggaggcgtccgctggataccttcccccttccctgacctagagctctacagctgctgcctcggtactgaccgagggttcccagagctgtctcaccattgcaaaaacgttatagcaacagcctctgattacgacatggctgagatcaccaatatccgacctagctttgatgtgtcaccggtggtggccggcctcatcggggcctctgtgctggtggtgtgtgtctcggtgaccgtctttgtctggtcatgctgccaccagcaggcagagaagaagcagaagaacccaccatacaagtttattcacatgctcaaaggcatcagcatatacccagagaccctcagcaacaagaagaaaatcatcaaagtgcggagagacaaagatggtcctgggagggaaggtggacgtaggaacctgttggtggacgcagcagaggctggcctgctaagccgagacaaagatcccagggggcctagctctggatcttgtatagaccaattacccatcaaaatggactatggggaagaactaaggagccctattacaagcctgacccctggggagagcaaaaccacctctccatcatctccagaggaggatgtcatgctaggatccctcaccttctcagtggactataacttcccgaaaaaagccctggtggtgacaatccaggaggcccatgggctgccagtgatggatgaccagacccagggatctgacccctacatcaaaatgaccatccttcctgacaaacggcatcgggtgaagaccagagtgctgcggaagaccctggaccctgtgtttgacgagaccttcaccttctatggcatcccctacagccagctgcaggacctggtgctgcacttccttgtcctcagctttgaccgcttctctcgggatgatgtcattggcgaggtcatggtgccactggcaggggtggaccccagcacaggcaaggtacaactgaccagggacatcatcaaaaggaatatccagaagtgcatcagcagaggggagctccaggtgtctctgtcatatcagcctgtggcacagagaatgacagtggtggtcctcaaagccagacacttgccgaagatggatatcaccggtctctcaggtaatccttatgtcaaggtgaacgtctactacggcagaaagcgcattgccaagaagaaaacccatgtgaagaagtgcactttgaaccccatcttcaatgaatctttcatctacgacatccccactgacctcctgcctgatatcagcatcgagttcctcgttatcgacttcgatcgcaccaccaagaatgaggtggtggggaggctgatcctgggggcacacagtgtcacagccagtggtgctgaacactggagagaggtctgcgagagcccccgcaagcctgtggccaagtggcacagtctgagcgagtactaatcctgttcttctctcctctaatccccgggggccaagctggggagggatgtggaggggaaaaagatgacagagaagtggactccaaacctcattttagttgtagaagaaaatttcttacaaaacaaattccacaaagaacaccctatatgaccacagctgcagatcagttcttagcaatgatgtttttttttctgctttgcaaggcgctagaatcttttattttactttattttttttgaggtggagtttcgctcttgttgcccgggctggagtgcaatggtgagatctcaactcactgcaacctctgccctccaggttcaagtgattctcctccctcagcctcccaagtagctgggattacaggcacccacgagcatgcccggctaattttttgtattttcagtagagatgggtttcaccatgttggccaggctggtctcgaattccagacctcaggtgatccacccgcctcggcctcccaaagtgctgggattacaggtgcgagccaccgtgcccggcctctggttttgttttgttttttttttttaatgggggacaaaagagagggaaagacccctataaatctatatataacaatgtaaccatatacttgcatgtctaatacaaactgaagaaattagcctaactgccaatatcaagttgcagattttaatccatggaaattgtgttttgtgctgaattgtatttgctgattacctgaaattggcttctttttattgggcttctctggagaatttctcccactccccacctctgcagaagaaaattttgctcttataaaacctcatgttttcatcattcccatcttttctttttattgcctcttatatctctgctctttgacctcaaggtctagaggtctgcagtaagccaagaaacaaaggtggggtggatgaggcaaggtttgcaggagaaagaggaattgagaaatggggtatttttgctatcagctcttctgctatgaagtagtaaaaggcagtctataattaactgacagacctaactgaagcacagagaatacatcagacttatgcatccaagacatcagaacttggattttatcaaacttgatgacttctctaaaaggagctttggaaacttcaaattcagctataggatagtaccaatgaacacatccagctgatcccaaaagctgttttcaggtataaggacaaggagaggagacaagtgacgacagccattcccctttgcagctatctactgtagtgacagccatttcttggttgatgggttggaagtcatcagaggtttgaagaattacactggcctttgtttttctggaaatgccgaccatggagatgctttagagtcttctcaaatagcttagatgttgtaatgaggttagctttgcttcataaaacaggggccctcagaagttctccttaaatttttcaataaaaatttagctcttaaaaaaataacagtgtgactgagtgaatgaagataagttggattctttcagagcattcttttcctcaaaacgagctgcataattcttggaatttatgtcttaccacatggtggagggatggaggaactacaggatgcaattcttcttctaccaatgggcaatagaggttgagagagattcagcatctttctgggattagaattcaagtctctttactcctacagcagctgtgtctccaacgttgagactttgcagatggcacagactccatggataataggtaaacttggggccgggcgcagtggctcacgcctgtaatcccagtattttgggaggccgaggtggaaagatcgcttgagcccaggagttcaagaccagcctgggctacatgacgaaactccatctctatcaaaaatacaaaaaattaactaggtgtggtgctgcacgcctgtggtcccagctattcaggaggctgaggtgggaggatcatttgagcccagaggtagaggctgcagtgagccatgatcatgccactgcactctgggctgggtaacagagtgagatcctgtctcaaaaattaattaattaattaattaaaataaactaggtaaacttggataggcagtagatatttttgcccacctgaggaggaactcagtcaagctgttgcttaacagcttgatccagggcgtgaaaggttagttgagactgaagtgttcacttccatagaagaacatcacttttaaccttgctttggcgaagggagtcggaaagctgagtctctatggacgggggggtgatcttgctttcagtgttccctcagcttttgtggatttaaaaccattctgctccccctaaaccttttgtttgatttcagcccatgttcttgacaatgcagagcaattctgagcagtcacaaagcctactctctgttcttgtccctgccaacccccaccccccataatctgactcacaacttcaccatcagttggggtcataccactagtctctgtcctataccccatgaaatgtaaatactgtatcataagtagaagaaaataatttttgttttctaaaaatgcattttgagatagtttaatgtaaatctgacaggagcattctgaagccccattaggaaaaaatttaaatggttcctcttcatcgccttaatgtctaaagatcagaaatcgctgagcaaacccgcttttgtttccttcccagaaacaatgcaaaacaacaggtggagatagtctggtctttgccctgctgtgtgtgcctctgtagctcctcctgacaaacgtctgggaaaacagcctcaccccactctcctctctcttccccatttccttgtagctttattccttgcatctttgggtctactgagcagtgggtgctgaggtgacaggggaggaaccagttgttctgtagcctaggaactgcctcagtgtctttgccagaaaaaggcaaagaggcggacagtgcagggctcctccctcctacctcaggcctgatccatcgtgcccttgactttgccgtctcaaagtttcttagctgactttggctttcacatttgttctttccagagctaactgataagagtggaggaggaatgccttctcctaagagtcagttgaaagaaagacaagagagtcacatcttagcttttgcacaaggcattcgtggtcaggaataggttagggaatggtcacttctgattttccaacagttgctccttctctgaagagatcttgattcctttgggaagacaagaatttttcttaataacaaaggtccctttatgagttattccttctttcagttcatctcactggagcacagccaagatggacatgtttatggacagtgctctagatgtgaaaacagatagaactggtttgtgggacaggggcagcttgctcaggagagggaataacgcaggtcccttttcttggaaggcttgtactatggccatgacagtgacattgccctcaccatgatccctctccaaagtggttgtctttctttaccttgtgtcttctcttgtaaaaatgaaactcaaaaataaaataaatgtgtcaaattttgaaaaaaaaagaaaactgaaaaagctaacatgaattgtgtgaaattgcataatgctgtaatgctaatctacaatatgtaatgctatcttgtatgttgaatttgttaatgcaccacacaagtgcaaaataaagactgattcacattacataggcaaaaaaaaaaaaaaaaaaa

SEQ ID NO: 1030 - DNA, 3552 bp, Homo sapiens
gtgctgcggctcccgggccatctttgtgcggggccgcgcttccgccagcgccgcagcggggaatctgcagtaggtctgccggcgatggagtggtgggctagctcgccgcttcggctctggctgctgttgttcctcctgccctcagcgcagggccgccagaaggagtcaggttcaaaatggaaagtatttattgaccaaattaacaggtctttggagaattacgaaccatgttcaagtcaaaactgcagctgctaccatggtgtcatagaagaggatctaactcctttccgaggaggcatctccaggaagatgatggcagaggtagtcagacggaagctagggacccactatcagatcactaagaacagactgtaccgggaaaatgactgcatgttcccctcaaggtgtagtggtgttgagcactttattttggaagtgatcgggcgtctccctgacatggagatggtgatcaatgtacgagattatcctcaggttcctaaatggatggagcctgccatcccagtcttctccttcagtaagacatcagagtaccatgatatcatgtatcctgcttggacattttgggaagggggacctgctgtttggccaatttatcctacaggtcttggacggtgggacctcttcagagaagatctggtaaggtcagcagcacagtggccatggaaaaagaaaaactctacagcatatttccgaggatcaaggacaagtccagaacgagatcctctcattcttctgtctcggaaaaacccaaaacttgttgatgcagaatacaccaaaaaccaggcctggaaatctatgaaagataccttaggaaagccagctgctaaggatgtccatcttgtggatcactgcaaatacaagtatctgtttaattttcgaggcgtagctgcaagtttccggtttaaacacctcttcctgtgtggctcacttgttttccatgttggtgatgagtggctagaattcttctatccacagctgaagccatgggttcactatatcccagtcaaaacagatctctccaatgtccaagagctgttacaatttgtaaaagcaaatgatgatgtagctcaagagattgctgaaaggggaagccagtttattaggaaccatttgcagatggatgacatcacctgttactgggagaacctcttgagtgaatactctaaattcctgtcttataatgtaacgagaaggaaaggttatgatcaaattattcccaaaatgttgaaaactgaactatagtagtcatcataggaccatagtcctctttgtggcaacagatctcagatatcctacggtgagaagcttaccataagcttggcacctataccttgaatatctgctatcaagccaaatacctggttttccttatcatgctgcacccagagcaactcttgagaaagatttaaaatgtgtctaatacactgatatgaagcagttcaactttttggatgaataaggaccagaaatcgtgagatgtggattttgaacccaactctacctttcattttcttaagaccaatcacagcttgtgcctcagatcatccacctgtgtgagtccatcactgtgaaattgactgtgtccatgtgatgatgccctttgtcccattatttggagcagaaaattcgtcatttggaagtagtacaactcattgctggaattgtgaaattattcaaggcgtgatctctgtcactttattttaatgtaggaaaccctatggggtttatgaaaaatacttggggatcattctctgaatggtctaaggaagcggtagccatgccatgcaatgatgtaggagttctcttttgtaaaaccataaactgtgttactcaggaggtttctataatgccacatagaaagaggccaattgcatgagtaattattgcaattggatttcaggttccctttttgtgccttcatgccctacttcttaatgcctctctaaagccaaaaaaaaaaaaaaagacaaagcctcttaataaatttaatggaactatacatagaacagcagctcttcctcaccctttgcatacctttaatatttttccttcttaaattggccacagcaggggtcattcacactctcactgtcttgcaggaatcacaagaagtcttcatatgtgaacgtgccattcagttggtagttaagagcattcaacttcaaatatatagaagatatttgttttagtgcaaatccatgatggagtgcctcccttttccttttttcactttttgaaaaagatgttttgggtagtagtttaatatctcagggtgctctttctaacatagtaaaaaatgaagaaaaatgtttagattaaaactctgtagtctgatgacttagaaccatccttgacccttaggcccaacctttccacagagaaatcacctctcttcctttgtcttttaagaactatttggtattaactagtttcagaattagtaaatgtgagattcagtcacataattatcagacattccatttgtcagaaatgtatttggctttttaaactcctttccacaaaagtttaagtctaatgaccttcttagagaagttgagcatgcctggcaagatcatttcatggaataagcagatgtttaaagttggatttttttttttttttttttttgagtactagcaatgcacagggaccgtgttcttaggttcttagtctgtgaatctagcaataggcagtccagatttctgagtcgtactatggttttgccttgtcactgtgaggccctactaggtgtaagcattctctctgaattttaatttcctctcattaaaataggaacaaaatttgctatcctttagattaggagctgaagattcatttccctgggaatgtttcccatttagcttcaagtttcagctcaaacatcaccttctttctgactcctttcattcattcctccaggcagtaaggggctaccatagtactttgtttatgcctgtattatatgacatcactgtagttgcttgactgtttctcctactgttctgtaaacttattaatgggtgagaatctaattttactcatcttgatggcttcatgatccagcacagtgcctcacacaaagaactattgggtgggtggatggatggatggaggaatggagacagttggcttaaccagatcctatatacagattattactggctccaaaggatgagtagataagaccataagaattggatcaatgtaaatcctcacctgccctttgaagagccaataagggcatctttgtctttaaatacagcaaatgttattcagattttgtacttgtctatctgtttacctcagtgtagatgatatgaggatggtataactatgtaaattgtttttgaaaataatttgtttccccacaacttttgaaggttttatttgttgttgttattactagttcagtcccaaacttaccctttccttttcagagagctaatggccatgcttttcttcaaggaaagaataatttatttgaatgaagtgggatacttgcataacacaaaaaaaaaaaaaaaaaaaaaa

SEQ ID NO: 1031 - DNA, 4105 bp, Homo sapiens
ggaagcatagcgttcctgtccggaagtcctgagagggaaacgcccgcaaaggctggtttttaagcgggagcatctcttcactcgcagcaagtgcgcgtgcgctgcctctcagcccaaattggaaacatggccgtacggtcgctgtgggcgggccggctgcgggtgcagcgcctactggcctggagtgccgcgtgggagagcaagggatggccgcttccattcagcactgccacccagagaactgctggtgaggactgccgttctgaggaccctcctgatgagcttgggccccctcttgctgaacgagccttaagggtaaaagctgttaaactggagaaagaagtccaagatttaacagtgagataccagagagctatagctgattgtgaaaacataaggaggcgaacccagagatgtgtggaagacgccaagatatttggaatccagagtttctgtaaggacttggtggaggtggctgacattttggagaagactacagagtgcatttctgaagaatcggagcctgaggaccaaaagctcactctggagaaggtcttccgagggttgttgcttttagaagcaaagctgaaaagtgtgtttgccaagcatggcctggagaaactgacacccattggtgacaaatatgacccccatgagcatgaactcatctgtcatgtgccagctggtgttggggtgcagcctggcaccgtggcattagtaagacaagatggctacaaacttcatggccgcaccattaggcttgcccgagtggaagtggcagtggagtctcagagaagactgtgaagaggccatcaggaactggatgttctcccagagcgcagtcacctatgtttcttttatttattaaactaggtttgtattgtacatgaggtacttcatgtgatatgttttggatttagtcatattggctttatttctaagatattctattgatttaatgtgacctgtttggtctcatcagaagtcttaccattgggcatttgaacagtgtgacaggtgttccaatggcctttatcaaaacatgtttaggaaaattggtactgtgataaatttgaatccaaaatccttttaactatgggttttcaactacatgtttcttcctagcggtctctataacaggaattgtgtagtatcttgtattttgtggaaaaaggagatggtagggattggttcaacatttgggtacttagaggataaagcttcgtggtcgtataaatttagatcatttggattgatttttatacacatagattttcaggactttaccttttgttttgtttttttccttttagccatcttttgttcttgtaatcccaactagataggctttatgctcacatcattgtcccatacccacccctttctcatccccatttgcaggggctaaaggtctagatgagacttggaaggcaaggagcatcgaaatttgagatacccaggaccctttcaagcaagaatggccaaaaagccttgtgctgtctttgctcttcaaattattttcagcctccttgtcatataatcatttcaggcaaactgaggcaacactaacagctaatgacccagatggctctatttgggtaatttacctacaacttattccaccagcctttactcctctgcccttttgtcaattttaccttataatcctttattaaatgatgggaggtggtgatcaggacaaaagtgttaggttcccatgatttctcatttcatttattaatagttaatgctgaatttttttttaagtttcctctggctctatttatgttactttttgcgataagaacacttaacataagtattctctcctcttggcaattttttttttttttcctgtgttgcccaggctgacctccaactcctgggcccaagcaatcctgcctcagcctgccaagtagctaggactacaggcgttcaccactgcgcccgcaaagtttttttgttgtttttttttttaagttggtactcacaaatcactacctctgttatattgacaagctctatttcctattctttgtatctgttaagtcacatctgtgtaaacattgagctcaccttttatatattaacctctagaattaatgggcctatgtggttttttttcagtcttatagctggtgttctgtaaaagatttgtccaataaacgacttaatgaatgatacatcagtcagattttaggaaggcagtcaattatggatattttaatgttggaagaggccttaatgatcaaatctcaccctttctgcttctgaagtatgaaaatctagtctttttaggactggacacaaggaaaataatctctaaactattgactaaattccagtgagagtatgaatgaagaacaactagatattaatgtcaatcatttaagattaatgggcatgcaattaagtctccatttaagattaatgggcatgcaatgaagtctccagcagacaatcagatgttgttggatgtctagattatataggtttaggttgaagttataaaataaaataaaattcattttccactggaactctatgacattcagtggagtggtggaaagttaacctcttatacattatagataattctaagacagcacacaaacttatcaataaagccatctccttgtgggccttaccatcttcatcagatttagacccttaaaaaacaagtaaatatgcacttttaaaatgcaatcaaaagactggtggttaagcttgtaaaaccagaacatcttttggcattccactaagtatatattgtaaatttaatgaacaatcaaggttcacaataggaagttgtctttttttgccttccattctgtgagatttgacagatggtgacaataagaaaatgagctgattgtaattactctctgtgtgtttttttattgctagctatcattaccagttagaattaacattaattacaattaacaataattttaggtatggaatgttatgattacctaaagagatgtctctacctaatgagctcaagtgatcctcccacctcagcctaccaagtagccaggaccacaggcaagtgcaccaccatgactggctagttttgttttttggtttttggtttttggtttttggttttttttttttggttggttggttgttttttacaggcggggtctcactatattgtccaggctagaagaattttctaatggtctattacacctcccgttttggcaagtaaattcagaataattttaggttcttttgttattcagtagttttgcagacttaaaagtgtaaatttagaattagaagatgaagctatagtagtaagaatctcaagctgaagggctttggggagccaaagcagcatattagagcataggcttgaacttaaatctcagctcagtcacctgcaggactttaggcaccagtgatttcacccttctgagcctgtttctttattcgtaaaatgattataataattctttcacagcgttgtgaggattaagtgaaatgtgttaaatgcctactacagtaggtgctcagatatttatttttatttttttattatgcacattgtttttcctgcctttttatggctgtctaaagtctagggaaaagggaagactggttaatgatgagtagaaaaaacttgtaagctaatcattcactgacttattttccttccattttctggtttttaaaattagccacaccacaggaaacccacatttttagatggaaagagcaagaaaattgtgtcagtgctcttagttattttcatcttaatggtatagtgaaaagacattgacttgagatgatactaaggaagctttggctcactctcacttgaagaggggatcttggtgttgtagtacttggactgtacaaatgttttactgacttttcttactgctgtaaaggaatcaggcagttgggtattgatatgttatttggtgctctcattcatggcaaaggatttgataaataaaagttctttaaacactaaagcaaaatcaaatgagcaaaactaaggatgaaatgtaatattcatcagaacaaggatcactgagaaaaaatattcagaaacaactttaataaaacctgaattgaaataactgca

SEQ ID NO: 1032 - DNA, 5276 bp, Homo sapiens
acaaagggcccgcgcgcagccgccgccgccgccgccgcgcgaggagccaggatggtcctggtccacgtcggctatctcgtgcttccagtgtttggctctgtgcgaaacagaggtgccccctttcaaaggtctcagcatcctcacgctacctcctgccgccacttccacctgggccccccgcagccgcagcagctcgctcccgacttcccgctggcccaccccgtgcagtcgcagccaggcctcagcgcccacatggccccggcccaccagcacagcggcgccctgcaccagtcgctgaccccgctgcccaccctgcagttccaggacgtcacaggtccctccttcctacctcaggccctgcaccagcaatacctcctgcagcagcagctcctggaagcccagcaccgcaggctggtctcgcaccccaggcggagtcaggagcgtgtatctgtccacccccaccgcctccatcccagcttcgacttcggccaactgcagacacctcagcccaggtatttggctgagggcactgactgggatctcagtgtggatgctggcttgagtcctgctcagttccaggtgcggcccatccctcagcactatcagcattacctagccactcctcgaatgcaccactttcccagaaactcctcctccacacagatggtcgtccatgaaatccgaaactacccttaccctcagcttcacttccttgctctccagggactaaatcccagcagacacacctccgccgtacgggagagctatgaggagctgctgcagctcgaggacaggttgggtaatgtgactcggggagctgtacagaacaccattgagaggttcaccttcccccacaagtataagaagcgaagaccccaggatggcaagggcaagaaggatgagggggaggagtcagacacagatgagaaatgcacaatttgtctgtctatgctggaagatggagaagatgtgagacgcctaccctgtatgcatctctttcaccaactgtgcgtggaccagtggctcgccatgagcaagaaatgccccatctgccgagtggacattgagacacaactgggagccgacagctgagggaggaattagccagtggacaccccatttccttcaccaggtccccccacggccatagcccttgcagccaaactttgccttctgagccatttgacgtagaggaaaagcctgcaagcacattttgtggaaagaggagttggtggtatcggtgtcgagggagaggagggggttggggaggacccacctctccagaatggcgactgtccccatccgcctggctgagcaggagagagggagctggcggtgcccagcgcaagggcgggaaggaggggcccaggctgcggagaacccaggtgggatcctgaaggcactagctgacagacgggcccctcaatcctgtcctctgaaggattgtatatatacctctcgaccacgtaggaaccatgtaggggtctctagctatttctgtggatggcagccggagcatgttagcttaagaaaaatgttgtgtgtggtgctctagtcatcttgtggtggacatgtcgctattaccgaattcgcaccaaatatttctcattgagtttcttgttttggtgcctgaccgaaccaacgacagccccaatcttcccgtctttatgagagaaaaggaaaaaggaatcaaaggtggaagaaaaaaaaagccaaattctgtttacggtgaaaaaggattttgtttttcacccaatttgggaggcgggaggggggggttctcgttttatttttgtttttgtttttaccttggcttttgtttttctcatgtttacagtgcacggagtgtggaagggggtctaggagagggagagctggaaaaggagctgatggggtcttatcctggcctctgagggttcagcggaggtgaggaaggcagcagagctccagcaggtgaagggagagttcatctaggcggggctccccaggcccagggctcaacttcatggccccagctatatccccccagttccacactaaaccagggagggctcggccctcagctactggtacccaatgtgttcctgggagccgagagacccatggtcactccaactccttcctttaggctgtgctcttgcctgtcacaaagaggcaacgtagccactgcctccctatgcaaaaaattaaccagatgatgcagataagacagcataggtgatggctgcttggtcttggccacagtgctctcagccagcactaagggctgaggtcaataccgcagaccttggggaggaagctgagcatcccccgggatgtctccagtcctgacacagtccctcagagatggccctggctctgaggtcacatcagctaggtttgggaggcccctcagcttggtttgggagtgcccgtgttcctggtctctggctgcttctctgactctttgataaccttgggcaagtccctttctttctctgtgcctcagtttccttctcctttgaggggggagagagaacagtgcagccccatttccggtcctgctacctcacctagatgttgtgaggattcatattctctgtccagcgtgttctatgctctcttctgagaaccttgtggggtgtcgggatgggggtgctgggagacacagacctgatacagtatgtctttctgcaccacctcacaattttcctgaaccccaaagggagcagagagataagaggacagaagaatggagatgggaaaatccaccaaattccaacccaaacccaactttctttctccctatgtggaagacaccagattagctggaattctgccaccttcctttgtgccccaccccccactgttccctcatttgcactgctctgtaagcctccccctcacctccattcataacccagtctcaatgccctcgtatcaataagaccggggtaagggggacaggatacttgtcacatatttgaagaaattccatacagtgaaggaaatttgagtctgtattgctgctacaagggtaaaaccaggaccaatgggtaaaagtaacaggcgggcagattttggcttgaggaagagcttctagcacgactggttcatgcgggaatagctgctctggccacctgcaggcagaaagtgggggaagtggctcctggcaggagatttctcccagcactaatatcctggtgttctataaaatctttattgagtgcctaccggtgcaggcgctgggagagacaatagctttgaggagctcacaatctagctgaggagacaagacacatccaatgctgcaaaaatggtgaataacctgattcagggttagcagcaatgagtatcacagcgtccaactcagtagctccagtgtatgaaaatgtctccagggctaaaggctggagatctcaccagtggggaaagtacatctgagtcaggattttgggggaaagctagttactgatagccacaggaagttgagacttctgccccattctctccaatggctgggtgaaaaccaagaattcatcggaagatggctttggcctggaggtagctagggtggtctaggaagctcactcctctcttagtctcagtctttcattctttctgctgagactggcctgaaaggctggcaagtgggagggagtcagtggggaggccaggatagaactagagctggtgtcccaggttccagtctgggctcttcactgacaaagtgggcaacactagaaacttccctttgtctctctgggccttagtttcctcagttacaacctaaggaggttggattggatgcttgctaatttccttctgacactcacactccctaacatcaacacatcttcaaggcggcagagctgtgcgcccacccagctattgaaaaggactttctgtgggcacacactctgtttcagactgggctgggggcacacgtgctgggtgagacagtgggccctcgtcccctcccccctcccaattctctgccccaggctaatattagggactggggaggggaccaccagaggggagagggaagctgcttactttgggggtagaccctgaagcccctcctccttcccccacagatggggacaggaggtgatggggtgctcagaaccctgcagctcccacttctttagccgggcagctgtttgggggacaagagagggccagggtctgtgcttctgctcccggcactggtcagggagtctgggaagagtggagaagaggcagggtcaggcctcagcatctcacatccaccacctccaggaggggagaccactggtaagtcctcctcctgctcaactcaagggactcagaccctttcttgactgagacgcatgagtgccttctggggtgagagcagccccagggtttaagttgggcgtcctagcagctgcagcagctgtgccgccgcgggtccaccgaggacgccaatcaatcaacccaacaccacaagcttggttgggtgcaagcagagggtgagcaggggctgcccctccacctggccaggacccccttcggcacccagttgcccttggccaccacctgtggcaggactcaagctcctcttctgcaaatgttcccagcctccgtgcaagtattcttaactctttacgcctaatgaacaagcacagtttttcaatggtgaagaaaaaagcaccagactttttttctttttttcctaaagaaatcccctaagccccccgcctgtaggcgggacaaacactccctgcgtggggctgtagcaacgtctgtcaggcccccttgtgtttcatctcctgcgcgcgtagagcaaatgctagagcgatttcagctgatagaaaaacaaaaatgaaaaaaaaaacacaaaaaacaaaaaacatggcacgttgctagtttacagggttttgtgagtttaaatgccttatatttaacaatcataatttatgactaacttgtagatatcgtgggttcttatttaattatttttatagttgttttgcatttttaattataatttatttatttagaaaggatactaattttttttattactcctattacctcattttggcgttgtttctgggagtggaatgctttgcatgcattggtacgatgacaaacaactacgaatacaaaaaaaaaatttaaataaaattctgcaaactttatttcgtccgaactatcagggtgtgtgattgcaagctgtcctaccgtggtgctggcctctttggatacattccatacgaaatgcaaacctttgattctgtatgctgtgatctagtgaaaaactccaatat

SEQ ID NO: 1033 - DNA, 3158 bp, Homo sapiens
gccggagccccagcccggccctgctcgggccgccgggcgcggggctgcggccgcgtcccggaggcgccgccagcacagccaggtgctgttgggaacacagaggaagtgactggctgggggttcagggaaagctccgtagaagagggaacacttgagctgggtcttgaaggatgagtagaagttcaccaagtgggaaaggacactctaggatggccgagcctcgatttaacaacccctacttctggccccctcctcccaccatgcccagccagctggacaacctggttctgattaacaagatcaaggagcagctgatggccgagaagatcaggccgcctcacctgccgcccacgtcggcctcgtcgcagcagccgttgctagtgccgccggcacccgccgagagcagccaggccgtcatgtcgctgcccaagctgcagcaggtgccggggctgcatccacaggcggtgccgcagcccgacgtggcgctgcacgcacggccggccaccagcaccgtcacaggtctggggctgtccacccggaccccgtctgtgagcacttctgagtcaagcgcgggcgcgggcacgggcacgggtaccagcaccccgtccacacccaccaccaccagccagagccgcctcatcgcctcgtcccccaccctcatctcagggatcaccagcccccctctcctggactccatcaagacaatccagggccacggcctgcttggcccccccaagtccgaacgcggccgcaaaaagatcaaggcggagaacccggggggtccgcctgtccttgtagtcccctatcccatcctggcctcgggcgagactgccaaggagggcaagacgtacaggtgtaaggtatgcccactgacctttttcaccaagtcagagatgcagatccactccaagtcgcacacagaggccaagccccacaagtgcccgcactgctccaagtcctttgccaacgcctcctacctggcccagcacctgcgcatccacctgggcgtcaagccctaccactgctcctactgtgataagtccttccggcagctctcccacctccagcagcacaccagaatccacacaggcgacagaccctacaagtgcccacatcctggctgcgagaaggctttcactcagctctccaacctccagtctcaccagcgccagcacaacaaggacaagccctacaagtgtcccaactgctaccgggcctattcggactccgcttctttgcagatccacctctcggcccacgccatcaagcacgccaaggcctactgctgcagcatgtgtgggcgggcctacacctcggagacctacctgatgaagcacatgtccaaacacacggtggtggagcacctggtgagccatcactcgccccagaggacggagtcccccggcatcccggtgcgaatctctctcatctgagcccactggaggcgccgccccacccggcccactggcagacacagacccaggcagcaccaggccccagctccctccgggggccctccaggaaccaccaagctctctcacgaccttcccaatcttccagaaagcttggtccgcagaagccctgcctggtccagtccgggggcggccaggccaactgcaagattctggactgttttggtggcatccaaagacgatctcagagcactttgaacctctctgttgagttttctttttgttccccacccttcacttgcttcactgtttttttttttttcgttttttttttttaagtttgttttggaaataacagaaaagatatttattggccaggaagttggtgctgctaagaccgagaaatttaaagaatcggacagatggacgcagagaaccagagggcaatgtgggaccttctcttgccatggcctcaggtcttgagggaaggctcgggcctaggtttctggactgcaaaggggacccccaggtgggaggggcaggaagcagccggagtgagcccttcgcccctgagtgcctggctcgcacctctcgagctgtgccctgggcatcactgagcagaggggtgcggcagcttcaggaggcagaaacgagaggggtgggagatccacaggaccaaagggtgcagtgatgggctgggtggcgggcccagggaaatggggtggggatgggctgggtaagacctggccctcccctgctgccctgaagaccaccccagtctacctcggtgctggccaggaaacctttcggctacctctcccaccatcccagactgtgggcagggggatggggagggagtgggcctggatctgggacctccctccagaatttcctccagatgggggcagtgcccagggaggggttatttgtcttccctgccatggagtgggaatccccagccgaggccctaggcccctcagcagggaagggatccccggggaggcaggtcccaggagcagaccctgcccccagcccccacagacacaccccaatctgaaagccatgcgtgtcggtgtatataggaaccatgtacagagcccagagaagccccctacatccccccgggaaaaaaaagaaaactagacagaaactcatctatatattctgtatctggagttccgttttgaatattaactgtgttatttttatacactttttaagccttaactcgccattgatttaccagtttaacgtttcctggggtttctttgcccatggggttctctgcccccacccccggccctttgtttgacttgcgtcgtctgatactcagtattgtagctttttgtccgcatgttactccctgtaaatacgctgttatacatactgttaacacccctttgctttttctatgggacctccaggccaccatatttagaactagttaccttattaaaaaagaaaaaacagtctgttggcttctcagtctgcatcttggaggcagggaggtgagggcaggtgcccctcagacacttcaggaaggtagtttgcattctatttaaaaaagggagtggggagcaaatgaaaatcaaatgtggggggaaaacactaaagggggcaagaaacaaaggaattacaaaccctctgctctttgtatttctctgttgtgaagaataaactgtacctgcacccggaaaaaaaaaaaaaaaaaaaaaaaaaaaaaaaaaaaaaaaaaaaaaaaaaaaa

SEQ ID NO: 1034 - DNA, 2833 bp, Homo sapiens
ctgggaccgaatgcgcgcgcgcggtgctcgaggcggaggggaggaggcggggaaggcgaaaggaggggttcggaggagagggttcgatctccgtacgcaccaggtggagagcgcgcgcctggggaaggaggcgtgtcgagtagcgggagggaagttgtagtacgggtggggagaaccacactaaagggagatgggggtgagcagttaaggaaccgcgagagcgccaggtagagaggtgcccttaatgggggaacctggagaagagtgtgagcgtagtggggaagaagggagaagacaaataggttcgggaatgtgtctccgagggcgcgagcgggcgctaggacccggcgtcgaaaagatgaggctttggggctgtcggggcgcgcgctcccgttggtgacgcgggggtggcggaggtctccggccgggacgaagccccgcagggagtggatactcgacagccttcggcctccgctcgcttctccctgcgcgctttcctgctcccctttccggctacagccctggggtcgagctctggtcgaagcgcattccgcctctcctttggccctgcggcttcctttgcaacccgccgcccacccttgctctccgtggtttacccctgggctctgaggcctggtggtagcggccactgccgcggattggctgttgcggacccggggcggggcaggtgggagaggctcgttctccgcgggtttcgttgtgtttcgcgccatgtcgtttgctgagagcgggtggcggtcggctctgcggcgccgcggtcccggcaccccgggccctgtggctcggccatcgtattcctcctttactcagggggacagctggggtgaaggcgaagtcgacgaggaggagggatgcgaccaagtggcccgcgacctgcgggcggagttctcggctggggcgtggtcagagcccagaaagcgctcggtgctcccgccggacgggaacgggtcgcccgttctgcccgataagcgcaatggtatctttcccgcggccgcgggcagcagagcccagcctcggcggtggccggtccaggtcctctctattctctgctcgctgctcttcgccattcttctcgccttcctcctcgccatcgcctacttgatcgttaaagagttgcatgctgagaatttgaaaaatgaagatgatgtagacactggactattaggattctggactctacttataatatccctaactgctggattctcctgttgcagcttttcttggacagtgacttactttgattcttttgaaccaggaatgtttcctcctactcctctttcacctgccaggttcaagaaactgactggacattctttccacatgggctatagcatggcgattttgaatggcatcgtagctgctcttactgtagcatggtgcctcatgtaaacccacactggagcgatattgttggcaaaacttaatcatgattgttttgtaataacaagaaggagcatcactgtctactcagaagactgagaaacctgctgttcattatgtagttcagatatttatcacaatcatcctcattatggaagaccttttaaagcattgttttagaatgtctgagtattaagatacagattaattgggaatatctgagtattaagtactttcttcagagtataagatgtttacctcatctttttacttttgtgtgtgtagttctttcaagttgtaggaaacattttaatggaatttaaactcaaaaacttgaatacaggacaatgcttgccttttcatgtatgtactacattttttgctaagaaatactgatatttctgtttagttgagctagaaatacttcttatttatacatttaggaaagcaaataatgcctactactccgacttttatagaagctacttttaaatcagaatatttaatttttgatattcatataattaatagaagttgcatttatattttttatggggcatagttccttatgtgtttttttaatgtattttcatactacatactgaatttgtatgtttttaaaattgttacatctagacaactgtaaacattatttttttagctagtgcaaacctagtacctgccatttttactaatttttgtctttaaaaaaagcaaaaaagcacattgacctaagttgaaaattaagtaagtttatttttaacaaaaaatgcctgaaaaaagctaaattatttaagtcattaagatattgagaaaaaatttgaaatttttactatttctgtttccacaattccaaatatttatcttggtgtatatattgttactttaacagaacttgcattattttgtttttaataaatataaacatgaaatttttgtatgtgagaatgattgaactagtttgttcttaatctcaaaaatttagttaccaaagtagaaaaggtattttgatactagatattaaaaactacatatagttaatataattttataatttttgtaattaaatgtgctcctgtaattgtgatattttgttttctaagtaattaagccttaatttttcccctatgttactaaagacttttaatgtttagaaagttacctcagttttagaaagatggactacttacaaagctgttttccctggccataggaaaacttacaataagaaaccattaagtagtcaaactgcttattcaggctaagtgggaaatgaatttgtgcagtgtgttcccttaattatctactgaatgttgttaccgactaaacaaggtttctaaaagtctcgcatttcttttactattcaaaactctttggttggaaatgactaatactgctccaatttaaattatctgaaatgtgaaaaaaa

SEQ ID NO: 1035 - DNA, 4411 bp, Homo sapiens
agccaaagctataaacttcaaccggccacaagagtgtgcatgtgaggtgactgcattttttttccctgccaaaccagaattagccggtataggaatgaacgagcatgaagatttgaaattgctccgattggaaggaagcccaggttaggtttgggcacctccaaacgcacccgttttaaagccacctggactgaggcgtcgagctttcagctccaccaaacgctcacctggcctggcagcgagcggcggaagagcccgggagcccctcacagagcgcaccgagccgggcggagagctgagccgcaggcacccgcgtctccaggatgataggcgacattgcaacaaatctctacacccagcagctcagggggctccaagcagagcagcaagttcgaggatccgggcgtggagccgagtgaggccgcagcccagcgggcctcgggcgaaaaatcttggaaaatgtataccagtcatgaagatattgggtatgattttgaagatggccccaaagacaaaaagacactgaagccccacccaaacattgatggcggatgggcttggatgatggtgctctcctctttctttgtgcacatcctcatcatgggctcccagatggccctgggtgtcctcaacgtggaatggctggaagaattccaccagagccgcggcctgaccgcctgggtcagctccctcagcatgggcatcaccttgatagtgggccctttcatcggcttgttcattaacacctgtgggtgccgccagactgcgatcattggagggctcgtcaactccctgggctgggtgttgagtgcctatgctgcaaacgtgcattatctcttcattacttttggagtcgcagctggcctgggcagcgggatggcctacctgccagcggtggtcatggtgggcaggtatttccagaagagacgcgccctcgcccagggcctcagcaccacggggaccggattcggtacgttcctaatgactgtgctgctgaagtacctgtgcgcagagtacggctggaggaatgccatgttgatccaaggtgccgtttccctaaacctgtgtgtttgtggggcgctcatgaggcccctctctcctggtaaaaacccaaacgacccaggagagaaagatgtgcgtggcctgccagcgcactccacagaatctgtgaagtcaactggacagcagggaagaacagaagagaaggatggtgggctcgggaacgaggagaccctctgcgacctgcaagcccaggagtgccccgatcaggccgggcacaggaagaacatgtgtgccctccggattctgaagactgtcagctggctcaccatgagagtcaggaagggcttcgaggactggtattcgggctactttgggacagcctctctatttacaaatcgaatgtttgtagcctttattttctgggctttgtttgcatacagcagctttgtcatccccttcattcacctcccagaaatcgtcaatttgtataacttatcggagcaaaacgacgttttccctctgacgtcaattatagcaatagttcacatctttggaaaagtgatcctgggcgtcatagccgacttgccttgcattagtgtttggaatgtcttcctgttggccaacttcacccttgtcctcagtatttttattctgccgttgatgcacacgtacgctggcctggcggtcatctgtgcgctgatagggttttccagtggttatttctccctaatgcccgtagtgactgaagacttggttggcattgaacacctggccaatgcctacggcatcatcatctgtgctaatggcatctctgcattgctgggaccaccttttgcagggtggatctatgacatcacgcaaaaatatgatttttccttctacatatgtggtttgctttacatgataggaatactctttttacttattcagccgtgcattcgaattatagaacaatccagaagaaaatacatggatggtgcacatgtttagtatcatgtaatgttccgtgtaggtttcattgtaatactcatgcctacctcgcatggttgctgtgaggcacctatgacaggacgtgggaaagcattttgtacggtaactggcactgtcatttgtaaatgccattgtcacagcctcatttgtaagcagcactgcctctctgtttggggagatgtaatgctggaagatcttaaggactacatacattctagagatgacagtgttgttcaaagacagcctagtaagtaattggtagaaatgcccttataaaaaccattctcttgtcatctactgggactagggttttaaatacagcttttaaaaacaaaaacagggaataaaagcttttcaactcaaccacttctttgtaagacaaaactgaagtatctgtgtgcttccagaaagcttacagataaatgggtttcaagcacaagaatatgactagatttcagaaattaattattacagggagctattgatctactagcatcaaacaaaggcaagctctaattccacaggtaatacaatttagtgcaattaaagaaacacggcttgtatttttatgagggaattctgcagctagggattgtgactcctaaatcctcctctaaaagaaggcacttgccattaatcctaattcagtgctatccagttataaatggaatcttgagacaaaaccttaacaaagaaataacagtaatgatttccttagcagaagccgtatttgtacgcacaacattaaatcaagggctacaattcaagcacttttattcgtatcattggcctcttagatgatataagcatgaggtggggcctgtaatatttttttctgagtttcttctgcccaaaaatataatatagaactaattgctaactgacaaataaagttaatagttaaatcatctccaaggaatgttgctaatccaaagtataacactatcaatttgtgaggataataaatggaatgccattagtgtagatgtctgtgccacatctgacactggagtagtgataacaaatagcccatctctagactctcgtgttgttatatagaccattcatttgcctgagcgtggcacagttttaaaaatagttctcttgattgatttcatacagaagatgactgtgatccatgacatctaataatgccctttctttatctgagatgtctatttttctaagccaaacgtttttcagactgcagaatgttcttcccagatcatttgaaatttctggctgccttacttgtttacagatagtttaagactatttaaatttctactcacaatttgatcatcacacacacacaaatccttgaatatcattgccagtgtcttaggtcaaatttacctaaagtgaatacagcccattctcaattatccttcacaattagacgcaggaatgctactaggaattggaatcaaacaatgccaccccaagcgtaattttagccagcagtttcagttatactcaaccatgcccttctgagctgttaacaagtgattcaatggacaagttctctttttgttccatctccattatttcctgctctaatgtatagtgggagtggttgtgtaatgaaaggaccaccaaaataataaaaggcagctaatggaaaggagagacaaaagcatggttaatatatatacttaatattacctccaatgactcgggaattgcctgtaaattattatagacaatagattgcatgtcatactccatttggttcaacacaacaacctatgtgttatcattacagctttggctgctgttaaagaatccagctctctattttgataaagataatcttaaagctgaggcaatgctccctcctctatctctctctgtgtaatttaccatagaattaggatgattagattgaaacacatgttgtatgttttaaaaactacattgcttcattactttcattttccgacaacatcaaactaacaagaggcagtgttaaatattttaaatggtgctatagccaatgtatttgaatgcttgcactgctggttgtgtatcatcaatatgaactttttatccaatgactcaactctaattacatctaagttagacttgctcacgttcagtttgtacagttgtgtgttgacttactatgttttgaaagtggtgacttctaccgaatgagtggaagttcccattgtcaaaaaaaataaagacctgcttgcagtattcatgttgacaacagagtaaaagagaatactgtaaagaattactgcaaatatttcctgtttatgttatttgccgttgtttgaagatattataaagggttaattgtatatttatatcatgtgctttatcgttttcccctcatgtatccaagtaatttttatttacatacaactaaataaatgttgtcctctttgaagacggtcaaaaaaaaaaaaaa

SEQ ID NO: 1036 - DNA, 3969 bp, Homo sapiens
ctgtcgctccggttcctctgcctcctctggctgctgcctccgcagctccctcctcctaccccacctcctccatctggggagcgtctgcgggggcctgaggggcggcggcggcggcggcggctgcgatatggagccaggggccggcggccgaaatactgctcgtgcgcagagggccgggtccccgaacactccgccgccccgggagcaggagcggaaactggagcaggagaagctctccggtgtggtgaagagcgtccaccggcggctccgcaagaagtaccgagaagtgggagattttgataagatctggcgagaacactgtgaggatgaagaaactctttgtgaatatgccgttgcaatgaaaaatttggcagataatcattgggcaaaaacttgtgagggcgaaggtcgtattgaatggtgttgtagtgtatgcagagaatatttccaaaatggtgggaagagaaaagcacttgagaaagatgaaaaaagagctgtacttgccactaagaccactccagccttaaatatgcatgagtcttctcaacttgaaggtcatttaaccaacctcagctttacaaaccctgaatttataactgagttgctacaagcctcaggaaaaatcagattacttgatgttggcagctgctttaacccatttctgaagtttgaagaatttctaactgttggcatagatattgtacctgctgtagagagtgtctataaatgtgatttcctgaacttacagcttcagcaaccactccagcttgcacaggatgctatagatgcttttttgaagcagctgaaaaaccctattgattctcttcctggagagcttttccatgtggttgttttctctctccttctttcttattttccatctccttaccagcgatggatttgctgcaagaaagcccatgaactgttagtgttaaatggtttattactaatcatcacacctgattcctcccatcagaaccgtcatgctatgatgatgaaaagctggaagattgctatagagtccctgggctttaaacgcttcaagtactcaaaattttcacatatgcatctgatggcatttaggaaaatctctctaaaaaccacaagtgacttggttagtaggaactacccaggaatgttatatattcctcaagatttcaacagtatagaagatgaggaatattctaacccttcctgctatgttcgatcagatatagaagatgaacaactagcatatggtttcacagaactccctgatgcgccatatgactcagattctggagaaagtcaagccagctctattcctttctatgagctagaagaccccatattacttttaagttaatatagaagcaaaaagcccctttcagtccaggctcctaaactaattgcttacaccaattggaaatactaacatgaactcagtactgaaaacctggtttgcataaaagaaatgcagaggtttacagagtttgctatttttttctacttctcaattttaaaatttattcttatatagaaagcttaaagtttcatgcagagtgactcatgtcatagcagaaactactgttactttagcatttagcactatcatagaaaggtacctttttctctttagtgctattgtgaaaacaagcataatttgctatatgttttccttttcaacttttcagtgttgactataaaccattgaatggaaaactttaagatgtagaaagctgtagattgcactttgatgactcacaagttaaatgtgatacagaaaaatagatcggttagttgttttgtgatgcacttatctttttcttttttctaactaaaattgtgatgttacagaaagtcattttatgttccttttttgtctgatgatccaatatttactgaactttttgtaattggtgataattctttttatttcttccttatattaaaagctcatttgacagcatcagacattgggggagagatgtcccccaaagtgtgtattctaattttattagccctatccaataaacaccattgccaaagtagtattttcataactttcttgttgatttgggccttggtgtgaagtatatttacctgagagttcacttttacttttcttaaacttaggcttcatttacaaaatgttttatttaagcaaggaacaatgtaatactcaataatgacctaaaacacctttttgaaagggtttgcacttggaagagagtttatgttctgttgaaaccaactttgatagggtcctcacctttccgttaaggaggtgccgcactacaagtttcaaattatatggaaaaacctaaaattaaccctctgttggtgatctcataaaatggttttgaccttttggtatcttaatttctatctaaactttatcagaaaattttctttgaatatatcaattagttggctgtgggaattttccctttccacattaataaatgcctttctgtgtttctgaatcagaagcaaatgattagggaaaaatatatgtccaaacaagacaagattagtttaaacagttaagaacatttagtccacattgtcttgtcagccagcaattgtcatggaagctatcatttttaagagtgccactgtgtggatttttttttcaagtggttattacattaaaattacctcatactgaggtttttgcactgaaatatcacagtttcagatttcatggttaatgttgtgcgtatgtttgtatgtttttaaaggaaacttgcattttcaatagttgatcctaaatttcataaactgcacttctttactctggtaaagctgatgtttttgtgcttattgtgaattgccgtagtacctttgaatgtcaaactttatttagaaatataaaacttatcctttatgatataaatggttgagtgtatgtacccagtatttctaattaaatttcacatgctaaattaatgaaagtaacaagattgtaattttttaaagtcagttgattaaatgcaataaatattggttgctcaaatatgccacaaataactcgaaatttttcatttactttcaacagcataagattctttaatatttaggattgactgttctttccagttaagcactgaaggattatgtcttgtagcttccccaagagaaggggaaggaaaaaaaagcactatgttaaggataatacagaactcttttgaactattttggtagtaccttttaccatactgtttgctttttgatttgggtaaatatcttaagagcaaagaaaacaatacaccaaatgaaaatgctttgaaagtaaatgaaaacagcgcttttgaaaggctggtatagtatgaccctggagtcagcctttgtgttacagcgaaaatgttggtgctataaattctgattgtttacagatgttgattctgcttatgctccaaagtgtgcatgatgtattttacgtagtactctgaggaagtctctttataaaacctactaccacttagtataaatttgtttgaatttatatcatttgttactgtaaattcagcttattccaattaggttggcacagatttaaactgatacacattccacaaaaaccaattcagtgtataagtattgaagtataagcagtcattgcagcttgatgccagatcatgtatgtaataacaagtggaagttaatagggccttctaatactgtatgggtactcctaagaattatttcattttggatataaagaagttatgaggcctcctgtcacattcacagctggttctccaaaataatttggttgtttcaaaaacaaatggtaatcatttggttggattcttcagtatcatgactagatcatgtggttttaccatagttgccaagtggtgggaggtagcatacctgaaaatgtacgtgtgtgtttgttgtattttttcacattttgtgaacaaagcacatttattaaaaattttaaattttctagtaaaaaaaaaaaaaaaaaaaaaaaaaaaa

SEQ ID NO: 1037 - DNA, 4679 bp, Homo sapiens
ctgcgcggaggcaagcgcgctctgcggcgcggtccgctgtggaggcggcgcgaacggtcagggggcggccgatggctttgaggggccctgcgggcttggggcccggctctcgaaggccgttggacgaagcggtggcaggggccgagggccgcgaggcgccggcccttgtggcggcgggaggcgcgccagaggacgatgaagaggacgatggccgtggccggggcctgctgcgctgggacagcttctccgcctggctgcactgcgtgtgtgtggtgggcttcgacctggagctgggccaggccgtggaggtaatttatcctcagcattccaaacttactgacagagaaaaaaccaatatttgctatttgtcttttccagattcaaattcaggttgtcttggagatacccagttttgttttagatttcgacagtcttctgggaggagggtgtcgctgcattgtctcctggatcaatttgacaaagatttaccagtttacttaaagaaggatcctgcttatttttatggatatgtgtatttccgacaagttcgagataaaactctaaaaagaggctactttcagaagtccttggttttgatcagcaaactaccttatattcatttttttcacactgtgctcaaacagatagcaccagagtattttgaaaagaatgaaccttatttggaagcagcttgtaatgatgttgatcgatggcctgccccagtgccagggaaaacattacacctgccaatcatgggggtggtaatgaaggtacggattcccacatgtcatgacaagcctgggacaactcaaatagtgcagttaactcagcaggtggacacaaatatatctgttattttacctactgttcatgaggtggatattttcaggtgtttctgcccagttttccttcatagtcagatgctctgggagctggtgctgttgggggagccccttgtggttatggcgccatcaccatcggaatcatcagagactgtattggcacttgttaactgtatttctccattaaagtacttcagtgatttccgaccttatttcactattcatgatagtgaattcaaagaatatactacccgtacccaagctccgccctcagttatattaggagtaaccaaccctttttttgctaagacactccagcactggccacacattattcgaataggagaccttaaacctacaggtgaaattcctaagcaggttaaagtgaaaaaactgaagaatctaaagactctggattccaaacctggagtttatacttcatataagccatatttaaatagagatgaagagatcataaaacaattacagaagggtgtacaacagaaacgtccttctgaggctcaaagtgttattcttcgacgctattttttggaactgacacaaagtttcatcattccattagaaagatatgtggcaagcttgatgcctttgcagaaaagtatttccccatggaagagtccacctcaattaagacagtttcttccagaagaatttatgaaaacacttgagaaaacaggacctcagctaacctctagaataaaaggcgattggattggactttaccggcatttcctaaagtctccaaattttgatggctggtttaagacccggaggaaggaaatgacccaaaaattggaggcactccatctagaagctctttgtgaagaggacttacttctctggatccagaaacacacagaagtagaaacagtagaccttgtcttgaagctgaaaaataagctgttgcaggctgatcgagagcacttacctgtgaaacctgacactatggaaaagttacggacacacatagatgccattatcttagcattgccagaggacttgcaaggcatactgctcaaaacgggcatgacatgatatttgccaagattttccagccaaaaaggattatgcatcatgaagcatactgacatttcaaccagacgcacaaaggagatctctcagtggcagcggagtggaaaattgccatgaatgctagttacagggtagaaagactgtattgtataaacagacctttttagtgcattactttttaaagtggatatctgtggtggttccactttaatactgaaacaccgaaaggcatttctatatttttaatcatgttctaaagtgctcttatgagagacttgtgggccatcagtattagtgatttcatactgcagtgctggcattgcagatatttttttaaattggtgctgctttgcccaatcatgttaaaactcagggggatataaaaataacattcacactggctatcttcttaagaacagaaagactgaactgtcctatggttagaaggaattgatgcttatgtagtgccttctgttgtcctacatgtttcacagttcagctgctagtcttgaagcttttccttagcttcattatgatacgtaattttataaggtattctgttgagtgatcattgtttaaaaaaaaagtttcttgctacccattgtgtttattaatagacatgatgggtttttttcagttgtcatatagattttcattattttcccttccattttcaaaatttaatgttaccagtttctccaaagacaagaaggcatctagtattaatgatggaagagtttattttctcttaccctttactaatttaaacattaggctgggtgtggtggctcacgcctgtaatcctagcactttgggaggccaaggtggacaggtcacttaaggtcgagagtccaagaccagcctggccaacatggtgaaaccccgtctctagtaaaaatacaaaaattagccaggcatggtggcacgcgcctgtaatcccagctacttgggaggctgagatgtgagaatcacttgaacctgggaggcggaggttgcagtgagctgagattacacccctggactccagcttgggtgacacagtgagactgtgtctcaacaaaaataaaaaattaaataaatactaatttaaatattattaaatgtttaaactaatgaacttggctgcttttcaaagacattttaattataaatctcataatcagctatttttttaaactgaactattcttatttcaaaggcattcatgagttttttatgtgatacttatttgagtgatgataagattgatttctggcattatttgtttggtagcgttttatttttcccaacattaatgtttcttaaaacacttttcctactattgtttgacatgggaactttcgcctgagtcactgtcatggttagcttttgttgttgttgtttttgtttctgttttgtttaaacaatactaccttgccaaaaatagaagaatgtgatttggtagagtagggttgtttggtttgtgtttgaataagagtatcctacagaagccactttttttttttttgagatggagttttgctcttgttgcccaggctggagtgcaatggcgcaatctcggctgactgcaacctccacctcccgggtgcaagtgattgtcctgcctcagcctcctgagtagctgggattacaggtatgtgccaccacgcctggctaattttgtatttttagtagagatggggtttctccatgttggtcaggctggtctcaaactcccgacctcaggtgatccgcccgcctcggcctcccaaagtgctgggattacaggtgtgagccaccgcacctggccagaagccactaactaaaataggcacacatgacacagcatgtggttaatagctgtgtcttgaattatcctctaaataaccaaatttagttgtatgtatttgtaaaggatatggcttcagaagctatcttttgttctctgtcgatataactcttaagggcattcctgacccaagaaagactccttgcgtttgtaactgtggtctaatacccaaatgtgccctgttcttatggatacagtctcttgaagcatacctcaaagtcatagagagaatatggcatttgaaagaaatcgtttgccttggatcatatgagttattttgtgaaacaacagctgacttttcagaaaaggagcaactacttttatatgctaaaagtatttcataactttctgggaaaccttatttaggtataaatggtcatcttattatttttcaaaaaggtatattttaataattgtacaatttatatacagtttgtgaccagaatttgtaagttgttggtgtcatatcaaggatcttttaaattatgccactacaggatgtatcatttcaagtctattttgcacagctaaacagtagcaaaagatgccaattagcatgataatggtgtcttcatttttactgtatttaactgaaacctaacacatgttgaaaaccatatcatacctagtttatctcttaatttcaaactatgtacttgtaaaaatgatgtaaatttgcactgggaacctgggaaagagtgactgataatttttggtgcgtgatttttagatttgtctttttttttttaagaagaatttgttactatgtaaaccctgacattaaatgttttatctctaccagcatcaggaggaatcactgctttaagggtattatgtaatgcctagtgccttctatttacagtgaaaaagaggttttgtgaaggcatttatggtcattaccaaaaactaaattaaaggccttggattttaaagcaaaaaaaaaaaaaaaaaaaaaa

SEQ ID NO: 1038 - DNA, 6324 bp, Homo sapiens
gcaggcggaagggcgcggaggaggtgacgcgataggccagcgccggcgtcgcggcagccgcttcagaggaagctcggcggctgtggccgcggcgaacaggccggacgcctcgtcgctggcggggcttcccttggagctgacgaaggcggggtccgcggtccaggctgctgccgcgacggggccggcggcggggcagctgccaggaacgagggtagcagctgcatccagatctcattatgcatcagaaaaatgaaaaaacagaggaaaattctatggaggaaaggaatccacttagccttttctgagaaatggaatactgggtttggaggctttaagaagttttattttcaccaacacttgtgcattctgaaagctaagctgggaaggccagttacttggaatagacagttgagacatttccagggtagaaagaaagctcttcaaatccagaaaacgtggatcaaggatgaacccctttgtgctaagaccaagttcaatgtggctactcaaaatgttagtactttgtcctctaaagtgaaaagaaaggacgctaaacacttcatttcctcctcaaagactctcctgagactccaagcagagaagctgttgtcatcagcaaagaattctgaccatgaatactgcagagagaaaaatctcttgaaggcagttactgactttccatcaaatagtgctttaggtcaggccaatggtcacagacctaggacagacccacaaccttctgactttcccatgaagttcaatggggagagccaaagtccaggtgagagtggcacgattgtggtcaccttgaacaaccataagagaaagggcttttgttacggctgctgccaagggccggagcaccacaggaatgggggacccttgattccaaaaaagttccaacttaaccaacatagaaggataaaattatctcctcttatgatgtatgagaaattatccatgattagatttcggtacaggattctcagatcccagcacttcagaaccaaaagcaaggtttgcaagctaagaaaagcccagcgaagctgggtacagaaagtcactggggaccatcaagagacccgtagggagaacggtgagggtggcagttgcagcccatttccttccccagaacctaaagacccttcttgtcggcatcagccgtactttccagatatggacagcagtgctgtggtgaaggggacgaactctcatgtgcctgattgccacactaaaggaagctctttcttgggcaaggagcttagtttagacgaagcattccctgaccaacagaatggcagtgccacaaacgcctgggaccagtcatcctgttcttctcctaagtgggagtgtacagagctgattcatgacatccccttaccagaacatcgttctaataccatgttcatttcagaaactgaaagagaaattatgactctgggtcaggaaaatcagacaagttctgtcagtgatgacagagtaaaactgtcagtgtctggagcagatacatctgtgagtagcgtagatgggcctgtgtcccaaaaggctgttcaaaatgagaactcataccagatggaggaggatggatctctcaagcagagcattcttagttctgagttgctggaccacccttactgtaaaagtccactggaggctcccttggtgtgcagtggactcaaactagaaaatcaagtaggaggtggaaagaacagtcagaaagcctctccagtggatgatgaacagctgtcagtctgtctttctggattcctagatgaggttatgaagaagtatggcagtttggttccactcagtgaaaaagaagtccttggaagattaaaagatgtctttaatgaagacttttctaatagaaaaccatttatcaatagggaaataacaaactatcgggccagacatcaaaaatgtaacttccgtatcttctataataaacacatgctggatatggacgacctggcgactctggatggtcagaactggctgaatgaccaggtcattaatatgtatggtgagctgataatggatgcagtcccagacaaagttcacttcttcaacagcttttttcatagacagctggtaaccaaaggatataatggagtaaaaagatggactaaaaaggtggatttgtttaaaaagagtcttctgttgattcctattcacctggaagtccactggtctctcattactgtgacactctctaatcgaattatttcattttatgattcccaaggcattcattttaagttttgtgtagagaatataagaaagtatttgctgactgaagccagagaaaaaaatagacctgaatttcttcagggttggcagactgctgttacgaagtgtattccacaacagaaaaacgacagtgactgtggagtctttgtgctccagtactgcaagtgcctcgccttagagcagcctttccagttttcacaagaagacatgccccgagtgcggaagaggatttacaaggagctatgtgagtgccggctcatggactgaaactcagcagggactctgggaagtctgaccaagttggagcagatggtttgttacttgaatctccaaacacttagttgaatttttacagatatttcagatcagtggtgttgggccactattgttacctcaaatttattttttgcccttattcatttctccagctaccatgtactattgtttaatgttcagtttggtttcatttttaattttatggttctgtgcgtcccccatatttaatatttattattcaaacgcatgcatatagacagagcatgcagtgaagagtattaaaaaaaaaagcttagtagatttggtgcagcttttgaaacttagttagacgtgaactgaatacaggtttcaaatttactcccagaacctaaaaatgcaagatgtttttgatacaacataactctgagaatagtaagtgttccctggggcattaagggtagctgggggtggttttgacaaatccagtcctgttttactttaccagcggcaactttcaccaacttccctctccaagtgagtcttagagagtgcagtccattccttttgaagggtgagatggaagtggtcgtaaactgactggtgtcttctgtttctggaggcacacttgtaagcacagtggctgctttgggaggagtaaggtgtgagaaaaagcaaccttggaggccagtaacaatgacagatttcaatcgtggttttaggaattataatacgtggcatacatctcataaaggcttttgctgggatattgaattccctgaatttttctgttttcgacctgttaaaaaaatcttaacatccatcaaactagtggtcaaacaaatgagaatgcagctgttctcagagtaatttttaagttgtcatttccctgtgttgcctcccaattggaagaagttaaggtttaccaaatgcatttctatttcaagggtatctgaaacgtaaacattcaaaactgaaggctgactgacttgagatgttttgcaggtggctggagagaagagggaaggtaatagagacaacttagtcccatgggagcgcagcaaccgtgtcaggttctttctcctgtcccattagtgacctcagtaacatgcagggtacgtctggcttctgcatggccagtgctgacactagcacagctgttcttctccttctgttgaacctcatcttctgaagaaaggccaagtggcccttgtccatacacttagctgcattaggatgaatatcacgcgtctcacatctttaatccagcctttcgtgacatgttggaaagatacatgtgaaacctacccagttaccctttctgaattgggaggaaaaccaaccaatgtatgtatgagaaactcagaagtctgaatagaaaaacaaagtaaatggcagaagattctcgagtttatgcccgcgtaggtttggagtgttgaaaaagctaaaatgtttagtttcacttggccctgaggtatggttgagaaggctgactgccagcagttgaggattgagtccgaccatgtttacatgcagggttcccaacaccagtggtgacactgggaagcagccccagcactttcctctcctgagtcctccagacccaaaatccttaatgtcaaaccaggtcagtgtttcttactgtgtttcaagtcgttaaaaagactgagagtagaggcactttatgctgctataggtggggttctgtcagcgttaggaaaaaatgacagtttagggtaaggaagatctcataatgagtttttcaaacataattatgcaaacatgagatttttcaaaacatgccagaaatttgcctctgattttttttttttttttttttttttttttgtgggggtgtggtataccaaagtagccagtcactgggctgtcagttcaaaatgtcttgtacttcagagtgaggaagtgtttcagttcctcagtgacagaacctggcatgcagaagagacagaattgttcctgtaagaaaatcaacgccgagagagagctgcccaaatccagtgactcttccacttccagtctcatgcttcatagggcaccttgaggtgtgctgcccagtgtggcttagactaaatgttgagtttgggttttttgtttttttttttttttgagtcagagtctcactgtccctcaggctggagtgcaatggcgcaatcttgcctcactgcaacctccacctcccaggttcaagcgattctcctgcctcagcctcccaagtagctgggattacaggtgtgtgccaccacgccccaccgatttttgtacttttagtagagacaggatttcaccatgttggccaggctggtcttgaactcctgacctcaagtgatctgcccgcctgggcctcccaaagtgctgggattacaggcgggagccaccgtgcctggccaatgttaagtattttaaaagtcattttaaaatatttgtcattgatgaaacttggtttcagcacacgtaattgctttccctctcttcttgtgattaggtgtaaacctctatttaactcaagtcctagattagaatgtcctttgtcctgatgtttgcagtaattgcttccttggttaataaagatatttttgaaatatactctggactgttggtgaaagaggcaggcatggctttactggtactagtttggcactgaactgtttgggtgcccatgaggtaggcagaccttatgctttttttttttgagacggagtcttgctctgttgcccaggctggagtgcagtgatgtgatctcggctcactgcaacccctgcctcccaggttcaagtgattctcctgcctcagcttccccaatagctgggactacaggtgtgcgccaccactcccagctaatttttgtatttttagtagagacagggttttgccatgttggtcaggctggtctcggaactcctgacctcaggtgatccacccgcctctgcctcacaaagtgctgggattacaggcatgagctaccgtgcctggcctaaaccttacgcttttgaggttgagtgcaggccttgtgataactaagcgctacttttgacgagccttcaacaagctgcccagtcctctcctcagcagacgcatcaggttgtagttgcatctttacagtggtctttccttttattaaatctatagcagtgaatatagatttgattcaacttttagttacgttctctcaagaatcctaatcaactttcagttagcctcttaagaaagggaaaaaaaggtgctgccagtcatccccaaattatgtttttggctgtgcattctattttctacatagcactgaatctgagtaacagtcatcctggatttatagttggaacagaacagtaacagacctaactgggactcagccagcactagcctcatcttagctgccccttttctctgctttgcagtttactgcttccctgggctagccataacggggttctgggcaggtcagactcttcagcaagacagtgtattaatagtgtgaattagatacactgatgacctgctctgcctagttaagaaactgaattaatcagcagttacaaagcacatactttgttacgtgctaggctttgcctcctggcctctagataattaagacggcccagggaataccagcagagaagtgctaattgtatttgggtgttacaaaagcagacctagacgagctgttcacttaactggtacctgttggtcagaaaaagaatttatttagagattatgatcatgtaaaattacagtactcaacccttctagcaaagtatttttttgaaaaataaactaaatgcctttataaaaaaaaaaaaaaaaaaa

SEQ ID NO: 1039 - DNA, 2076 bp, Homo sapiens
agttgttacatgaaatctgcagtttcataatttccgtgggtcgggccgggcgggccaggcgctgggcacggtgatggccaccactggggccctgggcaactactacgtggactcgttcctgctgggcgccgacgccgcggatgagctgagcgttggccgctatgcgccggggaccctgggccagcctccccggcaggcggcgacgctggccgagcaccccgacttcagcccgtgcagcttccagtccaaggcgacggtgtttggcgcctcgtggaacccagtgcacgcggcgggcgccaacgctgtacccgctgcggtgtaccaccaccatcaccaccacccctacgtgcacccccaggcgcccgtggcggcggcggcgccggacggcaggtacatgcgctcctggctggagcccacgcccggtgcgctctccttcgcgggcttgccctccagccggccttatggcattaaacctgaaccgctgtcggccagaaggggtgactgtcccacgcttgacactcacactttgtccctgactgactatgcttgtggttctcctccagttgatagagaaaaacaacccagcgaaggcgccttctctgaaaacaatgctgagaatgagagcggcggagacaagccccccatcgatcccaataacccagcagccaactggcttcatgcgcgctccactcggaaaaagcggtgcccctatacaaaacaccagaccctggaactggagaaagagtttctgttcaacatgtacctcaccagggaccgcaggtacgaggtggctcgactgctcaacctcaccgagaggcaggtcaagatctggttccagaaccgcaggatgaaaatgaagaaaatcaacaaagaccgagcaaaagacgagtgatgccatttgggcttatttagaaaaaagggtaagctagagagaaaaagaaagaactgtccgtcccccttccgccttctcccttctctcacccccaccctagcctccaccatccccgcacaaagcggctctaaacctcaggccacatcttttccaaggcaaaccctgttcaggctggctcgtaggcctgccgctttgatggaggaggtattgtaagctttccattttctataagaaaaaggaaaagttgaggggggggcattagtgctgatagctgtgtgtgttagcttgtatatatatttttaaaaatctacctgttcctgacttaaaacaaaaggaaagaaactacctttttataatgcacaactgttgatggtaggctgtatagtttttagtctgtgtagttaatttaatttgcagtttgtgcggcagattgctctgccaagatacttgaacactgtgttttattgtggtaattatgttttgtgattcaaacttctgtgtactgggtgatgcacccattgtgattgtggaagatagaattcaatttgaactcaggttgtttatgaggggaaaaaaacagttgcatagagtatagctctgtagtggaatatgtcttctgtataactaggctgttaacctatgattgtaaagtagctgtaagaatttcccagtgaaataaaaaaaaattttaagtgttctcggggatgcatagattcatcattttctccaccttaaaaatgcgggcatttaagtctgtccattatctatatagtcctgtcttgtctattgtatatataatctatatgattaaagaaaatatgcataatcagacaagcttgaatattgtttttgcaccagacgaacagtgaggaaattcggagctatacatatgtgcagaaggttactacctagggtttatgcttaattttaattggaggaaatgaatgctgattgtaacggagttaattttattgataataaattatacactatgaaaccgccattgggctactgtagatttgtatccttgatgaatctggggtttccatcagactgaacttacactgtatattttgcaatagttacctcaaggcctactgaccaaattgttgtgttgagatgatatttaactttttgccaaataaaatatattgattcttttctaaaaaaaaaaaaaaaaaaaa

SEQ ID NO: 1040 - DNA, 10397 bp, Homo sapiens
cctcagcgctgggcggccgctcacctcgggccggggggcgccgcgcctcccgcggagtggccgcgcccgctcggagccgtcccgcctgtcctgcccgcccgtccgtccggcgcggcgctcggggtggcggctgctcggcatggcccggggcgcccggccctcggcggccggtggcggcggcggcggcgcggagccccctgagcgcgcgggccccgggcggccgcggggatccccgcccggccgcgcccgcccctcgctggcgccgcgccccggcccggagccctcgcgaccccgggcggcgcccgagacctccggcggggacacggcgggcgcggggcggtgcggcgggcggcgggcggcaaagttggggccgggccgccgcggctggtgggcgctgctggcgctgcagctgcacttgctccgggcgctggcgcaagatgatgttgctccatattttaaaacggagccaggcctaccacagatccacctggaagggaaccgccttgttctcacctgccttgccgaagggagctggcctttggagttcaagtggatgcgcgatgacagtgagctcaccacctacagcagcgaatataagtacattattccatctttgcagaagctcgatgctgggttttaccgctgcgtggtgcgaaacagaatgggagcactcctgcaaagaaaatcagaagttcaagtcgcatatatgggaagtttcatggatacggaccagaggaaaacagtttctcaaggacgtgcagcgattctaaacctgctgcccatcaccagctaccccagacctcaagtgacttggtttagagaagggcacaagattattccaagcaacagaatagccatcacattggagaatcagctggtgatcctcgccaccacaaccagtgatgccggggcatactacgtgcaggccgtgaatgagaaaaatggagaaaacaagacaagcccattcattcatttgagcatagcaagagatgttggcacacctgaaaccatggccccaaccattgtggttcccccgggcaacagaagtgtggtggctggatccagtgagaccaccttggaatgtatagccagtgccaggcctgtggaggacctgagtgtgacctggaagaggaatggagtgagaatcaccagtggcctccacagctttggaagacgcctcaccatcagcaacccgacgtccgcggacaccgggccatacgtctgcgaggcggcgctgccggggagcgcttttgaaccggccagggcgacggcctttcttttcatcatagagccaccatattttactgctgagcccgagagtcggatttcagctgaagtagaagaaactgtggacatcggatgtcaagccatgggggtcccccttcccaccctccagtggtacaaggatgccatctccatcagcaggctccagaatcctcgatacaaagtgctcgccagcggaggcctgcgcatccagaagctgcgtccagaggactccggaatcttccagtgcttcgccagcaatgaaggaggggagatccagacccacacctacctggatgtaaccaatatcgctccagtgttcacccagcggccagtggacaccacagttactgacgggatgacagccattctaaggtgtgaggtgtccggggctcccaaacccgccatcacctggaaaagagaaaaccacattctggccagtggctctgtccggattcctaggttcatgcttcttgaatcggggggtctacagatcgcgcccgtcttcatccaggatgccggcaactacacctgctatgcggccaacacagagggctccctgaatgcatcggccacgctcactgtgtggaatcggacgtccatcgtccaccctcctgaggaccacgtggtgattaaggggaccacggccacgctgcactgtggtgccacacatgacccccgggtttcactccgctacgtttggaagaaggacaacgtggccctgactccatcgagcacgtctaggatcgtggtggagaaggacgggtcccttctcatcagccagacgtggtcaggcgacatcggtgactacagctgcgagattgtttctgaaggagggaatgactccaggatggcccggctggaagtgattgaactgcctcattcacctcagaacctcctggtcagccctaattcttcccacagccacgccgtggtgctctcttgggtccggccctttgatggaaacagtcctattctttattacatcgtggagctctctgaaaacaactctccatggaaggtgcatctgtcaaacgttggccctgagatgacaggcgtcaccgtgagtggcctgactccggctcgtacctatcaattccgggtgtgcgcggtgaatgaagtgggcaggggccagtacagcgccgagacaagcaggttgatgctacctgaagaaccacccagtgctcccccgaaaaatatagtggccagtgggcggactaatcagtccattatggtccagtggcagccacccccagaaacagagcacaacggggtgttgcgtggatacatcctcaggtaccgcctggctggccttcccggagagtaccagcagcggaacatcaccagcccggaggtgaactactgcctggtgacagacctgatcatctggacacagtatgagatacaggtggcggcgtacaacggggccggtctgggcgtcttcagcagggcagtgaccgagtacaccttgcagggagtgcccaccgcgcccccgcagaacgtgcagacggaagccgtgaactccaccaccattcagttcctgtggaaccctccgcctcagcagtttatcaatggcatcaaccagggatacaagcttctggcatggccggcagatgcccccgaggctgtcactgtggtcactattgccccagatttccacggagtccaccatggacacataacgaacctgaagaagtttaccgcctacttcacttccgttctgtgcttcaccacccctggggacgggcctcccagcacacctcagctggtctggactcaggaagacaaaccaggagctgtgggacatctgagtttcacagagatcttggacacatctctcaaggtcagctggcaggagcccctggagaaaaatggcatcattactggctatcagatctcttgggaagtgtacggcaggaacgactctcgtctcacgcacaccctgaacagcacgacgcacgagtacaagatccaaggcctctcatctctcaccacctacaccatcgacgtggccgctgtgactgccgtgggcactggcctggtgacttcatccaccatttcttctggagtgcccccagaccttcctggtgccccatccaacctggtcatttccaacatcagccctcgctccgccacccttcagttccggccaggctatgacgggaaaacgtccatctccaggtggattgttgaggggcaggtgggagctatcggcgacgaggaggagtgggtcaccctctatgaagaggagaatgagcctgatgcccagatgctggagatcccaaacctcacaccctacactcactacagatttcgaatgaagcaagtgaacattgttgggccgagcccctacagtccgtcttcccgggtcatccagaccctgcaggccccacccgacgtggctccaaccagcgtcacggtccgtactgccagtgagaccagcctgcggcttcgctgggtgcccctgccggattctcagtacaacgggaaccccgagtccgtgggctacaggattaagtactggcgctcagacctccagtcctcagcagtggcccaagtcgtcagtgaccggctggagagagaattcaccatcgaggagctggaggagtggatggaatacgagctgcagatgcaggccttcaacgccgtcggggctgggccgtggagcgaggtggtgcggggccggacgcgggagtcagttccttcagccgcccctgagaacgtgtcagccgaggctgtcagctcgacccagattttactgacatggacatccgtgccggaacaggaccagaatgggctcatactgggctacaagatcctgttccgggccaaagacctggatcccgagcccaggagccacatcgtgcgagggaaccacacgcagtcggccctgctggcaggcctgcgcaagttcgtgctctacgagctccaggtgctggcgttcacccgcatcgggaacggggtccccagcacgcccctcatcctggagcgcaccaaagacgatgccccaggcccaccagtgaggctcgtgttccccgaagtgagactcacctccgtgcggatagtgtggcaacctccggaggagcccaacggcatcatcctggggtaccagattgcctaccgcctggccagcagcagcccccacaccttcaccaccgtggaggtcggcgccacagtgaggcagttcacagccaccgacctggccccggagtccgcatacatcttcaggctgtccgccaagacgaggcagggctggggggagccactggaggccaccgtcatcaccaccgagaagagagagcggccggcaccccccagagagctcctggtgccccaggcagaagtgaccgcacgcagcctccggctccagtgggtcccgggcagcgacggggcctcccccatccggtacttcaccatgcaggtgcgagagctgcctcggggtgagtggcagacctactcctcgtccatcagccatgaggcgacagcatgcgtcgttgacagactgaggcccttcacctcctacaagctgcgcctgaaagccaccaacgacattggggacagtgacttcagttcagagacagaggcggtgaccacgctgcaggatgttccaggagagcccccgggatctgtctcagcgacgccacacaccacgtcctctgtcctgatacagtggcagcctccgagggacgaaagcctgaatggccttcttcagggatacaggatctactacagggagctggagtatgaagccgggtcaggcactgaggccaagacgctcaaaaaccctatagctttacatgctgagctcacagcccaaagcagcttcaagacggtgaacagcagctccacatcgacgatgtgtgaactaacacatttaaagaagtaccggcgctatgaagtaataatgaccgcctataacatcatcggcgagagcccagccagcgcgcccgtggaggtctttgtcggcgaggctgccccggccatggccccgcagaacgtgcaggtgaccccactcacggccagccagctggaggtcacgtgggacccaccacccccggagagccagaatgggaacatccaaggctacaagatttactactgggaggcagacagccagaacgaaacggagaaaatgaaggtcctcttcctccccgagcccgtggtgaggctgaagaacctgaccagccataccaagtacctggtcagcatatcagccttcaacgccgccggagatggacctaagagtgacccccagcaggggcgcacccaccaggccgcccctggggcccccagctttctggcgttctcagaaataacctccaccacgctcaacgtgtcctggggcgagcctgcggcggccaacggcatcctgcagggctatcgggtggtgtacgagcccttggcccctgtacaaggggtgagcaaggtggtgaccgtggaagtgagagggaactggcagcgctggctgaaggtgcgggacctcaccaagggagtgacctatttcttccgtgtccaagcgcggaccatcacctacgggcccgagctccaagccaatatcacagccgggccagccgagggatccccgggctcgcctagagatgtcctggtcaccaagtccgcctctgaactgacgctgcagtggactgagggacactctggcgacacacctaccacgggctatgtgatcgaggcccggccctcagatgaaggcttatgggacatgtttgtgaaggacatcccgcggagcgccacatcctacaccctcagcctggataagctccggcaaggagtgacttacgagttccgggtggtggctgtgaatgaggcgggctacggggagcccagcaacccctccacggctgtgtcagctcaagtggaagccccattctacgaggagtggtggttcctcctggtgatggctctgtccagcctgatcgtcatcctgctggtggtgttcgccctcgtcctgcacgggcagaataagaagtataagaactgcagcacaggaaaggggatctccaccatggaggagtctgtgaccctggacaacggaggatttgctgccctggagctcagcagccgccacctcaatgtcaagagcaccttctccaagaagaacgggaccaggtccccaccccggcctagccccggcggcctgcactactcagacgaggacatctgcaacaagtacaacggcgccgtgctgaccgagagcgtgagcctcaaggagaagtcggcagatgcatcagaatctgaggccacggactctgactacgaggacgcgctgcccaagcactccttcgtgaaccactacatgagcgaccccacctactacaactcatggaagcgcagggcccagggccgcgcacctgcgccgcacaggtacgaggcggtggcgggctccgaggcgggcgcgcagctgcacccggtcatcaccacgcagagcgcgggcggcgtctacacccccgctggccccggcgcgcgaactccgctcaccggcttctcctccttcgtgtgagcaaagcgccgcgcctccctcagggcggaacggaggcaactttccggagtctatttttgttaagacaatcaactccaataactgagctgaagtttttgtttaaaaagaaaaaaatctgataagtgatgattttacctacttgtggacactagatttcaattaggaaggtttttttaaacggctttttgtaacttcgctgcaggaagcaggtttgtttctttttcttttctttttaagagaaggtgtatttcactggtgcaatggcttggcacctccggggcctgggaggacctcagacctccccagccctgggtttctccgtcttcaagaccaactaggaagggtcaagcggggagagggagtggagggtcaggtgagatctcagagctgccccggccggcccccgtctctttctacctcctcttccagagaaccagcggctcacacccttctcaacgcaggacatcctcggcggctcctggggtttgaagagcaaacgtttttccctgggctcagtgcgttttgtcccaacttcatctgtttctgaaatgttctcacttggcagtgtctagtcaaggagtcggctttcaggttcctgacggccaggcagggatgctaaggtgtggctcagccgtcactgtctgtgtcactgcagtggtgcggtcctcaggcttttctgcctgtctttcccccttccttctcacctgacagcgagggagagggaagcctcttagggctggaagccaccacgctggccctctccttccccgaacacagcacacggtcaactccgcgggacacgaggacacgggacggcgtctccagaattgcttgttacgtaggaagcgtgcattgttaaccagagtatttttaaaatctttttatctttttttaaactatgtcacatgaaatgaatgcgtctttgctgtctccaggtgcctttttattaattgttcagctttgtacatgggaaagatgaaaagcaacagtgtctgcaaataaagcaaaacagctctgagaacacacgctcccgactcgcctcgtgcacaccaggccgtcccctccctctgtcctggcttctgctggctgctcgcagcagccaccgcttctccaccactggcgctgctgctgccccctctcccagtccgaggccagcttttagccttaacaggttttttggaaatgtttcttttttttatttaaaattgtcattgtttggtttaaatttttcagctagatgaaaagagtatgaactactttggaaaacttaacagctcagagatggccatgcctccagcccctcacgtcatctttgcaacagacgactgggctgccatggtccacccctcagcccgggtcccgggtctggatggaacgggagcactgctggtgcccactggcgtgtgtgccccgggtccctgtaagtgccccctcaccagcagcagcgtgacacacacaagactcaagaccaccctgtcagtgccccccagtgcacggcaaacgggcaggtgccgttcccccagtgacctgagggtaggggacaactgagcagtatctgaccagtgccacccaggagccagtctcctggccacatgcagaaagtgtggcccctgcttacctagatgttttgtgcacctccatgggcagagggtgtggatattgcctggattctgtgctgtcagcgttgctgagtatggccccaggagaccaaggagagttttgtataggctggaaaaccccttttcagtctttccaaaattagagggtatggcaagtttccttttttctctcctcccttccttcccctccttcctttcctttacccctcctttccttccttcctcccttcctctcttctttcctccctccctccctccttccctcccttccttcctctctttcctccttccttccctcccttctttccctccctcccttcctctctcccctattccttcttccttttctcctcctttttctgagtggagggggaaatattctaaaccaaaaatcctagatgctctgcccaaagccacttctgcatgagaatcgcaacccacagttccccggatgagactcaccacagtggacagtgccacctccttcccctcggccccggagagggcgaagtgggcgggaagccaggatgtgagcactggaatttcttggaagagaagcgataaatggagaccatggccagcgctgctttctgtgcactctgatgactgctctctgcagccatgaggatgtggctttacatgccagggagagtgttgagacgtcttaggttgaggatgagcagattcgagatatgtttgttgctctcgggttttcgatacaacatcatgacacttctgtttcaagctcatgttttccgtctcccctccactcttagtaaaccttgatctgtacggagcggcctgtccgaggctacgccggcctcctggctgctgctggactgtgcttaggacagcgcccatgcctcggagggactctgtcccatgagaaccacctgtgcaaaggaacagagctggatgtttccaggtagattttggcctcccagagcaatgcggcatttgagaagcaacagttcctaactccttatcttcagggaaggaaaagaaaatcacagcctaggaagatggaggttggattttaatctcggttttaaaaagaggacaaacaaaatgtctctaagccaggctagatggaatgtgctcccgctctctcctgccgtgctgaaagtcatgccttgcggatgcctcatgacagcagtggctgagtctccccacccacccccaacgtggctcatttcagattgcttcggccccaccctgcaaggatgtggtcacggagtggccaggaggctccgtctgagccacagggatgggtgtgcagagctccctcctcctggggtgccagggcagagattccaggcaggtgagcccagagagagctgccaggccacaccccctcggcctcctgcacggccaccttctgggtgaatcggtccagcccaagcccctctccccagcctcgccttcagcctctctcccagcctgcttttataaggcgcacttcactcaatgctgtagccaaaaaacgaggggccccagggagaggggacccagatggccacacacggaacgcgcctccacagccccgggaggtggctcactctgtacaggtcttcggaggccgtgtttgtatctaactgtgactgggctgaagcatgatgtttgcctaatggttcgtagcatggtttttatttcttacgcattcttggcacacagtgtagctatcctcctgacgagcaacccgtctgcgtacctaagtgtggctccccgtgggtcagcgtcctggtagcatggatccagtctgaaaggtgaggacaacgtggaaactcatgagctgagcctgcccgctgggacacgtctccttcccgcgtcaccttctggtttagggagccgtcaggtccctaaacgttccctacaactttttctgaaattgtgcagaaaaacagatctcattaaaagaaaaaaagaaacaacttgtaggaagacagagaggtgctatgggtacaatttttaataaaaacattattttgttccttaaa

SEQ ID NO: 1041 - DNA, 5115 bp, Homo sapiens
ccagccatgggctcggggcgcgtacccgggctctgcctgcttgtcctgctggtccacgcccgcgccgcccagtacagcaaagccgcgcaagatgtggatgagtgtgtggaggggactgacaactgccacatcgatgctatctgccagaacaccccgaggtcatacaagtgcatctgcaagtctggctacacaggggacggcaaacactgcaaagacgtggatgagtgcgagcgagaggataatgcaggttgtgtgcatgactgtgtcaacatccctggcaattaccggtgtacctgctatgatggattccacctggcacatgacggacacaactgtctggatgtggacgagtgtgccgagggcaacggcggctgtcagcagagctgtgtcaacatgatgggcagctatgagtgccactgccgggaaggcttcttcctcagcgacaaccagcatacctgtatccagcggccagaagaaggaatgaattgcatgaacaagaaccacggctgtgcccacatttgccgggagacacccaaggggggtattgcctgtgaatgccgtcctggctttgagcttaccaagaaccaacgggactgtaaattgacatgcaactatggtaacggcggctgccagcacacgtgtgatgacacagagcagggtccccggtgcggctgccatatcaagtttgtgctccataccgacgggaagacatgcatcgagacctgtgctgtcaacaacgggggctgtgacagtaagtgccatgatgcagcgactggtgtccactgcacctgccctgtgggcttcatgctgcagccagacaggaagacgtgcaaagatatagatgagtgccgcttaaacaacgggggctgtgaccatatttgccgcaacacagtgggcagcttcgaatgcagttgcaagaaaggctataagcttctcatcaatgagaggaactgccaggatatagacgagtgttcctttgatcgaacctgtgaccacatatgtgtcaacacaccaggaagcttccagtgtctctgccatcgtggctacctgttgtatggtatcacccactgtggggatgtggatgaatgcagcatcaaccggggaggttgccgctttggctgcatcaacactcctggcagctaccagtgtacctgcccagcaggccagggtcggctgcactggaatggcaaagattgcacagagccactgaagtgtcagggcagtcctggggcctcgaaagccatgctcagctgcaaccggtctggcaagaaggacacctgtgccctgacctgtccctccagggcccgatttttgccagagtctgagaatggcttcacggtgagctgtgggacccccagccccagggctgctccagcccgagctggccacaatgggaacagcaccaactccaaccactgccatgaggctgcagtgctgtccattaaacaacgggcctccttcaagatcaaggatgccaaatgccgtttgcacctgcgaaacaaaggcaaaacagaggaggctggcagaatcacagggccaggtggtgccccctgctctgaatgccaggtcaccttcatccaccttaagtgtgactcctctcggaagggcaagggccgacgggcccggacccctccaggcaaagaggtcacaaggctcaccctggaactggaggcagaggtcagagccgaagaaaccacagccagctgtgggctgccctgcctccgacagcgaatggaacggcggctgaaaggatccctgaagatgctcagaaagtccatcaaccaggaccgcttcctgctgcgcctggcaggccttgattatgagctggcccacaagccgggcctggtagccggggagcgagcagagccgatggagtcctgtaggcccgggcagcaccgtgctgggaccaagtgtgtcagctgcccgcagggaacgtattaccacggccagacggagcagtgtgtgccatgcccagcgggcaccttccaggagagagaagggcagctctcctgcgacctttgccctgggagtgatgcccacgggcctcttggagccaccaacgtcaccacgtgtgcaggtcagtgcccacctggccaacactctgtagatgggttcaagccctgtcagccatgcccacgtggcacctaccaacctgaagcaggacggaccctatgcttcccttgtggtgggggcctcaccaccaagcatgaaggggccatttccttccaagactgtgacaccaaagtccagtgctccccagggcactactacaacaccagcatccaccgctgtattcgctgtgccatgggctcctatcagcccgacttccgtcagaacttctgcagccgctgtccaggaaacacaagcacagactttgatggctctaccagtgtggcccaatgcaagaatcgtcagtgtggtggggagctgggtgagttcactggctatattgagtcccccaactacccgggcaactacccagctggtgtggagtgcatctggaacatcaaccccccacccaagcgcaagatccttatcgtggtaccagagatcttcctgccatctgaggatgagtgtggggacgtcctggtcatgagaaagaactcatccccatcctccattaccacttatgagacctgccagacctacgagcgtcccattgccttcactgcccgttccaggaagctctggatcaacttcaagacaagcgaggccaacagcgcccgtggcttccagattccctatgttacctatgatgaggactatgagcagctggtagaagacattgtgcgagatggccggctctatgcctctgaaaaccaccaggagattttaaaggacaagaagctcatcaaggccttctttgaggtgctagcccacccccagaactacttcaagtacacagagaaacacaaggagatgctgccaaaatccttcatcaagctgctccgctccaaagtttccagcttcctgaggccctacaaatagtaaccctaggctcagagacccaattttttaagcccccagactccttagccctcagagccggcagccccctaccctcagacaaggaactctctcctctctttttggagggaaaaaaaaaatatcactacacaaaccaggcactctccctttctgtctttctagtttcctttccttgtctctctctgcctgcctctctactgttcccccttttctaacacactacctagaaaagccattcagtactggctctagtccccgtgagatgtaaagaaacagtacagccccttccactgcccattttaccagctcacattcccgaccccatcagcttggaagggtgctagaggcccatcaaggaagtgggtctggtgggaaacggggaggggaaagaagggcttctgccattatagggttgtgccttgctagtcaggggccaaaatgtcccctggctctgctccctagggtgattctaacagcccagggtcctgccaaagaagcctttgatttacaggcttaatgccagcaccagtcctctggggcacatggtttgagctctggacttcccacatggccagctttcttgtctatacagatcctctctttctttccctacgtctgcctggggtctactccataagggtttacaaatggcccacaacactgagttagtggacaccggctaaatgaggaagagcagcaggcattgtcatggtgaatgccccgctgtagctccctgagagaaagactgtaactctgcaggacagaaacaaggttttaaagcattgccaaaaaaaagaaaacagaaagaaaaaatgtatcatctaaaggactagacacagaacaattggaagtcaacttcaaacactaatcccttttcttgtcttccctggcccagccacctcctcagccccatgtgatgctccctgggggagccctactccccttgctacatgttgtccttaaacatggttattgacctgaagccagcctaggccttgccctacagttgtttttcccttgtagccccagctggcttgtgggcttcaccaaagaggaccccactctgaagccagcctggagccacctacctctggcctcaggctgtgggcagcaaaaggaatgtgtgtgcacttggcgagcctcctgcccaccctgtccacacctaataagtgcaatcattttgagtctttctatgttgtctagacggaggggtttttgttttctgggtttgttttttgtttttgtttcttcttcctctattagcaaaaccctatttatagctgcccaagagaaaagagtgtatgtttggagtggaagaaaatcggttttgaatctcatgaaccttgagtgctggagcatctgatctgtctctatgccaccactggccacctagagcccttggctgtggtaatccagggtaattgcgcagaggcatctgatgtgtaggaaagtaattctggggatttgatggagcagaaaggagagagacctatgtttgctaaaccaatcttgctatccctatgcctctccatggagtcagtgtggacctcatgattatagaggccaatggaactggtcagtgattctctaccccaagtagggaaaacctccatcttttccctgtcttcatcctgttatcccctggtgtacacatggaagaggaccaggacataccacctggggatgggctgactcagggtcccgaggccagagacaaagctgtgggagccaagaataagacagaaggcatcagatatttgcctggctctggtcacttccctttgaagttgacttcaagcttagcttcctcaactactgtttttcagaaggaagaaagaatcaaatggaagaagaatcaagtccatgcccaagcccaaagcctgcacacattctgcccttaatccaagtgttgcctataaaattattttctgttttctcactctagttcccccaaagctgtagtcccaatcaatcaaaggctaccaactgagtcctcaggttcatttcttttttttttttttttctttttaactctcctggtaactcacagaacagctcaggttcatttctaggtgactgtcctaggctactgctcccccaggagactcaacactaaataaaggagtc

SEQ ID NO: 1042 - DNA, 9535 bp, Homo sapiens
gggttgtgactgaaacccgtcaatatggcggcgatcggccgcggccgctctctgaagaacctccgagtacgagggcggaatgacagcggcgaggagaacgtcccgctggatctgacccgagaaccttctgataacttaagagagattctccaaaatgtggccagattgcagggagtatcaaatatgagaaagctaggccatctgaataactttactaagcttctttgtgatattggccacagtgaagaaaaactgggctttcactatgaggatatcataatttgtttgcggttagctttattaaatgaagcaaaagaagtgcgagcagcagggctacgagcgcttcgatatctcatccaagactccagtattctccagaaggtgctaaaattgaaagtggactatttaatagctaggtgcattgacatacaacagagcaacgaggtagagaggacacaagcacttcgattagtcagaaagatgattactgtgaatgcttccttgtttcctagttctgtgaccaactcattaattgcagttggaaatgatggacttcaagaaagagacagaatggtccgagcatgcattgccattatctgtgaactagcacttcagaatccagaggtggtggcccttcgaggtggactaaacaccatcttgaaaaatgtgatcgattgccaattaagtcgaataaatgaggccctaattactacaattttgcaccttcttaatcatccaaagactcgacagtatgtgcgagctgatgtagaattagagagaattttagcaccctatactgattttcactacagacatagtccagatacagctgaaggacagctcaaagaagacagagaagcacgatttctagccagtaaaatgggaatcatagcaacattccgatcatgggcaggtattattaatttatgtaaacctggaaattctgggatccagtctctaataggagtactttgcataccaaatatggaaataaggcgaggtctacttgaagtgctttatgatatatttcgtcttcctctacctgttgtgactgaggagttcatagaagcactactcagtgtagatccagggaggttccaagacagttggaggctttcagatggctttgtggcagctgaggcaaaaactattcttcctcatcgtgccagatccaggccagacctcatggataattatttggcactgatactctctgcatttattcgtaatggacttttagagggtctagttgaagtgataacaaacagtgatgatcatatctcagttagagctaccatccttttaggagagcttttacatatggcaaacacaattcttcctcattcacatagccatcatttacactgcttgccaaccctaatgaatatggctgcatcctttgatatccccaaggaaaagagactgcgagccagtgcagccttgaactgtttaaaacgcttccatgaaatgaagaaacgaggacctaagccttatagtcttcatttagaccacattattcagaaagcaattgcaacacaccagaaacgggatcagtatctccgagttcagaaagatatatttatccttaaggatacagaggaagctcttttaattaaccttagagatagccaagtccttcaacataaagagaatcttgaatggaattggaatcttatagggaccattcttaagtggccaaatgtaaatctaagaaactataaagatgaacagttacacaggtttgtacgaagactactttatttttacaagcccagcagtaaattatatgccaacctggatctggattttgccaaggccaaacagctcacggttgtaggttgccagtttacagaatttcttcttgaatctgaagaggatgggcaaggctacttagaagatctagtaaaggatattgttcagtggctcaatgcttcatctggaatgaaacccgaaagaagtcttcaaaataatggtttattgaccacccttagtcaacactactttttatttattggaacactttcttgccaccctcatggagttaaaatgctggaaaaatgcagtgtatttcagtgtctccttaatctttgctccttgaaaaaccaagatcacttgctaaaacttactgtttctagcttggactatagcagagatggattggctagagtcatcctttccaaaattttaactgcagctactgatgcctgcagactctatgcaacaaaacatttaagggtattattgagagctaatgttgaattctttaataattggggaattgagttgttagtgacccagctacatgataaaaacaaaacgatttcctctgaagctcttgatatcctcgatgaagcatgtgaagacaaggccaatcttcatgctctcattcagatgaaaccagcgttatcccaccttggagacaagggtttgcttctcctgctgagatttctctccattccaaaaggattttcctatctgaatgaaagaggttatgtagcaaaacaattggaaaagtggcacagggaatacaactccaaatatgttgacttgattgaggaacaactcaatgaagcacttactacttaccggaagcctgttgatggtgataactatgttcgtcggagtaaccaaagattacagcgtcctcacgtctacctgcctatacacctttatggacaactagtacaccataaaacaggctgccatttgttggaagtacagaatattattacagaactctgtcgtaatgttcgtacaccagatttggataagtgggaagaaattaaaaaactgaaagcatctctttgggccttgggaaatatcggctcatcaaattggggtctcaatttgctacaggaagaaaacgtgattccagatatactaaaacttgcaaaacagtgtgaagttctttccatcagagggacctgtgtatatgtacttgggctcatagctaaaaccaaacaaggctgtgatattctaaaatgtcacaactgggatgctgtgaggcatagtcgcaaacatctgtggccagtggttccagatgatgtggaacaactctgtaatgaactttcatctatcccaagcactctaagtttgaactcggagtcaaccagctctagacataatagtgaaagtgaatctgtgccatcgagtatgttcatattggaggatgaccggtttggcagcagctctactagtacatttttccttgatatcaatgaagatacagagccaacattttatgaccgatctggacccataaaggataaaaattcattccctttctttgcttctagtaaacttgtgaagaatcgtatcttaaattcgcttactttgcctaacaaaaaacatcgtagtagcagtgatccaaaaggagggaaattatcatctgaaagtaagacaagcaacaggcgaatcagaacacttacggagcccagtgttgattttaatcatagtgatgattttacacccatatccactgtacagaaaacattacaattagagacttcatttatggggaataagcacattgaagacactggtagtacaccaagcattggagaaaatgacttaaaattcaccaagaattttggtacagagaatcacagagaaaatacaagccgagagaggttagtagtagaaagttcaacgagctcacatatgaagatacgtagccaaagtttcaatacagacactacaacaagtggcataagttcaatgagctcaagtccttcacgagagacagtaggtgtagatgctacaactatggacacagactgtggaagcatgagtactgtggtaagtactaaaactattaagacaagccactatttgacgccacagtctaaccatctgtctctctccaaatcaaattcggtgtccctggtgcctccaggttcttctcatacgcttcctagaagagcacagtcccttaaagcaccctctattgctacaattaaaagtctagcagattgtaactttagttacacaagttctagagatgcttttggctatgctacactgaaaagactacagcaacaaagaatgcatccatccttatctcactctgaagctttggcatctccagcaaaagatgtgctatttactgataccatcaccatgaaggccaacagttttgagtccagattaacaccaagcaggttcatgaaagccttaagttatgcatcattagataaagaagatttattgagtcctattaatcaaaataccctgcaacgatcttcctcagtgcggtccatggtgtccagtgccacatatgggggttcagatgattacattggtcttgctctcccggtggatataaatgatatattccaggtaaaggatattccctattttcagacaaaaaacataccaccacatgatgatcgaggtgcaagagcatttgcccatgatgcaggaggtcttccatctggaactggaggtcttgtaaaaaattcttttcacttgctacgacagcagatgagtcttacggaaataatgaattcaatccattcagatgcctctctgtttttagaaagtacagaagacactggactacaggaacatacagatgataactgcctttattgtgtctgtattgaaattctgggtttccagcccagcaaccaactgagtgcaatatgtagtcattcagactttcaagatattccatattctgattggtgtgagcagactatccataatcctttagaagtggttccctctaagttttcggggatttctggatgcagtgatggggtgtctcaagaaggctcagctagcagcaccaaaagcacagaattgttactaggtgttaaaacaattccagatgatacaccaatgtgccgtatactccttcgcaaagaagttctaagattagtcattaatttgagtagttcagtttcaactaaatgtcatgagactgggcttttaacaattaaggagaagtatcctcaaacatttgatgacatatgcctttactctgaggtttcccatttgctgtcacactgcacattcagacttccgtgtcggaggttcatacaagaattatttcaagatgtacagtttctacaaatgcatgaagaagcagaggctgtgttggcaacaccaccaaagcaacctatagttgatacatctgctgaatcctgacctcatatttatgatggatatagatacatactatatatattcatatttgtggatttcctaaaagcctcagaaaatacgactgactaggcagcaaagacaggagtatcttctgtacactgttccgcagttactggtacatgaacagttggaactgctgactttcctaaccaaaacaacttccttctctcctttgttgagccttttgaggggttcatgattcattaccacagttttaagagtttcagttaccattgtatgcaagagccaagcactgaatacctacataggttttctattttctttcattttaaaagcataatgacagtggaacaataatgggatatgcagaagcacccttcacaagttatttctgaatgatttttagggtaaataatacagatgccttgtttgttaactaacttgtggaaagcaggaatcagtgtctctaaggctgcatcctattaccacaatggggtgtgctataactgctggtattagagagggaactttggccctttcacgtttttcttaatgtttgtaacactacttcagaggtttataacctcaaagcagaagaagagcctcaacaacccgggacttataagttatttttatgttactagacttgcataaagattcttgttttccaactcttcattttgttgcaatgtgttattacaggatatatgaaccaattaaggtttttcactacagttcttgaataaaatttaaaaatcattttttattttaattaaaaatatttcccatttatagaatgcatatatttgcaatggacttccactttcatcaactttccatctcatcgctttaaacaggaacttgaacaagcactgttagtttagacctaaaggataggaaagcattaaataatactttggatctcctgaggaaaagataagtttgcttgcaatttacacattccatggggaaagaagagccatatttccttaaaaaaaacattaataaagcttgttattgagaaaaattgtagtgaaaagccttaagtaccaaattttaaagcagcagtaacttaatttttatatcagtgtttttgttttgcacaaactaaatgcagtggtaggtgggtttatgagtatattaattgcctttatccatttgtgaagttaagttgatgagggcaaggtttttgtttgtttaatttgtatatgtctaaaggtatttggaactttttacaggaattaaacatatatgcaaatttgtatataaaaatagcatggccatcatttgaatgcttgtaaatgaaaggattatcttttttgagatctatatataaatagaaatagaaaatccagctggactgattaggattcttttttaattcatttgtgtataacatttttattacaattacacatcagttttgacacagtcatagcaacattaatattttcccatgatgcagatcctttttgtaatgggcttgttctttgagatctctgtaaagaaccctgtgaactagaaaacataactcacagagatacttttttaaaaaatttatttactggaactgaaagttccagttgggatgaagcatttcatctcacttcataacacctctttgactgcacttcagtgaattgttcttatgtgcactgtgtagcaacttacattataacaaagcagataagggctgtaagctgctgcttatgttgaaaagtggttcttcagattttctctcataaaatccagttgaagataaataatttttttatactttatcactgaacccaagtgtttatttaaatgtcaacagtacttctaagaacgttgcctgtcatcgtggtctttggtcttggataactaaactgcctttccagagaaccaaatgtcagagttactagaccaaatagtggttaaaacctccaaaggaagtaatgtaatcttattcataatgggattaacatattttagacattcattttaaacactacctcagttaatatagagtataaaaatctgtggtttaatccctcaaaagttaacagtaattttttttttgtcttacacacacacacaccccctcccccaccatcactatccctgtaccctcaccttggtcatctatcctgaaataaggcttagttagtattggcctgaatgttttgtgtttttttttttgttttttttttttactgttactttgaaaaatatgtatgtataccttatcatatctgcctatatcacttactttggggagatactcagagctttgtggttatcagtatactaaaaaaaaaaaaaagtctacgcttaaatttatagtgctatttggtttctccatgatttcactgacaggtctaatacattttctttgagtacttgtttgtaaaaagtagactttatggtgaaaaatacatgcagtgccaagtgattaacttaagtgtttaaaaatattaaattatagcagaagaggttaggaatgatatcagcagtaatagaaataattgagaaaatcatctataaataatagatattacagactatagaataccaaaataatgtcaatactgtagtttttaaagattttaggattaatcttagtccatataaatttgtactattggtaattattgaataattgggaggaatctgggcagttgtgctggttgtaaactatgaatttctaatcgtaaagtgaattgttatttctaattgaactttttttcaagaacagatttcagcctcacatactaagtaaatactgataaataaggaaattagaaatttagtattcataattaaatatgctctaaaatttcctatacttttatttcctgtttattcttaggtagattggaagggggaaacagtctgttctccctaattaaattttttctaataacgattagtagaatatggacattctatatgacagtgacattaaaagaggctctttggaagtatatacattattaacataatgtgtacaagtccttttgaaatgacaactttaatgggtttcagctcttttatctagagcttgagataattcaagctgagtttttcagggcatatcacaacggccaagtgttcagcagtgggatatcaatgcttatttacattttcctactgctatttatataaaatgttattccattcagaggatgccttttatccccacattaaagcacagatcattaagcaataaaaaccaaattgtctgtcattcaaattataactgcagttatttttgcatggtaagagtgaggtgctaattttgtgtgagatgaactttgtaaactactttgggaaatgttctttggaagtaaggttttttctcctttagtcttatgcttccacttttgtctcagattcacaatccattaaaacatggggaaaaaagaaaaggtaaaattgagagacttttgttagaggagctatttggaatgaaccaacatttcagattttccaaaatgtaagttaggaagtctccattgtctctgcattaacaaaatacactgttactatcttaatctcaagagtgtcattacagtgagaatctcatttaaaagcataccagtgaaattaatagcagtgcttatcaaagaacactgaaatctgtgagaatctttctaggagcattcttttcttcttttagttccaagttccagggtatttttcattcctagtaggtttatatgactcacagaatgtggacttttttcctgtttggagtatttttgtaatgtaagtatcggatagctgcaccacagcatgcataaattgcacattttgttttactttctttatagaatatttaatttcaaaaatataatttatgccaaaaaaagcatacctttcaattttgctacttggttgatttagcacaaaatgcaaagtcttggggcagagagggggagtgaaaaaaattttataggtaattgttacaaaaatacctgtcagaaaccctaaagctgcattgtaaaacaaatggtgtaaactagttttgaaaagtggtaaggaattgtgaaaaaaatctcagacttaatgctctctaaccacatgagtttcttcttttttatttagtaatacgctgctacatatttggaggttctggtgtttgtaggtcactgaacagacattgaaatctgatttatattgtataactgtaacatagaaagaaaaagtatttatattttttctgtaagaatatttcattgagttgtgtataatttaaataagatttgtccccaaatggttttgctcaccttgattttttttgttgtgattttcttgtttttgtataatgtgtatagtttatgtcaagggcattaaaagcctcctgaagcataatcttatcaaagggatacattgttaataaaatgtacttaaaattcttaaa

SEQ ID NO: 1043 - DNA, 5171 bp, Homo sapiens
aggaagagcgaggtgagcgcggacgtcagagtggagagcggaaggtcagggaggctcggagcggaagtgagactagggagtctgtccgccattgtggacccgagaagcagagagcgagagggggaagaggagcgtgcaagcggaaaagacgggcctcttcctccgactcccgagcgcgaggccctcattttgggttctcagcgaacggcggcagcggcggcggctggaacaatcactcggccaagggcgacagccaactgctgtgagtgcacggggagaggcccaggcagcggcggcggcggcggctctcgggttgcggtgaagaatgtcagccactagcgtggatcagagacctaaagggcaaggaaataaagtttcagtacaaaacggttcgattcatcaaaaagatgctgtaaatgatgatgattttgagccatacttaagtagccagacaaatcagagtaacagctatccaccaatgtcagatccatacatgcctagttactatgctccatccattggatttccatattctcttggggaagcagcgtggtccacagctggagaccagcctatgccatatctgacaacctatggacaaatgagtaatggagaacatcactatataccagatggtgtatttagtcaacctggggcattaggaaatacccctccatttcttggtcaacatggatttaacttttttcctggtaatgctgatttctctacatgggggacaagtggatctcagggacaatcaacacaaagttctgcttatagtagcagttatggctatccacctagttctcttgggagagctattactgatggacaggctggatttggcaatgatactttgagtaaggtgcctggcattagcagtattgagcaaggcatgactggactgaaaattggtggtgacctgacagctgcagtgacaaaaactgtaggtacagctttgagcagcagtggtatgactagcattgcaaccaatagtgtgcccccagttagcagtgcagcacctaaaccaacctcctgggctgccattgccagaaagcctgccaaacctcaaccgaaacttaaacccaagggcaatgtgggaattgggggttctgctgtaccaccacctcctataaaacacaacatgaatattggaacttgggatgaaaaagggtcagtggtaaaggctccaccaacccaaccagttctgcctcctcaaactataatccagcagcctcagccattaattcaaccaccaccattggtgcaaagccaactgcctcaacagcagcctcaaccaccacaaccacagcagcaacaaggacctcagccacaggcccagcctcaccaagtgcagcctcaacagcagcagctgcagaatcgctgggtagctcctcgtaacaggggagcaggcttcaaccagaacaatggagcgggcagtgaaaactttggtttaggtgttgtacctgtcagtgcttcaccttctagtgtagaagtgcatcccgtgctggaaaagctaaaggccataaacaactataatcccaaagactttgattggaatctgaagaatggacgtgtgtttataattaaaagctactctgaggatgacatacatcgttccattaaatactctatctggtgtagtactgagcatggtaataagcgtttggatgcagcttaccgttccctgaatgggaaaggcccactctatttactcttcagtgtgaatggcagtggacatttttgtggagtggctgaaatgaagtctgttgtggactataatgcgtatgctggtgtctggtctcaggataagtggaagggcaaatttgaagttaaatggatctttgtcaaagatgttcccaataaccaattacggcatattcgcttagaaaataatgacaacaaaccggttaccaattcaagggacactcaagaggtacccctagaaaaagctaagcaagtgcttaaaataattgctactttcaagcataccacctcaatctttgatgactttgcacattatgaaaagcgtcaagaagaggaggaagccatgcgtagggagagaaatagaaacaaacaataaccgtatgaagatgtcctgttaaatttacaacactaacgatgtagactctggaaatgcctaataagtcaaagaagacgtattaaagctcttttctgcttaaggtgacatctttgaacactttaacacaaagttgactcttctcgtaatggttttcatcagcgcatctgcccttatactcttcaccaaacacacttgagaactgtaacttcgtcaagcactttctgtcctgaagcttttaccagtatctgctgtcttttgtaattatgcatcctagctaaggcacagaagactgaatgaatgcaaggattcattaactctttgaatttgttaaatactaacagttaaccattagaagtggttcaatgatgtaagagtcacactgcttcaactttttctttgttgtagtttttaaattgtcgatttttagctatttgacagattaaaagcaaaataatcatgccatatttagtcctggagttcaagtctaaatgttgatgtgaaaaattattgtagtaaacttttaatatggcaaagcaaccttaagctctattttagccaaatgaaacataatctgaaattatattagaacatttcccttgtcttcaaactgtttggtgtaacagaatattgatatgcagcttggtggatttcaccagttaatgcacattcttcttccctcctccccccattaatatgtatactgaaaaatgtgcatttgtctgaggaattattttgtttgctaccacttaatgaatctcaaaattttgagtaaatgtacctcagtctaatcagactttttatgacctttataactacatttaaaacccttaattcctatttctgggtgtttgcgagcctgattgctatcatgaagtaaaaatttattactctaggtattcactagctaaataaacatagttcttgtttagcaagcatatgttgttcctcagctcttttctccagcttttgcagtgtcctggcatccttaaaatactttgaaaatatggccttgatccatggattaaatcagtatctaagtgaatgtgttgatgttttattgatcagatctatataagtgggaatacagcatatatctggatattcttatagttatctttttaacatcttatttttttcattaattacatatcaacattaattttgtatcttgaagcaaattgattttgtataattaaatgtgtcaagcatctgtattaattgatttgatggcataaggttatgaaaataatgtactgccccatgtattactgttccaaaaggagaaagctatgtagaaagatacattaagggtgaaaatagcaatacagtagatttgaataccttgatgttttgcattacttcatttatgtttacatcatgtttagaaatgttttcatttactgtggtctttggtcacttcagctcaaagacctagtgatggatatttctttgaggctttcatttatataattttattttgtacaatgttttttttaaatgtgcaaatactgtattcaagtgaaaaaaatacagtatttgtagataaccatagctactacacagttcttcggtagtcccagtgtagttatatcagtgtttactgaagggaacatcaaaatattaatggtatattataaaataaagactttcttaaaggaaaattgcacctattttacctttttaagagtaagccatgaaatcttgtaacatgtctcttaactatttataatgaaaagtggcatttgggtatagtcaccacagcaatgttctacatccctaagattatctaggtaggacatgtcaaagatgactgttgtcattctggaggtcctattagagaatattataaaagggtgaccttgtaggaaggatctgagtcctccccctgaggttctctttttcttggtgctttattagcaactctggatatttttataaaactagttacattataaacggtttcaaacatgtttaatttacattaggtttttatgtaagagtgtcatggaagcactcagcaagcaggctgattgcaatagactcagacatgcgaataaatgtaattgagagtctattcatggtgaggagtacatcccagtgcctttaacctggatttctaatcttaagtgaaatgggtgcagcattcctttggaaaaaaaaatctttttattttcaagtgataattttgtgtttttctcatataagttttctccagagcacccaccttctcttccttcttggtctgtcattatattgcaaaatatttttcctctgaatgaaattatcacaggttgtctcaagcacaaccaactgaatgtctcttaactgtggggaccaaaagggagagagcctggggtctacaagaggagacacatcatcaaatgtttgaatgatcacaaattaagacattatcagcccagtaaatttcttgcttaatgtttttccaagttctggcttgaatatttcttattaaagctatcttatgtgggtattttattttgaaaggtattatagtttgtatatttaacagtaaggaggaaactgtaaccaaaattagtatttctctatacgtattggtacttgaagattcctttcaaaagaaatccagcgttttcctaattttagtacttaatttctctttttaatttaagtgatctttctaattcgaaagctgtgttctttttgaataccgtgcatgggggttaagctgatgttaaaacagtttgcaataaaaaaaaatgaatcagcttaagtcatttaatcatttcaagtgcattctgcatcctttaaaaataagtttaagaaatttaagagaattgtgttttcattaagttttgcatatcttttgttatgccatgtaaattccctttttcgtatgattaaaggaaggttatgataaaatgattagttcatttacattcacttgtagcaattacatgagaatttgaattttgtcgtgtttgggtttgttcattcctgtgaatgatggtacagttaggtgagattttctgttatggtacccaaactcaccatttggtcctctttaatctttgagggtttcaataaaaattgttcactcataaaaaaa

SEQ ID NO: 1044 - DNA, 4562 bp, Homo sapiens
gcaggcgccgttggggtgcgcatccggggacctgcaggttacaagcagcagatcccaccttcagtcctggctctgacaagccctccagcttcacgccacccgggatgggagaaagcaggtgtcgcgagagttgggcgcaagacgccttgtagggagtgtaactatggccggcctgcggaacgaaagtgaacaggagccgctcttaggcgacacacctggaagcagagaatgggacattttagagactgaagagcattataagagccgatggagatctattaggattttatatcttactatgtttctcagcagtgtagggttttctgtagtgatgatgtccatatggccatatctccaaaagattgatccgacagctgatacaagttttttgggctgggttattgcttcatatagtcttggccaaatggtagcttcacctatatttggtttatggtctaattatagaccaagaaaagagcctcttattgtctccatcttgatttccgtggcagccaactgcctctatgcatatctccacatcccagcttctcataataaatactacatgctggttgctcgtggattgttgggaattggagcaggaaatgtagcagttgttagatcatatactgctggtgctacttcccttcaggaaagaacaagttccatggcaaacataagcatgtgtcaagcattaggttttattctaggtccagtttttcagacttgttttacattccttggagaaaaaggtgtgacatgggatgtgattaaactgcagataaacatgtatacaacaccagttttacttagcgccttcctgggaattttaaatattattctgatccttgccatactaagagaacatcgtgtggatgactcaggaagacagtgtaaaagtattaattttgaagaagcaagtacagatgaagctcaggttccccaaggaaatattgaccaggttgctgttgtggccatcaatgttctgttttttgtgactctatttatctttgccctttttgaaaccatcattactccattaacaatggatatgtatgcctggactcaagaacaagctgtgttatataatggcataatacttgctgctcttggggttgaagccgttgttattttcttaggagttaagttgctttccaaaaagattggcgagcgtgctattctactgggaggactcatcgttgtatgggttggcttctttatcttgttaccttggggaaatcaatttcccaaaatacagtgggaagatttgcacaataattcaatccctaataccacatttggggaaattattattggtctttggaagtctccaatggaagatgacaatgaaagaccaactggttgctcgattgaacaagcctggtgcctctacaccccggtgattcatctggcccagttccttacatcagctgtgctaataggattaggctatccagtctgcaatcttatgtcctatactctatattcaaaaattctaggaccaaaacctcagggtgtatacatgggctggttaacagcatctggaagtggagcccggattcttgggcctatgttcatcagccaagtgtatgctcactggggaccacgatgggcattcagcctggtgtgtggaataatagtgctcaccatcaccctcctgggagtggtttacaaaagactcattgctctttctgtaagatatgggaggattcaggaataaactagctaagactgtgatggaaactacttgctgtgtggcacttcctggtctaaagctctgctagacaattgcggtgagccagtctccaagaatcagactacagatattgcagattttgaagaacaagaacatatgttgaataacagagagaattctacatgtcattgtgaatagtaggttatataaaaacatactagatgataatttccttacctcagaaatgaaatattattcttataatacctttttgtggttgcatgaactaatgagtgaatggacaatgatgaataaatgtgaagctgtattcttaatacccactgcagaagtgtcattaaaataatatacagtggaaccagaaagagggttctgtaagaattagccatagcagaacaaaattatagaattttaaatacctctacccaagtagaggtatttttattcagacacctactttttatttataaaaaaatgcattttctattatcaagttcacttatgaaataaaaattataacacatattttccatttagcgtgcctaacatcctaccttgccttctatgagtctttcttctaatactacacctctgccttattttagttcagggtttcactaagtaacccctacattaataaatgagtatggataatgctaatatttgagcaatacagaggattaagagatcaagatacttcactgcctattagcctaatagggatacctactttctttcaaatgccaaaaattcacattagaaacataatccagatatgtgttattttatatatatatatacaaaacagtaaatggtttcttaaaattattgctatttttcaacccccttaaactggagaaaaacatttaattagtaaaacattaattaatttactttaatttttcccatctctcagtagtggcggggaggaacacaacagttttcaatctatgtctgcatagttgtgtagagctgcagaattttagttggatttttaatttggatgatccctgacagccccaaactagtcaggctaataagtatttgaggcaaaatggctttaatctaacaatttactgagtttacctgaagttggctaaataacactgtatgtttaacttctacctctacataagttgaatgctgataaaaggaactagtagataactatgtatattgataagcactgttaagaaaatgcaaaaatatttctaaacacttttccaaatgttttctactttaagttagaaatagtttcaaatctgagaataaacactatataatctgcactttataggttgggtgcagtgtctcatgcctgtaatcccagcactttggaaggccaaggcaggaggattgcttgaggccaggaattcaagaccagcctgggaaacaaagtgagaccctgtctttacaaaaaataaaaacaaaaatttaaaactgtataatctgcactttatgctaaactagctgtgctcttaaactcaattttttcagctctaataaagggcttaatttgatagaattattctacgattaaattttgaagactgttttcactctcctctgccgcccatagcaagactgcttccatagatttctcagaaccgtagccagttctggctatttggtcaagtctgggatccctcttacctgctattctgcagctgctttctctgtcttacattttttgggccacgtctaatcttaaagagtaaactctacccttggtttgcatagtgtgcatgacaaaaataacaagaataatggtaatgatgaaaatgataagagcaaaatttgtggagtgctttccacattccaggtaatgtgtaacatacaatttaattcttacagcagtcttatggagtgaaaatactattatgattcccgttttacagatgaaagaatggaggcacagaaaagttacttgtctaagtaacagtctatccttaaagtccacagtcttaaccacttgatttttcatagtgaggaaaatatcccagaaagttgcagtttcaattaatcactaattgtagggtaatttaactataccagtgagtcctactagcagaaatatttgggcaacataagcccactgactggagcttttgtcttagcataataacctgtttccagcaagaatataacagaaaaaagtttcccagctttcaaaggtttataatattgattaaaatttagataaacttaaccttacacaaatgactcttactttcctttttattgagagcattttctttggagcattttcttctttggaggattataccttgctcatcttggcacaaaagaaggcgaaaggaagtaacatgggattgggaaaagagcaaggagataaagtttgaggaaaaaaaatcaccatgttgatgtcttcttgagtaggccaagttgcgtataaagagaaaatgacaacaggagattttaaggtatgatatattgttaagagtagtacatatttaagaagagaaaatatgtttttgaaaacaaatttaaacttgaaaggatgattttcatattttgaagggatttataacttcacaaagcatctccattctatcttgttcagctttacatttaaaaataaactcttcttgttcatataaaccttatctcttacataaagtgaaatctgttaattttttgttttgacaaggataaactacttacctgcatctgtttaagaatagattaacttattttgagaagaaattctgggcaccatttttgaccattgaagacttatttgtaatttaatttctactttacattgtgaatgttcattttctaataaacaagattattttgcatatgtaaaaaaaaaaaaaaaaaa

SEQ ID NO: 1045 - DNA, 6500 bp, Homo sapiens
tgttttccgttagcgctttgctgcacggacaaatgcatacaaatgcatttaagagcccacagaacaaggcgtggaaaagtctcccccacggcaaaaacgaaatcacttcttcattttattgtactatgtgtggctggggtggttgttcatgcacaagaacaaggcatagatattcttcatcaactaggccttggaggcaaagacgtaagacactcatcaccagcgactgctgtaccatcagcatctacaccgttacctcagggggtccatttaacagaatcaggagtcatttttaaaaatgatgcttatatcgagacacctttcgtgaaaattttaccagtcaacttggggcagccgtttacaatattaactgggttacagtcacatcgggtgaacaatgcatttctcttcagcattagaaataaaaatagactgcaattaggagtacaattactacctaaaaaattagtagtacacattagaggaaagcagcctgcagttttcaactacagtgttcatgatgagcaatggcactcatttgccattactattagaaaccaaagtgtctcaatgtttgttgagtgtggaaagaaatattttagcacagagactattccagaagttcagacctttgattctaatagtgtgtttactttaggaagtatgaataataattctatccattttgaaggaatagtatgtcagttagatattattccttctgcagaagcatctgcagactactgcagatatgtgaaacagcagtgtcgccaagcagacaaataccaacctgaaacaagcattccttgtacaactctcataccaacaaagataccggaacactctcccccgcccaaactatttgctgaaaaagtactgtcagaggatacatttactgaaggcaaaagcattccaaatatcataaaaaatgattctgaaaccgtgtataaaagacaagaacaccagatatcaagatctcagttatcttctcttcagtcaggaaatgtctctgctgtggatctcacaaaccatgggattcaggccaaagaaatgatcactgaggaagatactcagacaaatttcagcctgtcagtgaccactcatcgcatcagtgaggcaaaaatgaataccaaagagaaatttagctctctcctaaacatgtctgacaatatcacacaacatgatgatagagtaactggtctgtcactgtttaagaagatgccatctattcttccacaaattaaacaagatacaattactaatctcaagaaggctatcacagcaaatctacacactaacgaactcatggaaatgcaaccaattttaaacacaagcttgcatagagtgacaaatgagccatctgtggataatcaccttgatctaaggaaagaaggtgaattttatcctgatgctacttatcccatcgaaaatagctatgaaactgagctttatgattattattattatgaggatctaaatacaatgcttgaaatggagtatctgagagggccaaaaggagacactggacctcccggtccacctggtccagcaggtatcccaggtccgtcagggaagagaggtccacggggcataccagggccacatggaaatcctggtttacctggattacctggtccaaagggccccaaaggagatccaggattttccccaggtcaacctgttcctggagaaaagggtgatcaaggcctttctggattaatgggcccccctggtatgcaaggtgataagggtctcaaaggacatcctggactcccaggacttccaggtgaacaaggaattccaggatttgctggtaatattggttcacccggttaccctggcaggcagggtttagctggaccagaaggtaatccaggtcctaaaggtgcacaaggttttattggctctcctggagaagcgggacaactgggacctgaaggagaacggggcattcctgggatccgtggaaagaagggttttaaggggagacagggttttccaggtgactttggagacagaggccctgctggtcttgatggcagtcctggacttgtaggtggcactggtcctccggggtttcctgggcttagaggcagtgttggccctgtgggaccaattggacctgctggaattcctggcccaatgggcctttcagggaataaaggactacctggaatcaaaggtgataagggtgaacaaggcacagcaggagagctaggagaacccgggtatcctggagacaagggtgctgttggtttaccaggaccaccagggatgagaggaaagtcagggccttcaggccaaacaggtgacccaggactccaaggaccatctggccctccaggaccagagggttttccaggagatattgggattcctggacaaaacggccctgaaggaccaaagggactccttggaaatagaggacctcctggacctcctggtctcaaaggaactcagggagaagaaggaccaattggagcctttggggaactggggccaagaggaaaaccaggtcaaaaggggtatgcaggtgaaccaggaccagaaggcttaaagggagaagtaggagatcaaggaaatattggaaaaattggtgaaacaggacctgttggcttacctggagaagttgggatgactggaagcattggcgaaaagggagaacgtggaagtccaggcccactaggtccgcagggagaaaaaggtgttatgggatatccaggtcctcctggggttccaggacctatcggtccattgggattacctggtcatgtgggggcaagaggaccacctgggagtcaaggtcctaaaggacaaagaggatcaagaggaccagatggtctcttaggggaacaaggtatacaaggtgccaagggtgaaaaaggagatcaaggaaaaagagggcctcatggtcttattggtaagactggaaaccctggagaaagaggatttcaagggaaaccaggtttacagggattgcctggaagtacaggtgacagaggacttccaggagagccaggactgcgaggactgcaaggtgatgttggacctcctggagaaatgggcatggagggacctccaggcactgagggagagtctggtctgcaaggtgaaccaggtgcaaagggagatgttggaactgctggcagtgttggaggaactggggaaccaggtttacggggtgaaccaggagctcctggagaagaaggtctccagggaaaagatgggttaaagggagtaccaggaggaaggggacttcctggagaggatggagaaaaaggagagatgggcttaccaggaattataggacccttgggtagatcaggccaaacaggccttccgggacctgaaggaattgtgggaattccagggcaaagaggtcgtccaggaaaaaagggtgataaaggacaaataggacccacaggagaagttggaagcagaggtcctcctggaaaaattgggaaaagtggtcctaagggtgccagaggaactagaggtgctgtgggacatttaggattgatgggacctgatggagaaccaggaattccagggtacaggggccatcagggccaaccaggaccctctggattgccaggacctaaaggagaaaagggctacccaggagaagatagcacagtcctaggaccacctgggcctcgaggtgaaccaggtccagtgggggaccaaggagagagaggagagcctggagcagagggatataagggccatgtgggtgtaccaggactaagaggtgccactggacaacaaggacccccaggcgaaccaggtgaccagggtgaacaaggactaaaaggagagagaggatctgaaggtaataaggggaaaaaaggagctcctggtccttctgggaaacctgggattcctggacttcaaggcctacttgggccaaaaggcatacaaggataccatggagcagatggcatttcaggaaaccctggaaaaattgggccaccaggaaaacagggacttcctggcatcagaggcggcccaggaagaacaggtcttgctggggctccaggtcctccaggagtaaagggttcatcaggcttgccaggaagcccaggaattcaaggcccaaagggtgaacaagggctacctggtcaacctggaattcaaggtaaaagaggtcaccgaggagcacaaggtgatcaaggaccatgtggagaccctggcctgaaagggcagcctggagaatatggtgttcaaggtttgacaggtttccaaggattcccaggccctaaaggtcctgaaggggatgctggcattgttgggatatcaggtcctaaaggtcctattggacacagaggaaacactggtccccttggcagagaaggtataataggcccaacaggtagaactggacccagaggtgaaaagggctttagaggtgaaactggtcctcaaggaccaagaggtcaaccagggcctccaggtccacctggagcaccaggcccaagaaagcaaatggatatcaatgctgctattcaagccttgattgaatcaaatactgccctacagatggagagctaccagaatactgaagtgactttaattgaccacagtgaagagatattcaaaaccctgaactaccttagcaatttattgcacagcatcaagaatcctcttggcacacgagataacccagcacgaatctgcaaagatttacttaactgtgaacaaaaagtatcagatggaaaatactggattgacccaaatcttggctgtccttcagatgccattgaggttttctgcaatttcagtgctggtggccagacatgcttacctcctgtttctgtaacaaagttggagtttggagttgggaaagtccagatgaacttccttcatttactgagttcggaagccacccatatcatcaccattcactgtctaaacaccccaaggtggacaagcacacaaacaagtggcccaggattgcctattggtttcaagggatggaatggccagatttttaaagtaaacactctacttgaacctaaagtgctttcagatgactgcaagattcaagatggcagctggcataaggcaacatttctttttcacacccaggaacctaatcaacttccagtgattgaagtacaaaaacttcctcatctcaaaactgaacgaaagtattacattgacagcagttctgtatgctttctgtaaagtctctgaattagttccgaattcaggctgttggccaggtaattgctgcagagggagaaataagacagacagatacagtcattatgaaatgcatgtaataaagcattggctaaatcttaaagaatctcaggaagaacagacttcctcctaagaaggagaaaaggcatttttaaaggactatgattgataaagtatttaattcttttaaaaattatattcatctcagctttcttagagaattccctagaactaaaaatttataaatatggaattcttcagggtatcttatatttttgactgagtgcgtagtacccattagacagctggagatgcagagcactatggagcaatactggctaatgcttccagatgtgcactgcttctgtctaaaaattacaagccacagtctaatatgtcttattttccaaaacactaagctgtattcaggtccccgatgggcatatacatcttagccggtgatacactacctcttacgtgttgcctctttgtgttgcttggtgctctttcgaaaacaaggtgcttatggctttcatagactatttcctttttcatctttgtcattctttaaaagtgtatgtactggttacatcaagatatgttttggttgttagtacttattttaatttgtttggtcacacacttaataacacgtgaaactatttatgtgaagtccttgttttattttaaaattctctttgtgtatttggaatcaaagccagcacattgtaacctgtgcttgtacgcaaaagaattagatttctttgtttttgttttattttttaaattgttgtaaaaattattataggccagctacatctagtagtaggtttggggtacagattgggggttgtgccatactgtttttaaagttcatgatcatctggaatgatacttagtgtatatatattttgtaaagttttaattcagcaaattttttgaaattgctgctgttttaaattataaaacctttatatttctgctttgtagaaattatatgttttgtagtattcattgattttctttcactgtacttaaatttagtgttagtactttaaaatttttaatttaccagtctttaaagcaacatccagaaaaaaaaaagtcttttcccatttaaaataggctcagccagttcaatgtctccttgttatcagagaaatattagttcaatactgaaagaaaaatattatacctcttggtatctagaaaagcttgttcatccattataaatatatctttagccacagcaaaccacacttaacctatctataataaaaatgtgctttaaataa

SEQ ID NO: 1046 - DNA, 3637 bp, Homo sapiens
gcgagatccggcttggcgccgtgacctccatgtgggagctccagctctataagtaaacactctgcgcggcgcagacatggcctcttcctatctttgaggcggtgtctgcggcagcgcctcagagtggttccggtcgtctctcctcaagtcggctagtcgggcgcgcgcgctgagagtcgtcgccgcctgtcgggcccggcgtccggtcggtccggtgggcgcgctcgcccgcctgccgctgagggcccgagccgcagggaaagcggcgcgggccgggcggggcgcggcgcccagagctcagggggagacaaaggggaccggttcctctctaggcgccaagatgtggatacaggttcgcaccattgatggctccaagacgtgcaccattgaggacgtgtctcgcaaagccacgattgaggagctgcgcgagcgggtgtgggcgctgttcgacgtgcggcccgaatgccagcgcctcttctaccggggcaagcagttggaaaatggatataccttatttgattatgatgttggactgaatgatataattcagctgctagttcgcccagaccctgatcatcttcctggcacatctacacagattgaggctaaaccctgttctaatagtccacctaaagtaaagaaagctccgagggtaggaccttccaatcagccatctacatcagctcgtgcccgtcttattgatcctggctttggaatatataaggtaaatgaattggtggatgccagagatgtcggccttggtgcttggtttgaagcacacatacatagtgttactagagcttctgatggacagtcacgtggcaaaactccactgaagaatggcagttcttgtaaaaggactaatggaaatataaagcataaatccaaagagaacacaaataaattggacagtgtaccctctacgtctaattcagactgtgttgctgctgatgaagacgttatttaccatatccagtatgatgaatacccagaaagcggtactctagaaatgaatgtcaaggatcttagaccacgagctagaaccattttgaaatggaatgaactaaatgttggtgatgtggtaatggttaattataatgtagaaagtcctggacaaagaggattctggtttgatgcagaaattaccacattgaagacaatctcaaggaccaaaaaagaacttcgtgtgaaaattttcctggggggttctgaaggaacattaaatgactgcaagataatatctgtagatgaaatcttcaagattgagagacctggagcccatcccctttcatttgcagatggaaagtttttaaggcgaaatgaccctgaatgtgacctgtgtggtggagacccagaaaagaaatgtcattcttgctcctgtcgtgtatgtggtgggaaacatgaacccaacatgcagcttctgtgtgatgaatgtaatgtggcttatcatatttactgtctgaatccacctttggataaagtcccagaagaggaatactggtattgtccttcttgtaaaactgattccagtgaagttgtaaaggctggtgaaagactcaagatgagtaaaaagaaagcaaagatgccgtcagctagtactgaaagccgaagagactggggcaggggaatggcttgtgttggtcgtacgagagaatgtactattgtcccttctaatcattatggacccattcctggtattcctgttggatcaacttggagatttagagttcaggtgagcgaagcaggtgttcacagaccccatgttggtggaattcatggtcgaagtaatgatggggcttattctcttgtactggctggtggatttgcggatgaagtcgaccgaggtgatgagttcacatacactggaagcggtggtaaaaatcttgctggtaacaaaagaattggtgcaccttcagctgatcaaacattaacaaacatgaacagggcattggccctaaactgtgatgctccattggatgataaaattggagcagagtctcggaattggagagctggtaagccagtcagagtgatacgcagttttaaagggaggaagatcagcaaatatgctcctgaagaaggcaacagatatgatggcatttataaggtggtgaaatactggccagagatttcatcaagccatggattcttggtttggcgctatcttttaagaagagatgatgttgaacctgctccttggacctctgaaggaatagaacggtcaaggagattatgtctacgtttacagtatccagcaggttacccttcagataaagaagggaagaagcctaaaggacagtcaaagaagcagcccagtggaaccacaaaaaggccaatttcagatgatgactgtccaagtgcctccaaagtgtacaaagcatcagattcagcagaagcaattgaggcttttcaactaactcctcaacagcaacatctcatcagagaagattgtcaaaaccagaagctgtgggatgaagtgctttcacatcttgtggaaggaccaaattttctgaaaaaattggaacaatcttttatgtgcgtttgctgtcaggagctagtttaccagcctgtgacaactgagtgcttccacaatgtctgtaaagattgcctacagcgctcctttaaggcacaggttttctcctgccctgcttgccggcatgatcttggccagaattacatcatgattcccaatgagattctgcagactctacttgaccttttcttccctggctacagcaaaggacgatgatctgcctgctttcactgtgttgttcatggtggctttttggacaataaagaatctaaaatgggtggggagggtggaagaaatggtggactgtatctctcacgttctgaagcagctaatcctctttcccacatagccatcatcttgtgtgtgtagtaagaggcccatttctcaactgtcttttaaatatctaaaggtagttcctgtaacaactagttttaatgagtaaaaagtcaaagcctcagctctagttgatatccaagttatgatttattttgcaactacctcaggacagaaaagatttatggggattttaaaaatcattgaataactagttaaatgaaattttagctacacactgcctcccaaatattagttgtgcctggttcttgtaatttgattttacagaaaaggaaatgacacttgagatccttggaatgaacacagcttctaaagtgtgcatatacttttttaacgtctcttcttccattacaatgtgtgttttgcaaggacaggttcattttttttagcccactttgtgaactccattgtgcttttttctggtgttttatgcaagttgactactaatgactaatgagaacaataatgaatgcattgttgctgcattagtgtaatgtggtgtggttttgcacttaaaagaggtattcatatgctctagttgtaaatgttcatgaaaatccacttctctactagtcgaactgcttttagtgtctcaccagtggttttacatctgcagagttttgagggctgtgctgacctttgagaggatttgaaattgcttcatattgtgatcctaaattttatattcactatattccctaaagtataccttaataaatattttatgatcagaaaaaaaaaaaaaaaaaa

SEQ ID NO: 1047 - DNA, 2121 bp, Homo sapiens
ggggccgcaccgtaaatgggtgtcgcctttcctccagtccactctgcacccaacctcagcgggcgcacttttctgagttgcgcataccctctcaattattaaaggttgcagacggaaaagttagtagttttcggaattgtagaatacgctcgtgcagcgccaggacggctaatgcttacccgaaaatgtggaaccctgatctccccatgcgtggagcgaggttggaggtagcgtagtaagaatactggagttgcttaaacgcatttgctcgaaagtcactaccctggatatacattctggccaaaagaaagggggaaaaactccacatttttctcaaatactgagtttcatgaagagaacctccaacaaatggtatataaaggaaaacaaagcaaacaaaagagggaaactttgcaatttattaactcaagcatgaaaatacagaaaataaagagggctcaacatacttggaaaaggaaaaaacatgaagaaaaaacatgatggcattgtttatgaaactaaagaagttctcaatccatctcccaaagtaacacattgttgcaaatcactgtggttaaaatacagttttcagaaggcatacatgacccaacttgtcagctcccagccagttccagccatgtcaaggaacccagatcataatctactttctcagcccaaggagcatagcattgttcagaagcatcaccaggaggaaataattcacaagttggccatgcagctgagacacattggggacaacattgatcataggatggttcgagaggatcttcaacaggatggcagagatgcactagatcattttgtcttctttttctttagaagagttcaggtgttgctgcattttttctggaacaaccatttgctgtaaaaggaaagtaaaggtcaagtggtcaagttctgttttctttttaccctctgagaaacatgaatcccactgggacagatgggaagaacacccttctccgtctccctctttttgtacccatcactgttggtctacacccagtttgttgaagaactgcgggttcacgagccatttgtctcttcggaggagctagctatgagatgtctgcgatcacatcacggtaaagcccaaggagtaattaggaccccaggaagccttgctgcccagaaaacaccagcgctgtggatggtcccagggctccttgtgaggaaaccttgaacatttccttccaggaatgaaagagaacctcgtcctcaaactaaaggccacagaaatgggcactacctcctggcccactccctgggcaccatgccctctggtgacctgttggctccactcttgtcactcatgtccagatctgcagtgccagcttctccttctcggtgacatgtcacctccctgccccaatcctggctccaaccctctctggaaaatcgaagtgaaacatttgtctctaatactcaaattcaacatatggctcatctcatctaccttcccatttccatgcctagaggccccactactaccactagcaccgttgggtgtttccttctcaggctctgattctacaacatttacgttcttttctcacctttgatcccctcactcctctgtgacccccttcaagtcttccttcaccactccagtgttttcccataccactcgaccctgctcgaaggtatctttccctgctctgtcatcctcttttaggcatgcctgcttaaaatcgggagtgcttagtccttggccaacagtcctgccttctagaagaatgtaagacctgaaagagttatgaatctatcactaggcaaaaacttctcttttcctattgctggatggttttgctattattggttggtgggccctttgcctgtggaatgtatttcactcattctctcctgcacgctgttaggcagttctttcacctgcatgcttcttcttttacctttttgtctacctcatagtccctctctcccctcctttaaaagaattataaatattaggaaagcttgttgttataaattaaaagtttacatatgtatcttgagttcttcataggggaagtgttattttaaaaaattctaaaaatgaaataaatattgttattttattgagcatgaaaaaaaaaaaaaaaa

SEQ ID NO: 1048 - DNA, 5418 bp, Homo sapiens
ctgccccgccccgtcccgttccgttcctctgccccaccccgtcccgttccgttccgctgcccagtcctgctggtactcactaggtagtagcggcaacggacgccatggggaccgcctcgtcgctcgtgagccccgcgggcggggaagtgatcgaggacacgtacggggcgggcggcggcgaggcctgcgagatcccggtggaggtgaagcccaaggcccgcctgctgcgcaactcgttccgccgaggcgcgggggcggcagcaggggccgggcccgggtcgctgccccgcggggtgggcgcgggcgggctgctgggggccagcttcaagtccactggctcgtcggtgccagagctggagtacgcggcggccgagtacgagcggctcaggaaggagtacgagatctttcgcgtcagcaagaaccaggagttgttgtccatgggccgccgcgaggccaagctggacacggagaacaagcggctgcgggccgaactgcaggcacttcaaaaaacgtatcagaagatacttcgagaaaaagaaagtgctttagaagcgaaataccaagcaatggagagagcagcaacatttgaacatgacagagataaagttaaaaggcaattcaagatttttagggagaccaaagaaaatgaaattcaggacttactgagggccaagagggagttggagagcaaacttcagaggctacaggctcagggtatccaagtatttgatcctggggagtctgattcagatgacaactgtacagatgtcactgctgctggaacccaatgtgaatattggactggcggagccttgggaagtgaaccttccataggaagcatgatccagcttcagcagtccttcagaggccctgagtttgcccatagttctatagatgtggaaggaccctttgcaaatgttaatagagatgactgggatattgctgtagctagtttattacaagttactcctctgttttcacattctctgtggagtaacactgtcagatgttacctcatttatacagatgaaacccagcctgagatggatcttttccttaaggactattcacctaaacttaagagaatgtgcgagacaatgggatattttttccatgctgtttattttccaatagatgttgaaaatcaatacctcactgtaagaaaatgggaaattgagaaaagttctttagttattttatttattcacttaacattaccaagccttttattggaagactgtgaagaagcttttctgaaaaaccctgaaggaaaacctcgattaatctttcatcgtttggaagatggaaaagtcagttctgactctgtccagcaattgattgatcaagtttctaatctaaacaagaccagcaaagccaagatcattgatcactcaggagatcctgcagaaggagtatataaaacttatatttgtgtagaaaagattattaaacaggacatactgggttttgagaacacagacttggagactaaggatttgggcagtgaggattccattccagaagaagatgattttggtgatgttctgtgggacatacatgatgaacaagagcaaatggaaacttttcagcaggcttctaattcagcccatgagttgggatttgagaaatattaccaacgccttaatgatctagtggcagcaccagccccgattccacctcttctcgtgtctggaggaccaggttctgggaagtctcttcttttatcaaagtggattcaattacaacagaagaattcccccaacacactgattctttcccattttgtgggaaggcccatgtcaaccagctcagagtcctccttgattattaaacgactaactctaaagttgatgcagcactcttggtcagtctctgctctgacactggatcctgctaagcttctggaagaatttccacgttggctggaaaaactctctgctcgtcatcaaggcagcatcatcatcgttattgattctatagatcaagttcagcaagttgaaaaacacatgaaatggctgatagatccactgccagtgaatgtaagagtaattgtttctgtgaatgtagaaacatgccctccagcatggaggttgtggcctacacttcatcttgatcccttaagtccaaaagatgcaaaatctattataattgcagaatgccactctgtagacattaaattgagtaaagagcaggagaagaagctagaacgacactgtcgttctgctacaacctgcaatgccctttatgtcacccttttcggcaaaatgatcgcgcgtgctgggagagcaggcaatttagataaaatccttcatcagtgtttccagtgtcaagatactctttcattatatagacttgttctgcactctatccgggagtccatggcaaatgatgtggataaagagctaatgaagcagatcctctgccttgtcaatgttagtcacaatggtgtgagtgaatcagaactgatggaactctatcctgagatgtcctggactttcttgacctcccttattcacagtttatacaaaatgtgtttgttgacttatggatgtggcttgcttaggtttcaacatctgcaggcttgggaaacagtgagattggagtacctggaaggccccactgttacttcttcatacaggcaaaagctaatcaactatttcaccttgcagctaagtcaggacagagtgacttggagaagtgcagatgaactcccgtggctttttcagcagcagggaagtaaacagaagctgcatgattgccttcttaatctctttgtgtctcaaaacctttataaaaggggacactttgctgagttgctgagttattggcagtttgttggcaaagacaaaagtgcaatggcaacagaatacttcgattcattgaagcagtatgagaaaaactgcgaaggcgaggacaacatgagttgcttagctgatctttatgaaaccttggggcgatttctcaaggatctaggccttctcagtcaggccatagtacctttgcagaggtctttagagattcgagaaacagctttagatcccgatcacccaagagtagcccagtccctccaccaactagcaagtgtatacgtgcagtggaagaagtttggcaatgcagaacaactgtataaacaggcgttggaaatctcagaaaatgcttatggtgcggaccatccatatactgctcgtgaacttgaagcacttgcaactttgtaccagaaacaaaataaatatgaacaagctgaacattttaggaaaaaatcctttaaaattcatcagaaagctataaagaaaaaaggcaacttgtacggatttgcccttttacgtagacgggctttacagttagaagagcttacattaggtaaggacacacctgataatgctcggaccctcaatgaactgggtgttctctactatcttcaaaataacctggaaacagctgaccagtttctgaagcgttccttagaaatgagggagcgagttctaggaccagatcaccctgactgtgctcagtctttgaataatctggcagctctatgcaatgaaaagaaacagtatgataaagcagaagaactttatgaaagagctttagatattcggagacgtgcattagctcctgatcacccttctttggcatatacggtgaagcatcttgccatcttgtataagaaaatggggaaacttgacaaagctgtacctttgtatgaattggctgttgaaattcgacagaaatcttttggcccaaagcaccctagtgtagctactgccttggtgaacttagctgttctttatagccaaatgaaaaaacacgttgaagctttgccattatatgaaagagcattaaagatttatgaagatagcctgggtcggatgcatcctcgagttggagaaacactgaaaaatttagctgtgcttagctatgaaggaggagattttgaaaaagctgctgaattatacaaaagggcaatggaaataaaagaagcagaaacatcactcttgggtggaaaagctccttcacgccattcatcaagtggagacacgtttagcttaaaaacagctcattctcctaatgttttccttcagcaaggacaaaggtaatagcagcagttagaattctttgcaaatgtaccttaagacaaaataattaaacatttggaacatttgaatttgaaactttaaaaaaatgttgtacgaaattttactacgtgtgatttaactgctatttgtatgaagttgtattggattacattaagttggaattgtgattatgtctgttttagttgtttaaaagaattttcctattatatggtatccaaggatgtagacacattagaattataagaagacatgaggagcaaatcatgaagagcggattggtctttgttcaacaagagctggcagagtagttaagacaaggagttcaaaaattccatgaatcttggccaggcatggtggctcatgcctgtaatcccaccactttgggagggtgatgcaggaggatcacttgaggccaggagttggagaccagcctggccaacatggtgaaaccctgtctctactaaaaatacaaaaaaaaattagctggacctggtggcgcatgcctgtaatcctagctactcaggaggctgaggcatgagaatcgcttgaactcagcaagtggaggttgctatgagctgagattgtgccagttcattccaccctgggcaacagggtgagactctgtctcaaaaaaaaaaaaaaaaaaaaaaagaattccatgattcttttgagctctcaagagctactttagccttgccattcctcttgcttttcagcagtagtctggcccaattctctacctcaaaggaaagtttcaaggattaaagggttaatgtttatgaacgattcaaattgtcttcagtgaaacacattagtcacaagaatccctgattgctgcactttaaaaaattctttaccttttccttgagcagattggtccagtccctctgctttctgttctgtctacattgtgtattatttattactatatagtatatgtatctgcataatgtctgaagtcattaatgcagtaacaggtcaagctctttagcattctttgacttttcccaaaatatagatatgacattctcctttatcttccttcttagatggcctaaatctgtctcttcatttacctcaaactcaaattagtatgccattttcatactgaaaattaaatatttttatggattttataaatattgcaacattttagatattgttttggaccatttgtgtatttatatataataaaatcatcaatttaatacttgtaagatcctaacatgtattgattgtaaaagtgaaatatgtaatagccacacttcactgttttaaaataaaagtgcaatttcaagttcaaaaaaaaaaaaaaaaaaaa

SEQ ID NO: 1049 - DNA, 12793 bp, Homo sapiens
tctctctctctctcactcactcactctctctctccctctccctctcctctccttcctcctccgcctcctcagctcttgggctagaatatctatgggtcgaaacgtgatgcgatgaattcgagagagagcgaaactaggacgaggagtgcggcggaagcggcgggactcccgggcatgggggcttcaccacaatagaggcagcgcccccacccgcccccgccagcccctccggagcgaagcccccaaaccccctcgggaaaaggatggcggcagcacctacccagatcgaagccgagctgtattacctgatcgctaggttcttgcagtctggaccctgcaacaaatccgctcaggtgctagtgcaggagctcgaggagcatcagctgattccgcgccgcttagattgggaggggaaagagcaccgaagaagcttcgaggatctggtggcagcaaatgcacacattcctccagactacctccttaaaatttgtgagagaattggtcctttactagataaagagatccctcagagtgttcctggggtacagacattattaggtgttggtcggcagtctctgctacgggatgccaaagactgtaagagtacactatggaatgggtctgcttttgcggctctgcatagaggcagacctccagaactacctgtaaattatgtgaaacctccaaatgtggtgaatatcacctctgccaggcaattaaccggctgtagtcgctttggtcatattttcccttcatctgcttaccagcacattaagatgcataagagaattctggggcacttgtcatctgtctactgtgtagcatttgaccgaagcgggagaagaatttttacaggttcagatgactgtttagtaaaaatttgggctacagatgatggacgccttcttgctacacttcgtggacactctgctgaaatttctgacatggctgttaactatgaaaacactcttattgctgcaggcagctgtgataaggtagtaagagtatggtgtcttcgaacttgtgcacccgttgcagtccttcagggccattcagcttctattacttccatacagttttgtccatcaactaaaggcacaaacagatacctcacttctactggtgctgatggaacaatctgtttctggcaatggcatgtaaaaacaatgaagtttagagatcgcccggtgaaatttactgagagatccagacctggagtccagatatcttgttcatctttcagttctggtggtatgttcattacaactggtagtactgaccatgtgattagaatatattatttgggttctgaggttcctgagaaaattgctgaattagagtcacatacggataaagttgttgctgttcagttctgtaacaatggagacagtttaagatttgttagtggaagtcgagatggaacggcaagaatttggcagtatcagcaacaagaatggaagagtatagtgctagacatggctactaaaatgactggcaataatttgccatctggagaagacaagatcactaaacttaaggtgactatggtggcctgggatcgctatgataccacagttattactgcagtgaacaattttcttttgaaagtgtggaattctatcacaggacagcttcttcatacattatctggacatgatgatgaagtattcgttctagaagcccatccatttgatcaaaggatcatactttcagcaggtcatgatgggaacatttttatttgggaccttgaccgggggaccaaaattcggaattactttaacatgattgaaggccaaggccatggtgcggtgtttgattgtaaattttcaccagatggaaaccattttgcctgcacagattctcatggacatttgctgctttttggttttggatgcagtaaatactacgaaaagattccagatcagatgttcttccacacggattatcgtcctcttattcgtgatgccaataactatgtattggatgaacaaacccaacaagctcctcacctcatgcctcctccatttttggtggatgttgatggaaatcctcatcccacaaaattccaacggttggtaccaggacgggaaaattgtaaagatgaacagcttataccacagctgggatatgtggctaatggtgatggtgaggtagtagaacaggtaattgggcagcaaaccaatgaccaagatgagagcattcttgatggaataatcagggagctgcagagagaacaagacctgagactaattaatgaaggagatgttccacatttaccagttaatagagcatactctgttaatggtgctctgagaagtccaaacatggacatatcttcttccccaaacatcaggcttcgaagacatagtagtcaaattgaaggtgttagacaaatgcataacaatgctcctcggagccagatggccactgaaagagatctcatggcgtggagcagaagagtggtggtcaatgaactaaataatggggttagtagggtacaggaagaatgtcgaactgcaaaaggtgacatagaaatcagtctttatacagttgaaaagaagaaaaagccatcttacactactcaaaggaatgattatgagcctagctgtgggcgttctttacgcaggacacagcgcaaacgtcagcatacttaccaaacacggtccaacatagagcataattcacaggcatcatgtcaaaattcaggtgtacaggaagactcagacagttcttcagaggaagatgaaactgttggcacaagtgacgcttcggtagaggatcctgttgttgaatggcaaagtgaaagttcttccagtgactcatcaagtgaatattctgattggacagcagatgctggaataaatttacaacccccaaaaagacaaaccagacagacaacacgtaaaatatgcagcagctctgatgaggaaaatttgaagtccctagaagaaaggcagaagaaacctaagcagactagaaagaagaaaggaggactggtttctatagcaggtgagcctaatgaagaatggtttgcccctcagtggatcttggatactataccccgacgttccccatttgtcccacaaatgggagatgagcttatctattttaggcaaggacatgaagcttatgttcgggctgtaaggaaatcgaaaatatacagtgttaatttacaaaaacagccatggaacaaaatggatctcagggagcaagagtttgttaagattgtaggaatcaaatatgaggttggcccacccacactgtgctgcttgaagcttgcatttctggacccaatttcaggcaaaatgactggagaatctttttccattaagtatcatgacatgccggatgtcattgacttccttgtgctacatcagttttataatgaagccaaagaaaggaactggcagattggtgatagattccgcagtataatagatgacgcctggtggtttgggactgtggagagtcagcagccttttcaaccagagtatcctgatagttctttccagtgttacagtgttcactgggacaataatgagagagaaaagatgagcccatgggatatggagccaattccagaaggaactgcctttccagatgaagttggtgctggtgttcctgtctcccaggaagaattgactgctttgctatacaaaccccaggaaggagagtggggggctcattccagagacgaagaatgtgaacgggttattcagggcatcaaccaccttctttccctggattttgccagcccttttgctgttccagtggatctcagtgcctaccccttgtattgtactgtagttgcttatccaactgacctcaataccatcaggcggagacttgaaaatcgcttttacaggagaatatcagcattaatgtgggaggtacgctatattgaacataatgccaggactttcaatgagccagacagtcctatagttaaagcagctaaaattgtaactgatgtcttacttcgatttattggggatcagagctgtactgatatactggatacttataataaaattaaagcagaagaacgaaacagtactgatgcagaggaggatacagaaattgttgatttagattcagacggtcctggtacttcatctggaagaagggtcaaatgccgaggcagaagacagtctttaaagtgtaatcctgatgcttggaaaaaacaatgcaaggaactattgagcctcatttatgaacgtgaagactcggagccatttcgacagccagctgatcttctttcttacccaggtcatcaggagcaagagggagaatcctcagagtctgttgttccagaaagacaacaagattcatctctttctgaggattatcaagatgttatagatactcctgtggacttcagcactgtgaaagaaactttggaagcaggaaactatggtagtcctctggaattttataaggatgttcgccaaatattcaacaactccaaagcttatacctctaataaaaagtcaaggatctatagcatgatgctgcgattatctgccttatttgaaagtcatatcaaaaatatcatctctgaatataagtcagcaatccagagtcagaagaggagaaggccacggtacagaaaacgtctaagaagcagcagcagttcattatctagtagtggagcacctagtccaaaagggaagcagaaacaaatgaagttgcagcctaaaaatgaccagaatacctcagtatctcatgccaggactagctctcctttctcatctcctgtttcagatgctgctgaagggctttcactatatctacttgatgatgagccagatgggccattttcttcatcgagcttcggtggatatagccgaagtggaaatagccatgacccagggaaagccaaatcatttcggaatagagttttgccagttaaacaagatcactcccttgatggaccccttacaaatggtgatggcagagagccccggacaggaatcaagagaaaactacttagtgcatcagaagaagatgaaaacatgggaggagaagataaagagaaaaaagaaacaaaagagaaatctcatttatccacctcagagagtggagagttaggatccagtttaagttctgaaagtacctgtggttctgactctgactctgaatcaacttccagaacagatcaagattacgtagatggagaccatgattatagcaaattcatacaaaccagacctaaaagaaaactcagaaagcaacatggcaatggaaaaagaaattggaagaccagaggcacaggaggaagaggcagatggggaagatggggtagatggagtagaggaggcagaggaagaggaggcaggggacgagggagtcgaggaagaggtggaggtggcactagggggaggggaagagggagaggaggaagaggtgcttctagaggagctaccagagccaaacgagcacgtattgcagatgatgaatttgataccatgttttcaggacgtttcagtagactgcctcgaattaaaacaagaaaccaaggcaggaggactgttttatataatgatgattctgataatgacaattttgtgtccactgaggatcctctgaatcttggtacatccagatcaggcagagtgcgtaaaatgacagaaaaagccagggttagccatctcatgggatggaattattaacagttaataaatttagaataacttaaaaaattcaatggccttctactgcagggaatttaccaggaaatctacaaagcaagttgtgtggggacttctgcttcctttcacattggtgcttttccatttatgccagtatacatttgtttcaagacttttgatctccacacttcatttgttcaaataagccttactcattaggccttaaattaaaagaaattctgcccacacacacacaaacacatacacacacatacacacacacagacacacacacacgaaacacaacacagacactacagatttactacattaaaggagcattcagcttcttaagagtagcatgacatttttatctcaatagaatagccctcttttgcttttgtatcacagaagtatagcaccttcttacagagttttatatagtttgtttttgccattttgattcctatacccagtaataataacttttgcacaatacaccaatcctaaaggcagctattaaatgtttacagtttctatattgtaagagcgatctggattattttactcttcccaggccaaactttcatgacttgtactgaactgaagtatatatttatactacagttttttggggggtggggggatcttgatatgcttttcattgatttgcataattcacgttaaaggtgagaaagggttggtgccttgtaaatatgtagcagatcttcgtggtgtgttctgatgtgtgcattaactttattaaaaaagaatacttgaggtatcaatctagacaaggtgccaaatgcaaaagtttcccgcatcaatttttttcctatcacattttattgcattaatagaatttgtgtagcttaaataacttaaacatttgaaaaatcctcatccacaaagaacaacttctttgaacagtagctcagctacctcttaactacaactactggaaacattaaggaaaatagatgctgttattccttactgactaaggagaaatagaacaagcttagtaggaatgaataccccataagttataagctgagaggttgttaataattgtattggctctcaaattaataattgtaattaacaaagtttcataaatatagtatgctctaccaccttaggctttcttagaacatatttgtgtaagtagacttgggctactgcttatatatttctgctccacttaccatttaacagctgtgagttgctggttttcatttgaatcttaaaatttaacaaagcacctggtttgatttggaatgttttggctagctagtattatgaatcaacttatagattctgctcatatcattccaaagggttcttctgttctagtctttcaggaaagaaccttattgcactgcacactcatgttgtgaatcattattttatagataaaaaacatctttaaaaacccttattgtcttgtttacagcagtagagtgcacatggttccataagtgagcttgagttccaaggtcagttttactccccaaatttaatattacagatttgttcatttgttagatacttacatttctgaggtaagagggataatagcaatttctgtttctgtaacagcaaatttgttgcacttagatcaggctcatgggataaaacagacttcttagtatatacctagctatcccaggatatttcttaagctaatgtgtttgtctcatgctttcaatcatttcatgcatctgaaaacccttaagtgcagaggaaggcgtacacacataaaactttgcttttttggtagggtcggcagtagggttattcttggactaacatctttaagcagttttcacttgcagtggaaatgatgttcaggctttaagagaaagtattgtgaattgttaatggcactaacttctgttactagacagcagaccaagctatttttttgttgtagtctttttttcactaaaccaaaactacttctggttgtaactcagctgccactttaaaccatagtagagattcaaaacgttcctatttgaaactacatttgatttttgctaaaatgtgctgtttcggttatttatctcttgggcatttagactaaattgtgcctgtattcctgaaatcaataatactttggcttatcctgatctaagtaacatagttacttaaattcctggatatacccaaatatggatcacatgtatcattttagtttgaaattttttgttgacattcttctatgaagagctgacctcttgaaatgtagaagaattgacatttgtgtgattttggctatctggagctttatttataatttattttgaaaaataaaaatgccacatttatttcccaaatgtcaagattttctagaattagataattagaataataaggctgaagacattttaaagcatattttatatgtagtgaaatactgtgaaaatattagtgaacagcattttgctgtaatgtttatttcagttattaagatttaaagagttagtcatcagggtatgttagataaacatagttatcatttattaaacaaacagataattttctgtttgcatgcaaattattttaataagtgtgaaaataaaagtttggaagatagtatttttacttttatatctggacttttttttcccccaatttacactttgctttcttgtaataccacctcctgtgaatgtgttgtaattagtatcacattgattactttatcattttaatttctttgaggccctttaaacctacgtaaaatctgggtccagccatagcaaagcaagtacaaaatgaacaaagaattttgaagaaaagcctaaatcttaaattgctaagaaaaaacactgttatatttaggcccgtgagagcatatacatgtataaacctaatcctatgctagatatgaatagtcagtgagctgtaatatttctcataaatgctaataatgtttaaattcccagctttaagatcttagtgtgtgtatatatttataaaatctgaattgtgtgtttcttctatggcttactgtgtgtttctctttcagcaataggatgctctctaaaacattcactagcctactagcctacttactaaatttttgtatatgtgtgtttgtgcacttgtatgtgtgtaaagttttttccccaacttgacacaccttatctcagacattcaaaaaaagagaacattttgtatggaggacagtctgccaactttttgcctctctacagctcttagcctgtatatttactgcttgatcattcattatgccttctagataaccagtccaggttttgtcatatacctgtgtccctctattctttttatttccctttttaattttttttcttttttttccctccccagaaatcaggcttgtgttggaattcttctctataatactttgtttcccgcagatgcaaagtaacaaagtaactgagtaaaattagaaatctcattctgcacaactgtgcgctcagatatttaactcagccttctaatacttttaagtacgtttctgttatttatctttttgttgtttttgttttaatcccatagattgtcatcagacaataatagagtgattgagagagaaagatataaatgccacttctaactttttgataaaacttttttgagcatttttcaaaaatttgtatgtttgtggtaatggggaattaaacaccttttacagctgatgtatgttggaaatcattttatgtacatttaccaactggtacttatcttcaagttggaattttcacatccataaaagggagacttgcatcatatataattttcagtatactttgctgtccagccttttaaacaattacagtaacattttgagttctgtgatgaatagttctaggggaagggatggaactttcgacatgtaaagtccattgttttaaatgctaaccccatccccaatatttttgtggaacgtgaggctttatgaaaggtttatcagaaatagaatattctaaagtcacttttatggcttatttcaaaaactagtgtgaaagtattttcatgcttttttgtttctcatcttttagcaaagcttctttaccaagttttgattaaattgcaatataaaattaagttttttcacggtgctatattttgtggaatatgggtagcactcaggtttctttcttttttcttttctccttccttcttccttcattccttcattcctccctcccccctccctccctccctctcttccttccctccttccttccttcctcacctcggcctcccaaagtgctgggattacaggcatgagccaccgtgcccggcctatatacccttattcttgattatttcttttttcatcttttcaatcctgcttacttttatcctcacttttctttctgccatgaaaactgcacctaatttaccacacttaagattggcaatttttgattcattgatgggagaagtacagtagaaaggccctgcagtttagaattaagttgtgtttgtttatttacatgtatgcccatttcttctaaattaaatctagaatgtgagactttgacatataaaagcatgataagtattttcttaaaaaataagactattgatacataatgaaaccaccattggtaattgaattttaaaatgatatgcaaaaatatttagaaatccagttgggaaatgtgtttttgcatatgtcaccagatacacattaggcagtactacaaatgttaattcttaaacaatactgtggtgatggcaatcagtaatttatttctttgtcctgtaacttatcattcttgtcttttgtaatgtcttacacagtattaacataactgtaccttttttttgttcttggtatccatacattttaagatggaaaatcagttcatagttgatatgatattgtatatgggcaaaatgtccgttaaactaaaattcagtaaaaaaggtaatataaactggcttgatttataaaagatgttttgtttggcagttatcagtcattataagcaattatcttcaaagacaaaaaaactggactaatttgttgccattctttatgggatgtttacaataaaattccaagttgtttggaatcaattgcactcttgctgctttatgccttaatttatgtaccagagaaaaattaaccagaagaaagaaatatggagttacctattcagctttagagattgtaacatgtaactcttaggtctttcttgtttctttgtcatagaatattttattactattactttttaatctgagaaactaggatgcttcttcctatcaaagaaaaggttttgttttttgttttcatcttagacattgcaaatattctttgggtcacttttaggataataaatatgatgtttacactttaaatgtgggctgcttggtgcattcaataacagcctgcaaagcatttgtcaacattttgttttgcagagcttttcaaaatgaatagatctctaacatatttatgacttacaacttttaacagctgagttatatgtacctgacattttaaaatgtatagtaagattacctacattgtaaatggtgctttaattcagtgtaagtgtaggagagagagaagtgaggtgagatgatctgaatgctctaacaggaacattcataactatatagttacccagaatttgtctcccagtggcaaacattccactaggttcaagataaataagctggccaaagactggactgtatctttgatatatatatactgtgtattttgtgtatttagaataaaaaaaatgcatttaggaaaaaagtagactgattttttacaatattcagagattgaagtggagataagttgtttggtatttttgtttagttgcttaattggttagagatagccctctttaaggatataaaaatcttacattaaaaatttttggttaaggccaggcacagtgactcacgtttataatctcagcattttgggaagccatggtgggaggattatttgagcccaggagttcaagaccagcctgggcagcatagtgagacaccgtatctacaaaacaattttttttttaattagctgggcatggttgtgtgtgcctgtaagtcccaggtacttgggagacaggtgggaggatcactcgagcctgggaggtcaaggctgcagtgagctgtgatcatgccactgcactccagcctggggatccattttttttccaagttgagaaggtcaagaaaaaggtgctctccatcctctctcaattatatgttcttgacaatttaaagctactttaccaaaatgtgcaaaataaaaccaatatattgagcctgtgagttgatcttttgaatgagatttttggtgggatagttaagcctatacgcttacagttgctttctcaggtcatttatataaatacttaagggctttttaatgctacaaaacacaggtagatcaaacaataatattaaatgaagtaaactttttacggtatcgatttttcccccaaagttctagggaaacattttcctttcctttctatgtaactttaatagatttttctttgccatctgtgacaattgccttaatgaagttcttatctacagattataaacatctaattataattataaaatcttataattttaattattctagacatctagttttaacagttattaattaacaaattgatatttaatttgatgttggagacctaaaagtctttctgaatctagtattaattttgaattgccaccttgcctggtcagcatctttgcagttctcttcaattttataagttttgtaagtaaatatatgaagaaataaaaacattttaaattctttaatttaggtgactaatattaattgatggagcttattcatttttaaggatttttgtggttgatttttgtcatgttgcaattctagttagaatttgtataacaacatgttaatttgtattggcaattttgtatagtctgttaagtaatttaagtcaaggaaactgctaacgtgttccctcctcccttggcttttaaaaaaaagcttacaatatgtttaaatgaaatttgcataacaaattgtgtaatagatcatttgaaaagtactgttttgttacccttgagtattattcatctaaaatattaataatgaagtgctggtagttctg

SEQ ID NO: 1050 - DNA, 2413 bp, Homo sapiens
gcgtccgcggcggtgatggcggtgcgtgaacgcgcggcggcagcaatggccgctctggagcggcgggtgccgagtctcgatgacttcgcgggacagagctggagctcgtgggtggagcgggccgacctgcccgcggctgacggggctgagctggaggagagtagcaaaaacacgaagaagttggatgccatgaccctcattaaagaagacatgtccatcttcgggcactgccctgcccatgatgacttctacttggttgtgtgtaaccactgcagccaagtggtgaagcctcaagctttccagaagcactgcgaaagaagacatgggcccctcagcaagctttatggccgggccccacccccacctccagcccctgccagctctcagaaatgccatgtagtgaatgggcagggcccagcttgtagggccccaggttccacgaaaacctcctccagggagaagggccaggggtcccggagccgtggccaccagcctcctgagaagacccagaaggacaacctctgccagccagggggcctcaccaaggactcccctggaaaacctcccatggctcccccttctaaagaacctcctggcagagagaacatcgagatcatccccagtgaggggtccagtcactgggctgaaggcagccctcctgaaaaggagcccagtgggaccaggctgccccctaaaacccaccggaagatggctcggaaggagtgcgacctcaacaggcagtgtggggtaataaatccagagaccaaaaagatctgtacccgcctgttgacctgcaagatccactcagtacaccagcgccgggaagtccagggccgggccaaggactttgacgtgctggtggcagagctgaaggccaactcccgcaaaggggagtctcccaaggagaagagcccagggcgcaaggagcaagttctcgagcgcccctcccaggagctcccctcctcagtccaggttgtagcagcggtggctgctcccagcagcaccttctctgttcgtgccaagcagacctacccatactgtgcactgcccaggtcccgggcctcctccgagagtgaattggatgatgaaggcccctgtggtggtgatggggacccaggcctgttccccttccccatgccccggggtgggacccaggcctccagcgaagagagtgaggaggaggggacatctgacgacctccacccaccccctgactgccattatgcaacccggcccccacggccacaggcgttctgcacctttgggagccggctggtgagcccaggatgctatgtgtttagccgccggctggaccggttctgctcagcactcagctccatgctggaacggcacctcagcacacacatgtggaagaagatcccaccggcagctgaacctccagctcaccttgtcaactccccgttatctgctcccctgagcccatcctctacaggcacctgcccccgccttccaggtccaaccctgagacctgcctgcccagcctccatgccccccaccaaggacaaccttgtccccagctaccctgcaggctcccccagcgtggcggctgcctgtagccaggcagagtgcatgggcgggagccaggctatcacctcaccactgcctgccaacacgccatccccgtccttcagcaagctgccgccttccaaggccagcaagtcatccaaaggcaaggacggggtggaggtggaggccccttctcgaaagcggaagttatcccctggccctaccactcttaaacggacctgcatcctggagcccactggaaaagggaaaccctctggctgtaggggcctctcggccaaaactaaaacagccctgagcatggggcttaatgggacaatggggccaagagtgaagcgggcagggcccctggactgtcgtggctcccctcatcagctccccacaccagtcaaggcttctcagctggagaaccggggagcagctggacacccagccaaggccctgccaaccaactgcctctctgaggaggaggtggccaagaagcggaaaaacctggccacttattgccggccagtgaaggccaagcactgtcaggctggtgcccctgctgatgtggcctgctctgtgcgccgcaagaagccaggcccggccctggcctttgaggagaagtgctctacactgaagtcaaaagcccattaacgagaaagtgcctgcccactgcaacggagccgccagcacctcctcccctccagatccgggccccaggctgctgccgctttttataactttatattatttttttttaagaaaaaaagctctttaaaatacctcaagactgtctccctgttctgttgctgctatgaaaatataaaaacagaaacatagaaaaggaaggaaaaaaaaaaaaaaaaaaaaaaaaaaaaaaaaa

SEQ ID NO: 1051 - DNA, 10316 bp, Homo sapiens
cgccatggcggcgccgggttgcggaccctgagcgccggcgcggggcgcgcaccatgaactcgtgggacgcgggcctggcggggctactggtgggcacgatgggcgtctcgctgctgtccaacgcgctggtgctgctctgcctgctgcacagcgcggacatccgccgccaggcgccggcgctcttcaccctgaacctcacgtgcgggaacctgctgtgcaccgtggtcaacatgccgctcacgctggccggcgtcgtggcgcagcggcagccggcgggcgaccgcctgtgccgcctggctgccttcctcgacaccttcctggctgccaactccatgctcagcatggccgcgctcagcatcgaccgctgggtggccgtggtcttcccgctgagctaccgggccaagatgcgcctccgcgacgcggcgctcatggtggcctacacgtggctgcacgcgctcaccttcccagccgccgcgctcgccctgtcctggctcggcttccaccagctgtacgcctcgtgcacgctgtgcagccggcggccagacgagcgcctgcgcttcgccgtcttcactggcgccttccacgctctcagcttcctgctctccttcgtcgtgctctgctgcacgtacctcaaggtgctcaaggtggcccgcttccattgcaagcgcatcgacgtgatcaccatgcagacgctggtgctgctggtggacctgcaccccagtgtgcgggaacgctgtctggaggagcagaagcggaggcgacagcgagccaccaagaagatcagcaccttcatagggaccttccttgtgtgcttcgcgccctatgtgatcaccaggctagtggagctcttctccacggtgcccatcggctcccactggggggtgctgtccaagtgcttggcgtacagcaaggccgcatccgacccctttgtgtactccttactgcgacaccagtaccgcaaaagctgcaaggagattctgaacaggctcctgcacagacgctccatccactcctctggcctcacaggcgactctcacagccagaacattctgccggtgtctgagtgaaggaccgcgctcctgctgaagagtttagaatgaggcagcggtgagaagaagggtgggagggcgtgggggcccctgggtggacaccaccagccaccagtccctggcatgcccagtgatcctggttccctggcttgtaggggctccagagcctgcttcctggttcctcaagggcagatattggacactccttatttgtcaccaaaggatgactgtaggccgtgtgctggcctttctttctaagaagctgctttgagctcctggactcacctgaggctccctgggggatgacactcagttctgtcactgtcaaggatgcagagagctggtggtaggtgggaagcatggtgtccacctgcctgctgaccactggacgctgctccatgctgaagaaaagtgacagtctccaggggacatttcagccatgctgaaagggaggctggcagtggtcatttggcccggatctaacatggcacctcgtctccacagggtagtggtggctgcttcaacccaaatattattcagctggtactaacgacattgtgcccagctgggactcttgggctctgtgcctgagggaaaatgtttcacaactagtggctgcccaattgctgctgaccagttgtcttagaaatggtcaattggattcaactttagtcctctccttccccctaaaagcgaatgtttgtgtgtgcagacaatcttagcatgaaaatggtttaaataggctggtcctacatgtattaggttctttcaagtttgactgggaggtcacctttttctgatttacaagtcctaattgttggagctcagtaaaggtaggaggaaggtggctggttggtcctcccttccccctgtttgtgacctgaatttacaggaagtgtttcaacttgtcttatgcatcttatctggcatgtcctgggagatggatgggcaagaactggcctgagcagggatttttgccttgattttaagtcactgggttccattgtcctggcacctccatttccttagtttctgtaagcctgttaacagaaagtagaggctattcaaggttatcaagaaagtgccctgtgctaatgatgagacagtgaattttttttttttttcgagatgggagtttcactcttattgcccaggctagagtgcaatggtgcgatctaggctcaccacaacctctgccttccaggttcaagtgattagagacagtgaaatttttatggaatactgcacctataaaacacatgccaatctgttagcagtcctgacttgatttaataaaaaccaaggagagccacccctgctttctggccatctcttctttgtctaccatttcaaattgacttgtgaatactcagagcagttatttttcaatcctccactctaagtgattcctccagggtgggaagcacggggagcaatggaatcagatggctcattctctccttccagctctttacatcctaactttggaggtatagaaggaaggatgtggtccaacgggaaggaagtgaagagtctattggtttttacttctaggcagtcccaatttttaaaggcagagaagtatctgcatctttatttgaaaagacgtcttattaactcttagctcctcagttagaaaacaattcacctggcttagtcttgtctagtttcaaagttaccatggagactagaatggagacaggtgtagcttccaaggaggccttggcatcttgcagttgctgtcagagatgggctcatatctgcttggggaagccaatggggcacaatccttcccaatttcatgatctggggcatcatgtcggtagctgaagtcagccacggtgggagtgtttataccatgaaaatcagcaagtgctgtaaatcaggccttttgccccacagagagctgattgtgaaacatctactagcacaccactgccagacatgactgtgtgtgtccctgaaacaaaattgctctggctcagagctcctttggccactcatattacaatagcaacagacatttgcttcctggtggcaagtaactgtgcaccctccaacatcccaaccccagaggaaccagtgggattgaaaaccagcagaagccaagacaggatgcacagctgaattggaggagagtagctcccttctcacacaaacgctttcaaagttgggcaaaagtggcccagtgcgtgaggtcagtcaacagccaaattccagcagcaaaatacattttcatcaatatcactttgggagaataactgtggcacatgctctttctgctttctctgtactgtataggcaacatgttgtactcccagtagcaactagatctcttttacctcttctttagccaagaagcaagatctgtcacccacaacaccacatatcttgaaaagatgcttttcataattttcactatacctctaaaaccaattgtaccgacatcacgtagacaaaaactccagataaatccattgattgggtattttcattattatttggacacatgaattaaatcccaagggaaagtgagaagaaaattaatgtattagcaaccagtgttagccaactctgctgtaattacctttagataaatgtttattttcatctctatacagtctatcaaatttgccccctggctttattactcccaattgaattatctacctcattttgttaatttaatttatcaaaggtaacattgttttctcaggtataacacatagaaacaccaagattttcagcatctgaatcaaactaaaattacttgcttgacttcactccagggtgagacttgacctttaaggcccaaactctggtgaactgttggactgggtagaaatctttcaagaagcttgaaaataaggccataaaggaggggctttcaaattcctaaatccacatatagggctgagttcctagtcctacacaatcagaatttgcctttttaagtcacgctgcaactattccggctttttatatggcacctttctgagggaggggattttacagccgagggacctccaaagggaacgtccatttgcatgtgtgccctggtatttagggtttgtctcatggtcagctcgcctctcaaagatggctcaccaatcacctgcctgtttttacttagaaagcaggcttgggcaggaggggaaatggatttgaaccatctcagaccaactctatctcttctagcactcagctcagcctcctgtccccatgagcaataaaactctctccttatgtctgtgaaattcgttttctttttcatggtgcctttctttctaagaaaagatagaaagaatggggccaggttcatgtcccagttgtcacccttttacatgcttgggtgcaggtagatgaggccttcccatggctacagtgtgacccttggaggaaccaaaggctgtgcattgttagaatttagcccagatgcaggataaactagcttgcctgagtttaatgaggatattatatcaggtgccaggaatcccttgggtcagctcctatcctctggacggggagcatcatgggaaaaagaggtccgagtcatatttagggcttcatgtgtctggaagggagccattagctcttaaattattcacagaagtcaccacggaaggttgtttaagatgcagattccagcatcccctcctcagagatcaatttcagcagggccaggcaggacctgggtttccgcacttttaatcatcgatgcccaggtaactgataggagttttcttcaaaccatcccctaaggagaaatgatcttagacacttggataaactctatagaaaattgagtgtttctattaataactatctaggtttcaattgtcttgtatctttccctaattctccaaacagttcaatctccagctttattcaatggctgggccattttgttcttggagggacaaaattgacctctccatgaaattgcaaaaacccatcttcattcctttttatggggctccaggtcataaggatgagatatatttggggtactggcagaggatggcagagctggctggctctgagccaggaagccttgttagaggaaggaactctggcattcagaggtgtccccttgggggcacttgcttgggtcttggatcaaactctactggggcagcctggctgtgggaggtgatgacatctgccacctctgccactacccagagcttgtcctgccctcttcccagccagcctcacacacaggagctgagccaggctgaggcaaggtcagcgagagacagttctccatgccagtatctgggtgtgggtctcttgttggctcccagctcatcccgtgtggctgacccttccaggtcacttggagcagccagtaatgacagtgtcctaacagctggtgggtatggaggaaagactagacatcaggctatggactcacatggagggccctggtgttggctctgggacctgggctgggccggacctggggagagggtgggtggagcttggcctctgcagtttgcgcttgcaggttcaggggagaaagttgtttgagatcagggtttaggggtagtgtttcccattaatcttcatcataatcttttgatgtaggtgctgttattatctctacgttacacatctgggaggatttgaaagtcctggagacagggaggttttggggagaatgcaaaacagggcagggctctcaaggagggtggaccagtgaccatggggaaactgagtgtttctattaataagtatctaagtttcaattgtcttgtatctttccctaattctccaaacggttcaatctccagttttattcagggactgggccattttgttctcagagggacaaaactgatctctccatgaaatcccctgcacctcactctgggcagctctaggctcagcagatgtttttctgccattaggaaacagccccttactctcagctcctgtgctaacacccatacccaccagctgggcgttgggacctctcccgtcatatggctgccacttgcttgggaaggaattctccagactccttttactttgtatgtgtttctaggggaattctgagggaagaagctttgcagcaacctctgtgcccagaacatacggctcacaagtcctttgtgccgacagggaatctatctaattgttttagtgtgtgaggctcattgtcagcctagatttccctgaaactctgggccagcagcccccaggagcatcagtaggacccagcatttcccctggcaccaaagtggacctctttgcaccttgcagccgggagaactgacttagagggccctggtgttggctctggaacctgggctgagatggattcggggagaggctgggtggagcttggcctctacggtctgttcttgcagattcaggagagaaagtggtatgagagcagtgtggtttgtaagttccccaacttccccgctggctcacactgtctccccagaccaatggcctattagcccccaaaaagttagtccaaccccaggccagctgcctttgctctgctgtggcctaagttctggcctggtcaaaggaaggtggcaggaactccaggcttgctcctgcctcctcacacctcattccacaaatgcggagtgaaagagcaggagccagacacatttgggggttgactgtctagaaaggaggaatcagaggtcccaaggaacacaatcgtgcaacttcctagggaatctgcatcaggagaaagaagcggctaggacacacagtggcttcgctcagcctggccacgacatcactgtgcagaagaagagatctgtcaggggtccagaggagcggagtcctggagcctctgggagggtggcatgtggcagctgcaggctgtggtccagaactatgagcagacttgcctgtcactctccaaacatttactgaacacctactgtgtgccaggccctgtgctttgtcaggctctgggggagacaggtcattactctgcagtgtgggaagcggggctgccctggaagtgtgtactcagtgctgtgggggtacagagggagggctggagaacttagctggtgggaaaggagggttctggaaggcttctcagaggtagtggcattgggccagaacttacagtagggaagagcatgtggcaaggcacagaggagatgggagcctgcctggtgaggggtccagtggtgacagagctcagtgtgggtccagagatggtgtcaggtgagggctgagaggggagggcaagtgccccttgagatgggctgaacgtgatgatgatctgtggccagtgggagatgatagaagtcttgaggttgggaatataagaattaggtctcttttagaaagagaggacatggagaaaatccatatatttttagctaccaaaaaagagaaggaagaaagaaaagaaataagaagagaagcaagacagaaaagaaggaagagagaaggaagaatggcaaaggaaggaagaaggagagaaggaaggaaaaacaaaggaaggagaaaaagggaaggaaagaagaaaggaaggaaaaaaggaaggagggaggggaggaaggaaaagaaaaagaaggaaggaaggagtcctagccacttctttctcctgatgcagattccctaggaagttgaacgaagaaggaaggaaggaagaaaggagagaaaggaggaaggaaaatgaatctcattcattttgaggggcatcttcattacacagcgtggggagggaagcataattcactcttaagaaaccaaccacaccagccagggcccatcttctgacaatatcctgaagggttcgaatgtttgtcttcggtagggagtgccacacatttaatatcaatgcagggtcctgatgggcactgccacatacccccaggacaaacggaaaaatccacacagcagaaacaagcagttggcaaaagctgtcctcatgctacttggcaattcaatcaccctcccttcactcccacacctatctccgggtgttgcccgtacagtgtgtcatgtaaatagcatctagcatttaaaggtcaaatttgatgagtctaatcaatcttagcagtgttccagttcatcacgtatacccatatttaaggacttttaaagtaatttggatttttaactcaaaagacgatgtgtaccccttggggcatgcgtgtgttcttaggaacaccagcgtgtggtatttcctgtgtcctctcatgcatgctcagcatgtcactgttgtactcattccctggcacggaagaattgttgcacatctttaatagaagccaaagcccatgatttgatggtttcaagagcctaaaatctgtatttggagagaggaagtctactcttaactgtgagagttaagagtatcaccatcaaggcgcaaggcttcagtcttatcccggacaatcctcagggattgggtttgatgtcgggggagcattggatgccatcacgttgacactcaattgattgggtgacccaagatggtcagtttcctaaggaccagaccatagtgactgctcatgcatcggctgaaataccaaacaccctgcaccaaaagactcagcttgacattgctttgcactcaactcatgtattaccaaatctttgcttgaattattaatagtaaccaaactctctgctctaacaaccttcgaatgtcaagttcccttgcaagctgaaattgttccaaacctcaacactcctgttttacaacaaacatgtaaatacaacctcttttggagtgcagaaacatttgcggagtctggtgtgccaccaaccccatcaggatttccccaggggaaaatggctaactctggatcacaaacagcacaaattaaaaaggtgccttgcctgatgcccattaccacctggggtggtttttctagacaccagaataggccagatttaattttcacaggctcatctgggagaaggatcaaatcctgccatctggatgtgcattattaatgctggtgtttggtgaggaagctcctaggaatgcatagatctctccttctgccatagtatgtcgtgtgtagtggatgccagtagacaactttagccactcctgtccgtccttcttcatggaacacactcatttcgccacacggaggctttactctgcccagtgtccaatgggagaaccatcccttccctttagtgagaggacagctggctaaatgctatcctcagtcctcctggaggctcctagtaatgagggcactgaacaccaattctttacattccttgaattttcatagattctatttttttcatgtctgtgaaaagtggggtggggaactcacaccaaccatagcttggggcatccagagagtggctagtagatgatagaagggagtccagttaaggaaacctaaggtatgtgccagctggtttagcattcaatatggaaatgcactttatatttatttgcacacatcaagaatacttttggaaaccaggatttagaaaaataaaagatatttctttcctggggacaaagtgacctgcaaatgattggcttctgtacaatgttgcaatcccttaatgtcagactcttaggaaaatgggtgggacatctgtgtgtttgtgttggagtgaatgtgcccataaccctgtgctcccataagtctgtgtgcccgtgatcatatgcatatgggtgaatgtttgtgtgcccatgattttatgcatataggtgaatatttgtgtgcccatgagcatatgcatatgggtgaatgtttgtgtgcccatgagtatatgcatacgggtgaatgtttgtgtgcccatgagtatatgcatatgggtatatgtttgtgtgcccgtgattatatgcatatgggtgaatgtttgtgtgcccgtgattatatgcatgtgggtgaatgttcatgaacacaaacagctacactcggagtagaaaacaaatgaagcaaaagtttagcatcctctcatgtgtgtcaacattgtagttttacatttactttcttctaatctattaaacataagtatggctccatttttttagtattaccagaagccctcccaatacggcaatattaccttctgtgtaatccacttgccaacagctgttttctgttgaaatgggactcaagaattttgaatccaaggccaatgctgcctgctctgtttacaatggtttgtgttttgtggatacatatcaaatgctgtaatatatttttatgatagaattgatggttaatacagggaaaaagtatatattgtgattctgtccaataaagcctcctgttataaaaaaaaaaaaaa

SEQ ID NO: 1052 - DNA, 3577 bp, Homo sapiens
aacccccctccggggggcgcgcgctccggggctcgcgccgagggctcgcgcccctgcctcgtgcctgcgctgctcgtatgtaaatgagggcgcgtgacgcgggacgcagatggacaagggaagagagagaatggccgctgccgccgccgctgctgccgccgccgccgccgccgctcagtgccggagccctcggtgcgcggcggagagaagaggattccggcgggaactcgactcttggcgccaccgcctcatgcactgtgtaggttttgagagtattttagaagggctttatggaccacggctacgaagagacctcagtttatttgaagactgtgaaccagaagagctgactgactggtctatggatgaaaaatgttcattttgtaacctacagagagaagcagtcagtgattgtataccatctcttgattcttcacagtcaacaccaacagaggagctatcatctcagggccagtccaacactgataagattgaatgccaagcagaaaattacctaaatgcactctttcgaaagaaagatcttcctcagaactgtgatcctaacattcccctagttgctcaggaattaatgaaaaagatgatacgtcaatttgcgattgagtacatttcaaaaagtggtaaaactcaagagaatagaaatggttcaattggaccaagtatagtatgtaaaagtatccaaatgaatcaagcagaaaactcccttcaggaagagcaggaaggccccttagacctcactgtgaatcgaatgcaagaacaaaatactcagcaaggggatggagtgttagatctctctacaaagaaaaccagcataaaatctgaagagtcatccatatgtgatccttcttctgaaaattcagtggctggcatgctacaagtgaaaactgatgagaaactgaatgtgtctgatgagaatacagcaagttgccctttgagccccattaagatgtgccttaatcgtcccattgaatggaatctgaatttgacaacagcatctctaacgagctgtacagttcataaccaaaatctcaaaagcgaagagaaatagattgcagttcttcttgcactatctttattttgtatgtcagtattccttctgaacaataagcatttatcaattgatcttgaagtatttctagtcctgtgatttgtctttatattaaatcattagcattaatcattttgattatattctttatatgttttttttacatgttttacatcagatcattgtggaattttgtaaacggattttgatgtttctcttttagtggtattatgtgaattttttatgccctaagtttaaatacgtaattgtccctagttttatttctgtgcacaaagttttaatatataacacattgtgatttataaagctagtattgtaaagatttgtgatgataacctgacccatgagcagttgtaaaacaggtggataccaactacctcgaagcaaattggtgaaagaaaaggcaaaggtatctcttagaagtaaatctccttcaacgttatatatgtacagaagaaaaaaagttgatcatagctttttgtcaagtagcatgtttcccattcacaggaaaatgtgagcttatcagttctttctctgtattttaaatctaagtctgtgggctttaagagcaatggcacaattgcatgtttactgttcagcaaatctgtgcctcttgatagagaaaaatactatgtggtttctgtaagttaccagttttgaatgaaaaatggtaaatggatttacatctgttttattgtaccttagccttttattttaaagttaaagggatgacttttaaaagcaggacattccctacctttaatagtgcaaagcacagtttcagcaatggctacatgactatgtctaaaaactgaatactcagaatactaaaggtttggtgcttaaatttatttttcccatgccagagaaagcaagctttggtatggtaaaccacatgagaacatggctcctttctttttggatagcctggccatgtgtgaatgggattttagcttattatgtttctaagacttttccttacagcacacttaatgtaccttttcagtccttctcccaaccccctgcaaattgtctttaaaacaacaacacataaggaatctgaagcacaggagaacacagagccaacaaacagaatgaagaacaatcatctatttttaactgactttctatcattaccatttttccttttgcttaataactatcttgctttgaaactttgactccttttataagttctatgaggcacatatgtatagcaatttggttctaaaaaccagtgatcttactttagctccatcttaaaatttcaccttaagtaaatggcctctagtagatgataagcctaaaaaaagcacaattattaaaacaaacagatccatgttaggacatttctgaataataaagagaaaaggtgtttcgttgggtattgcagaaaagaggaccaatttcatatagtacaagtttcgtaagtcaggccaagtgtcaatttcaaaagacaagaaatgaaattgacagtgaatagtgctcataaattggtagcgtatataaagagaagttcctgtcacattatattcccactagaattattatccacagtaaataaatattattttgttatgccaaaaatatagcgagcagcttcatggttaataatacatttatgttgacacctccctaatccaggaaacattcacaaacaaggactcccatatacaaatactttaggaagagagatttcccaggcagatatcaccaaaaatgttttcactgtaggaatcacaaaataagtttttgtcaaaataactgttgttgaacgttatactggtcttcctcactggtgattgataagctcctttctagccagtttgtggtacttccttcattttccctagaaatgttacttgttaaatgtgtcctcaggcggtttcatctttgttgattctgcccatctaagtcataagcttctcaaatgcaagctactagctagttacacttgtaagttttccataatgacatgattttaaacataaagagttcataagaatcacttggagagactatttaaaaatgagattcctaggcccacctcagattgtgataaatctgtgtgactgactgatgcacactttttctggactataataactgatgctgctctactgctttaatacaggccaaagtaacgtggaagcgcacagcagaaaatcttcagaaagacatcaggtttgttctgattttgacaagggtaacttcttctttattaaagcaaataactggacataatcttaaaggattccacctccatcgtctttcctaacttagatcttcattgagaaattgggcaaggttaagtttacttttttctagtgctgcggttttggctcgtcttggtagtctcatcttcatttctgattctggttctggaacttcatgatcactaaatagatgttgaaaatacacgaatttagatacaagctttaaaaccagtttatttataaataaaacttttttgtttctgactcaaaaaaa

SEQ ID NO: 1053 - DNA, 3182 bp, Homo sapiens
ggcaggcgagccggacgccgctcgcagcaccggagagggcgcactgcaaaggcgggcagcagaccgtggagagcccgggagcggagctggacaccgcctcggagggaagaaatgaggtagcggcggttcccggacccggccatgcccgtcccctgttctcggagcccagcgccgtctcggccaggccagcccggacactgagcgggccgagcgcgagtccccggcgtccggcggagcgaagatgcagtgagtccccgcgggactgctgcgcggggcccgccgcggccagccggacccagcatccgaccgcactttgggcgagctgctgacttgagaccagcccaaacggggggctttccatctccagcacccctcggaggtggggagcaccggcccctaggcacactcgctgtagagtttccgcgggttttggccccagtcctgagggttgtgtgtgttaggggacccacctcacgttcgccgaggagttcctgcatattcttgcaccatcccgggtgctgttgctggggctctctttatttgcacgcgcgcttctagcttttttcctgacattttccactctacgctcgttctttctcccttgcattttgttgcttgcctgagactctttgctctcgcccttgcccaggctggggtaattctgtgtgcgcgcgtgtctcccccgcaccaaccttttttgcacactcgaagctgaatattttcttttttagagaatttacccgcacctcctgcggggttcctaagcactctctctgctcccctccccccaactccctaccacagggccgctcccagtagttttattcttcgatcttgcccgggccgagcctggcaggggccggtggctcagcgggcctcgcacccggcgctccgccgccgccgccgcccagctgcgccggggcgccctccggagatgctgccgtggaagaagcacaagttcgagctgctggccgaggcgccgccgcggcaggcgtccaagcccaagggctacgctgtgagcctgcactactcggcgctcagctcgctggcgcgggcgtgccccgaaggcgcgcttagccgggtgggcagcatgttccgctccaagcgcaagaagctgcacatcactagcgaggacccaacttacaccgtgctctacctgggcaatgccaccaccatccaggcgcgcggcgacggctgcaccgaccttgctgtgggcaagatctggagcaagagcgaggcgggccgtcagggcaccaagatgaagctgacggtgagtgcgcagggtatccgcatggtgcacgccgaggagcgcgcgctgcgccgcccgggccacctctacctgctgcaccgcgtcacctactgcgtggccgacgcgcggctgcccaaggtcttcgcctgggtgtaccggcacgagctgaagcacaaggccgtgatgctgcgctgccacgccgtgctggtgtccaagcccgaaaaggcgcaggccatggccctgctgctctaccagacgtcggccaacgcgctggcggaatttaaacgcctcaagcggcgggacgacgcgcgtcaccagcagcaggagctggtgggcgcacacaccatcccgctagtgccgctgcgcaagctgctcctacacggaccctgctgctataaaccgccggtggagcgcagccgcagcgcgcccaagcttggctccatcaccgaggacctgctcggcgaacagctggagcaggagctgcaggaggaagaggaagaggagcaacccgagggctgcccggaggaggaggagaaccgtgcggcagagggagatccagcagaggaggaggccgaggcgcagcgtgcgctagtggtcgccatgcactttgagtgcggggacttgttggatactctggagaatggccgtggggaggcgctaggaggcggcgggggctccctgggcccgggggccgggccgccgcctctgctgctgggcagcgcctccgacatgaaggctgagctgtcgcaacttattagcgacctgggcgagctcagcttcggcaacgacgtgcgcaccctgcaggccgacttgcgggtgacgcgcctgctgtcaggcgacagcacgggcagcgagagctccatcgagggcgggggccctgacgccacctccgccaccgccggggactcgtcccgccaggccgacggcgccagtgcagacgagccccactcgggctgagctcctccgcgcgtcgccggcgctccaccgtggctacccatccgtggtcccgacaacctccctgtcccttgcccgcccccaggaagggggaaatggggcatttggggcccagacctacacttggagcccaggtccagcgttcccccgaccgctttcccctacctcccggcccccgctcccgccccagcacttttggctctgttgcgcgtggggatgcggggagatttgagaggggaaaaccccgccaggagggagagagaggcacccctctgggatgcgggtgagggaaggttggctgaagttcctagtctcaggccgtaggtgcctggccagtttcctgtttgtggggcagctggggcctgaggaggaggggttcacttcctcctcccaccccctgggagcggccctgcgctgtcactgacatctcattaaaaaaaaaaaaaaatttgctctcaaggtgtttgaggctttaatgcaaccctttagcccttggttctttttggtgcaagaattctggctgtttacctcagactcagacccctgaaatgttgccaaattcttcaaataactgtttggggggtggggggagatgaaagagagtcgcgttttgtttacagttaaagacatccaatatcttaaaaaggagttttcctttagaaacacacacacccttcctcttgctcaaaagatctcactccatgatactgtgtaaaatatttttgcactgttgtgaagtatttttgacttttttctgtacataactgtgttctcagagctgaatgtttatatcttttgctgtgcaaaagaaacatgtaaaatgttgttcagttgtatatacagaaatgtgtataaaacattttgttattttttaaaagtagcactgttctggttctgtttgcacgccagtggggagagaataaagaggaaaatttaacagaaaaaaaaaaaaaaaaaaaaaaaaaaaaaaaaaaaaaaa

SEQ ID NO: 1054 - DNA, 5181 bp, Homo sapiens
ccggcacccggcgggcgcccgggcgcggcgccgccggcacccgagaggcgcggtagccggcgcgggcggcgggggccgggccgcggcgggcgcccgggcggggtccgcgctgagccgccttctcggccgcctggtccctgcggcggctgcccggcggcccgggcgcgcggcgcttcgccatgtacaccttcgtggtacgcgatgagaacagcagcgtctacgccgaggtctcccggctgctcctcgccaccggccactggaagaggctgcggcgagacaaccccagattcaacctgatgctgggagagaggaatcggctgcccttcgggagactgggtcacgagcccgggctggtacagttggtgaattactacaggggtgctgacaaactgtgtcgcaaagcttctttagtgaagctaatcaagacaagccctgaactggctgagtcctgcacatggttccctgaatcttatgtgatttatccaaccaatctcaagactccagttgctccagcacagaatggaattcagccaccaatcagtaactcaaggacagatgaaagagaattctttctcgcctcttataacagaaagaaagaggatggagagggcaacgtttggattgcaaagtcatcagccggtgccaaaggtgaaggcattctcatctcctcagaggcttcagagcttctcgatttcatagacaaccagggccaagtgcacgtgatccagaaatatcttgagcaccctctgctgcttgagccaggtcatcgcaagtttgacatccgaagctgggtcttggtggatcatcagtataatatctacctctatagagagggtgtgcttcggactgcttcagaaccatatcatgttgataatttccaagacaaaacctgccatttgaccaatcactgcattcaaaaagagtattcaaagaactacgggaagtatgaagaaggaaatgaaatgttcttcaaggagttcaatcagtacctaacaagtgctttgaacattaccctagaaagtagtatcttactacaaatcaaacatataataaggaactgcctcctgagcgtggagcctgccattagcaccaagcacctcccttaccagagcttccagctcttcggctttgacttcatggtcgatgaggagctgaaggtgtggctcattgaggtcaacggtgcccctgcatgtgctcagaagctctatgcagaactgtgccaaggcatcgtggacatagccatttccagtgtcttcccacccccagatgtggagcaacctcagacccagccagctgccttcatcaagctgtgacagagggcactccctgctgccttggaaaaagcacggggtcctgctccagggaatggtgaaatgactggattgctctttatccagcccacagcaggggaaagaaaggcaactcgcaaagatgagatggaagaaggcacgtgagcagaggaggcagctcccaaagagagggctgctcagggggcttcccaggtgtagctctcagcagtgctgttgagacttttgaaaacaactttggtacacaaaggcagctttgtgagcagagctccttcccctctccccgggaacggcagggcactgggacctctggtcggtgcctcccacccactgcagccctagtgccttagctccatgcccggctgcagccccactgctctggactatggattggacgtcagagcatattggaggttgcctgtgtgttccccacccatcccttcggtaacactctgccacactaagctctgtacaagcatgcaccaacagtccttagttttgtgctgtgcactggcctctcggcaaaggtggtttccctcatcaccttcctgatggtgtttggtcagtcacctgtcagggtttgtgcgggttgggccccaaaacagcatatgctgctctaagtctgctctctgcatgttttagaaacaaagtggcaagtctgccctgaacctgtaagcatcaaataagcatgagagagaaaaaaacatgatatattgctttacttaataggttgaatatggtaggtctttgaaaatatgatgattcaattttctcaattttctttgctttaaccaaaattctaaatgcagttttgcctagttccctttttttttctttttttacttttttttaaacgtttgtaaaaacctctttgaggatgaggagtcagtaaaattccactccccaagtggccctgccccagacaaaggttgctttccccctttttgttctttttatgccccgaagcactttctgcagtagctagagggacaggtttccttccaggaaggattcgagttcctgtgcctgtgggtattaggagagtatatatcctgcctgaatggggaagtcttctaaaatgggaaagaagtggtttcatctccacacagtgtcttgtaaatctcaacaaatgtgtactgttagaagtggcttccgcttactggattaactaatactttataggcttttcaggaggccacatcactagcagtagggagaacaagatgtcatttgtgttcagtgtaagctgagtaaacaggcccttcctagagtgtcctggaaatcacagcaacccattgaaaactgccctccccaccagaacgtgctacgttctttcttcatgcctatgtgtgctccattcctcatttctacttggctcaagaaaacatttctgcagtcaggtgagacttttacaaaagaggagaaaatcaatgcctccttgaacatgatgagatgtgagaacttacaatgaaaaaggcaataatgatagaaattatttcttaggtacagcaatagttgataggatgtgagggtgttaccttggggtgaagtggagaaggtcccaggtgaattggctctcatggaaatttggaattacaaaataaacgtcctgggggttacccagaatacagatttaaaagtttgcctgtagagcaaaataaaacagtcagttgtagtcattaatccttgaggcccaacgcagccgatgggttggtgtttgggaaattctgagatgggagtgagatctgatcggatcctgggaagatgtatacccagttagaacgtgtagggttctgggtccctggcaagtctaggtgggcgggtgacagggaaagcatgggcatttttgtattgctgtcacatgctaacagaggtttgtaattatcttttggacccaaattatagagacattcacgagttttctagccctcacagtaacagagctaagaattcagatgtcaggaagtctgtgaatcttgatggattttctgagaaacctgactcaatggcatatataagagggaagtaagacttttaagaaaagaaaaagttatgcctcattcctcatgtggcttccaataagtatcttaggaacttatttcctttttaaaaaatattttttaaatttttaaaatttgattttaaatttcaaataaatttaaataaattttaaataaattttaaataaaattttacagagacgtggtctcactatgttgcccaggctggattgcagtggctattcgcagttgtaatcatagcacactgcagcctcgaatttctgggcttgagcagtcctcccgtctcagcctcctgagtagctgagactacaggtgcacaccaccaagcctggctttatgtatttatttctgttcatgcggaatgattggttcagaactgttcctttcccttccatgatgtccttgacacagaaggttatgcctggctcccagtcaggcttcatacttttggtccatgtaagtgctacccgttgctgggggaggagtcatggtttatttggaaatgtcagttgcaatcatggttctgtcatttgactgcacagtatcagaggagcctgttaacctctctgtgccttagtttcttagcccatgaaagagatcattgcctgacccagggactacctcaagggcttttgatgaggacaagtgacagtaggaagatgcaagagcctttagtaccaaggttctcaacactgactacatgctggaatgactgtgaagcttttaaaaaatgttagtgcccactcttcccctgtacccccggacagttaaatcagaacctcagacagcaatatgccttgagatgccttgaaccatgcttgagaaggaaggacaaacacattattatcttggaagaattgcataaggcttatgacttaaaaaaaaaaattctttttggaaacacaagcatttctttaaggatgaccggatgttgccgtatgtatttatggcacaagcaggtgttgtctaagcagtttctctgtttgcttgtcatagcagcatttggaaactcaaacatgctttcatttacataaatagtttatgaagctttgacaacaaatgtaaacagacacgaaattataaatctgctaaatatgtattaagggtattaattattgaaagtccctttccccaaaactcaactcctatggcaattatgaactccattttaccaagaacatttaagtgcctcagcatctgtatgatatagtggagcaggtgctgacataggtaccagctgacatgatgtgtcactagctctgtgggatgattgccacatacatggaacacctgggagtgctggaaatgtactgtgatcgaagtgacaaagtgtgttttcattcacagtggaggctacatcaagcaaggggaggtccagccctcttgcaagtgtggtgagaggctctactagcaaagacatgggcaccggagtaggtcccgtgtagcatgcgggtgctgtagagaaaattcagtgacgtacatggctctggttctggacacaaaatctgtactggagaggaaatgactgctgaaataaggcgattgtatgaatatttaaaatgcctggaacactaaagtaaagtaatgatatttcaagtgtttttgtgctctttggttcttgttgtaggtattgactgtcctgggatatcactggtcatttaaattcaccatataattagccgggcatggtggcatgtggtggtggctgaggtgggaggatcgcttgaggctgaggtgtgaggctgcagtgaaccatgttcacaccactgtactctagcttgagcaacagagcaagaccctgtctcaaaagtaaataaataataaagtaaatataaaaaaaaaaaaaaaaaaaa

SEQ ID NO: 1055 - DNA, 8329 bp, Homo sapiens
ggcagcggccgataaatgctattagagcagccgccgcggagccgtccccgacgccacctccttttccttcgccgcagtttcctccgccgctgtcgggcgtgcggcgctgagggacccgggcgagcgcgccgcgcaccgccccgccggctcgcctccctcgccgcgttccgccctcagtggtctgccgggcgccccctcctccggcccgggcggggcctctgatcgcctcaagagagcggggagggggctcgggggccgcggcctgccctcccggcgggcggctgagggcgagggaggccctcccttctggcgaggggagggagggtgggtcaggagcccccaacccgccctgcggagctcggggccgcgcgaggggcggttgtctgggggagggggcgcggggtgattcagcgcccggcgaggcggaagcggccgcaagaggaggaggggagagcccgtccgcgcctgggctcccggggtggcacgagcccgcggccggagtgcgaggcggaggcgaggaggccgcggggacgggaggcgaggccggccgggcccccgaagccatggagaacgcgcacaccaagacggtggaggaggtgctgggccacttcggcgtcaacgagagtacggggctgagcctggaacaggtcaagaagcttaaggagagatggggctccaacgagttaccggctgaagaaggaaaaaccttgctggaacttgtgattgagcagtttgaagacttgctagttaggattttattactggcagcatgtatatcttttgttttggcttggtttgaagaaggtgaagaaacaattacagcctttgtagaaccttttgtaattttactcatattagtagccaatgcaattgtgggtgtatggcaggaaagaaatgctgaaaatgccatcgaagcccttaaggaatatgagcctgaaatgggcaaagtgtatcgacaggacagaaagagtgtgcagcggattaaagctaaagacatagttcctggtgatattgtagaaattgctgttggtgacaaagttcctgctgatataaggttaacttccatcaaatctaccacactaagagttgaccagtcaattctcacaggtgaatctgtctctgtcatcaagcacactgatcccgtccctgacccacgagctgtcaaccaagataaaaagaacatgctgttttctggtacaaacattgctgctgggaaagctatgggagtggtggtagcaactggagttaacaccgaaattggcaagatccgggatgaaatggtggcaacagaacaggagagaacaccccttcagcaaaaactagatgaatttggggaacagctttccaaagtcatctcccttatttgcattgcagtctggatcataaatattgggcacttcaatgacccggttcatggagggtcctggatcagaggtgctatttactactttaaaattgcagtggccctggctgtagcagccattcctgaaggtctgcctgcagtcatcaccacctgcctggctcttggaactcgcagaatggcaaagaaaaatgccattgttcgaagcctcccgtctgtggaaacccttggttgtacttctgttatctgctcagacaagactggtacacttacaacaaaccagatgtcagtctgcaggatgttcattctggacagagtggaaggtgatacttgttcccttaatgagtttaccataactggatcaacttatgcacctattggagaagtgcataaagatgataaaccagtgaattgtcaccagtatgatggtctggtagaattagcaacaatttgtgctctttgtaatgactctgctttggattacaatgaggcaaagggtgtgtatgaaaaagttggagaagctacagagactgctctcacttgcctagtagagaagatgaatgtatttgataccgaattgaagggtctttctaaaatagaacgtgcaaatgcctgcaactcagtcattaaacagctgatgaaaaaggaattcactctagagttttcacgtgacagaaagtcaatgtcggtttactgtacaccaaataaaccaagcaggacatcaatgagcaagatgtttgtgaagggtgctcctgaaggtgtcattgacaggtgcacccacattcgagttggaagtactaaggttcctatgacctctggagtcaaacagaagatcatgtctgtcattcgagagtggggtagtggcagcgacacactgcgatgcctggccctggccactcatgacaacccactgagaagagaagaaatgcaccttgaggactctgccaactttattaaatatgagaccaatctgaccttcgttggctgcgtgggcatgctggatcctccgagaatcgaggtggcctcctccgtgaagctgtgccggcaagcaggcatccgggtcatcatgatcactggggacaacaagggcactgctgtggccatctgtcgccgcatcggcatcttcgggcaggatgaggacgtgacgtcaaaagctttcacaggccgggagtttgatgaactcaacccctccgcccagcgagacgcctgcctgaacgcccgctgttttgctcgagttgaaccctcccacaagtctaaaatcgtagaatttcttcagtcttttgatgagattacagctatgactggcgatggcgtgaacgatgctcctgctctgaagaaagccgagattggcattgctatgggctctggcactgcggtggctaaaaccgcctctgagatggtcctggcggatgacaacttctccaccattgtggctgccgttgaggaggggcgggcaatctacaacaacatgaaacagttcatccgctacctcatctcgtccaacgtcggggaagttgtctgtattttcctgacagcagcccttggatttcccgaggctttgattcctgttcagctgctctgggtcaatctggtgacagatggcctgcctgccactgcactggggttcaaccctcctgatctggacatcatgaataaacctccccggaacccaaaggaaccattgatcagcgggtggctctttttccgttacttggctattggctgttacgtcggcgctgctaccgtgggtgctgctgcatggtggttcattgctgctgacggtggtccaagagtgtccttctaccagctgagtcatttcctacagtgtaaagaggacaacccggactttgaaggcgtggattgtgcaatctttgaatccccatacccgatgacaatggcgctctctgttctagtaactatagaaatgtgtaacgccctcaacagcttgtccgaaaaccagtccttgctgaggatgcccccctgggagaacatctggctcgtgggctccatctgcctgtccatgtcactccacttcctgatcctctatgtcgaacccttgccactcatcttccagatcacaccgctgaacgtgacccagtggctgatggtgctgaaaatctccttgcccgtgattctcatggatgagacgctcaagtttgtggcccgcaactacctggaacctggtaaagagtgtgtgcagcctgccaccaaatcctgctcgttctcggcatgcaccgatgggatttcctggccgtttgtgctgctcataatgcccctggtgatctgggtctatagcacagacactaactttagcgatatgttctggtcttgactgacagttttccataaagaagatgtttaacttaatcaattaatttttttattgtttaaagcaactgtctatttctgctgaattttcacatgaacatactggctggtgatggaggtttcatactctagattttgttttgctttttctgactccagtggggcaagattttccttttttatacacataattaaagtgtccattgacatgtacagagaactaacactattttatgcaaatatttttttgtagatgaaaaagcatgtacagtgttctgtttaatactcatccttgtataaaaaaaatagttgagccagcagacattgtcagcaaattaattggcagcagattttaggaaatgaatgtgtgtggttttttttctaaaactaaatagcatgtattgtgtcttttgcatgatgatccggatttaatttgatatcacagtctaatttttattcataagccaatttttctgcactgagcagagtcttgctacctcagtcagtattgttttggtttgctacttccctcacccactttggcctccgttcaccccaccccaccccacctctccccaccttacccccgccccgcttggcttcttctttaggattgtgatggttcgttctgtttacatcagttttaacgagaggtatgcctgtactcgcttgtgcagaaaacattgttccagattcaatcgactgggtttatgtcccttcacatagtttttaaggttatttatttaaatgtctaatgtattttattgtaacagacattgttttgccaacattgcctatttcagtggcacgtcatctagttttaaaaaaataaaacattttaaatggacagagaaaaataactgtcttgtctttaactcgtaagtggcttacctgggactaacagacatgtccaactttctctccagttcttagctcagaactttagttgtactctgcttgaggggaagaaggctcctgctctgctgtgtaggtagtcataggaattgtattcttaatgtacaggcactaattgtcatctgtgatgtacattttatgcaagtttctgctggcctggtatagagaacataagggcaagtgtgtatgtgtgtgtatgtgtgtgttttgtaaaatctgtaaatagcacatgaccaaatgaacatattgtatagaactatttttatttgaatgtggcactaaccaccaccaccgttactacgatcaatgtttgcgcatgttcgagatgagtctcaccaacagtgtgtaagtcattaacagtcctaactgtggtgttttcctccaatgccttccaacatccatcaactaacgtgagtattttcttcctgggatttggatgctttagcctaaaggtgactgccaccaagtgagataactgtatgtcactaacttataagccgcctccatggcagatgctgctgtgctccctgatgccctgtgagcaccggggttgcctgtggcgcctgccatgtgactcgggcgcagcatcagctggctggaggtgtggctttcatagacctccacaggctgcctaggacaagatgaccaggagggcccaagccagacaaaagccggagtggggagagaggcatttcagccagaccaacaggctgaaggagctgtgcagactattgctaaaatgagggttcgcagctgccaggagtcatcccagaacattgctacttatttattaaaaagctaaaaactagtgaaagcaagtaactgaaccagtgaactctgggtatcgataggttcgtcttaaataggccacttccccactcccccacccccccttgcttggtcttgtccttggtggctaagacttagctctgcaggggatgttaaagcacagttagtaggacgtggctctgcacagcccaaaaaccagcttactccttagccagggtgtgaggcctcgactatattcttcaaaatgtacttaggctctggttactgggatggccagtagatgtaatgcagatggttggagtttggggagggttaggaggcatcaagcaggacaaggtgctgctgagttcagagggcccacgttcaagggatggaggtggaacctggagaccgactcttaaaagcacagtccgtggttgggtgtggtggctcatgcctgtaagtaagtctcagccctttggaggccacagcagaaggattgcttgagcccaggtactcaaaccagcctgggcaacagagtgaggccctgtcaaaaaaaaatcagccttactgtgaagcctccaaggctgctcgcaggcagctgtggctctcgggaagggaggctgctttgcccagcagggaacatttggggcagggggtaaattttgccagtttgagcatcatgaggtgtaacaagaaatgggttgaatgggccaaatgcaaggagtgcatctctgggctgcaaactgacttgagtgctgcactattgctattccgtgcaaacaaaactcagcttttcctgactcagttccttgacttagtggcctttacaaaaaaagttgagtagtgtgtggcctgctgtcgcacagcccctagttagcttcatggtttctcagcttcagacccctccagcccacagaggagcccatggagggacccacttcccttggtccagacagctgggagtgggttaggcccactgctgttttgagcagggccacttgctccatttcactgaaggctttgctgggtgaaaacacttcagcatctcctcctcaggtcaacccataaagaccaggtccagcaccgtggtcttggcacatccctggcctcaggccctcacctaacagtgaggcagcagctgcccagccccgcaatgtgcctgctgtcaggcagctcttgcctgaaacttacttccacattctttcctgatgggcaggtggctgaaggcccagccatcagtgtcgcttgttgccaccccgtgcctcccttggcctctctgagctttgcccagaagaccaacaatcatacataccctaactgggacaccactctgcagaatgcagatgatccattctggaggaagctgtcccttgagctcagtgagctcccaggcaagcagggcatctggccgacttccctcacaacagctgctcccacatcccctcggactggagcttcagccctgactgaggtgggcagacctaagacctgagaccacaagattagctcagtgtctaccaagcatctagccactgtccagggccagagcataccacgtctgcagtgcctgtgagcagagccagcagttgccctgtgactgtaaccaccaaattgtccaaacacccgctgcagttagcaagaagggtaggcttcaccctcctttactgaggagaatgatgcggaggagtttcctctccagggctaggcaaggcaggcgagcagccagaagccgggtgcccacagggcagggacaggaaggctgtgctgctactggctgctcacttctccatcaacctcaccctctgcaccactaaccaagaccttgtcctcttgcctgtctcgctgctttcacagctgcaacgattgtgtctgcctcatggggttttcctccagagcctttattctgtagccagacgacacgaggagtctgtgtcactgagccagtgcttctagatgctaccctgtgtgggcggcacctcagggacagtaaatcagaaatgctggtcttgaaaccttgaaaagatcaagctgaatgttccttttcatctgtcgctgttgatcttcatctatttaaataggtattctaacgtttcctctctgtatttcatgaagctgatttcctctctctttccttttcagcaatactggagtaaccgcttcctaaaccattttgcagaaatgtaagggtgttcggttgcgtgcatgtgcgtttttagcaacacatctaccaaccctgtgcatgactgatgttggggaaaaagaaaagtaaaaaacttcccaactcactttgtgttatgtggaggaaatgtgtattaccaatggggttgttagcttttaaatcaaaatactgattacagatgtacaatttagcttaatcagaaagcctctccagagaagtttggtttctttgctgcaagaggaatgaggctctgtaaccttatctaagaacttggaagccgtcagccaagtcgccacatttctctgcaaaatgtcatagcttatataaatgtacagtattcaattgtaatgcatgccttcggttgtaagtagccagatccctctccagtgacattggaacatgctactttttaattggccctgtacagtttgcttatttataaattcattaaaaacactacaggtgttgaatggttaaaatgtaggcctccagttcattttcagttattttctgagtgtgcagacagctatttcgcactgtattaaatgtaacttatttaatgaaatcagaagcagtagacagatgttggtgcaatacaaatattgtgatgcatttatcttaataaaatgctaaatgtcaatttatcactgcgcatgtttgactttagactgtaaatagagatcagtttgtttctttctgtgctggtaacaatgagcgtcgcacagacatggtttcaggtaaataaatctattctatgataaaaaaaaaaaaaaaaa

SEQ ID NO: 1056 - DNA, 4563 bp, Homo sapiens
gggcggggacgccgcggcaggaaggccatggcggggcccgagcgctggggccccctgctcctgtgcctgctgcaggccgctccagggaggccccgtctggcccctccccagaatgtgacgctgctctcccagaacttcagcgtgtacctgacatggctcccagggcttggcaacccccaggatgtgacctattttgtggcctatcagagctctcccacccgtagacggtggcgcgaagtggaagagtgtgcgggaaccaaggagctgctatgttctatgatgtgcctgaagaaacaggacctgtacaacaagttcaagggacgcgtgcggacggtttctcccagctccaagtccccctgggtggagtccgaatacctggattacctttttgaagtggagccggccccacctgtcctggtgctcacccagacggaggagatcctgagtgccaatgccacgtaccagctgcccccctgcatgcccccactggatctgaagtatgaggtggcattctggaaggagggggccggaaacaagaccctatttccagtcactccccatggccagccagtccagatcactctccagccagctgccagcgaacaccactgcctcagtgccagaaccatctacacgttcagtgtcccgaaatacagcaagttctctaagcccacctgcttcttgctggaggtcccagaagccaactgggctttcctggtgctgccatcgcttctgatactgctgttagtaattgccgcagggggtgtgatctggaagaccctcatggggaacccctggtttcagcgggcaaagatgccacgggccctggacttttctggacacacacaccctgtggcaacctttcagcccagcagaccagagtccgtgaatgacttgttcctctgtccccaaaaggaactgaccagaggggtcaggccgacgcctcgagtcagggccccagccacccaacagacaagatggaagaaggaccttgcagaggacgaagaggaggaggatgaggaggacacagaagatggcgtcagcttccagccctacattgaaccaccttctttcctggggcaagagcaccaggctccagggcactcggaggctggtggggtggactcagggaggcccagggctcctctggtcccaagcgaaggctcctctgcttgggattcttcagacagaagctgggccagcactgtggactcctcctgggacagggctgggtcctctggctatttggctgagaaggggccaggccaagggccgggtggggatgggcaccaagaatctctcccaccacctgaattctccaaggactcgggtttcctggaagagctcccagaagataacctctcctcctgggccacctggggcaccttaccaccggagccgaatctggtccctgggggacccccagtttctcttcagacactgaccttctgctgggaaagcagccctgaggaggaagaggaggcgagggaatcagaaattgaggacagcgatgcgggcagctggggggctgagagcacccagaggaccgaggacaggggccggacattggggcattacatggccaggtgagctgtcccccgacatcccaccgaatctgatgctgctgctgcctttgcaaggactactgggcttcccaagaaactcaagagcctccgtacctcccctgggcggcggaggggcattgcacttccgggaagtccacctagcggctgtttgcctgtcgggctgagcaacaagatgcccctccctcctgtgacccgccctctttaggctgagctataagaggggtggacacagggtgggctgaggtcagaggttggtggggtgtcatcacccccattgtccctagggtgacaggccagggggaaaaattatccccggacaacatgaaacaggtgaggtcaggtcactgcggacatcaagggcggacaccaccaaggggccctctggaacttgagaccactggaggcacacctgctatacctcatgcctttcccagcagccactgaactcccccatcccagggctcagcctcctgattcatgggtcccctagttaggcccagataaaaatccagttggctgagggttttggatgggaagggaagggtggctgtcctcaaatcctggtctttggagtcatggcactgtacggttttagtgtcagacagaccggggttcaaatcccagctctgctgttcactggttgtatgatcttggggaagacatcttccttctctgcctcggcttcctcatctgcagctacgcctgggtgtggtgagggttctaggggatctcagatgtgtgtagcacggagcctgctgtgtcctgggtgctctctacgtggtggccggtagaattctccatctatccaggctccaggagacccctgggcatctcccacctgtggcccctaaacccagagtgactgagagcacttaacattcagcttgtctcatccccagtctacctccttccttctaccctcactgcctcccagtcaggagagtgagctctcagaagccagagccccacccaaggggaccctggtctctccgccttcacctagcaatgggaaccctgcttcccaggggaggaaccaactgctccaccttctagggacccagtttgttggagtaggacagtaacatggcaggaatcggacttctgggcctgtaatcccagtttggatggcacgttagactcttggttgaccgttgtggtccttagaagtcccattctcccttccagttatgagaaaccaatgccttctagattcaggtgactatccttacctgggggtgctgatgcatcctcagttaacctacacccacctgaatatagatgagcgtagctgagttttcacccgtaggaccgaagtgttttgtggtggagtatctgaacaaccttggctctgtggccattcaacctgccaggactaacatttctggatttgtgaagaagggatcttcaaagccattgaacccacagagctgtgttgctttaaagccaccacaagggtacagcattaaatggcagaactggaaaagcttcttagggcatctcatccagggattctcaaaccatgtcccccagaggccttgggctgcagttgcagggggcgccatggggctataggagcctcccactttcaccagagcagcctcactgtgccctgattcacacactgtggctttccacgtgaggttttgtttagagggatccactactcaagaaaaagttagcaaaccactccttttgttgcaaaggagctgaggtcaagggtggcaaaggcacttgtccaaggtcgcccagcagtgctgctctgatgacttgtgcacatccccaagggtaagagcttcgatctctgcacagccgggccaacctctgaccccttgtccatgtcagtaaaatatgaaggtcacagccaggatttctaagggtcaggaggccttcaccgctgctggggcacacacacacacatgcatacacacatacgacacacacctgtgtctccccaggggttttccctgcagtgaggcttgtccagatgattgagcccaggagaggaagaacaaacaaactacggagctggggagggctgtggcttggggccagctcccagggaaattcccagacctgtaccgatgttctctctggcaccagccgagctgcttcgtggaggtaacttcaaaaaagtaaaagctatcatcagcatcatcttagacttgtatgaaataaccactccgtttctattcttaaaccttaccatttttgttttgttttgtttttttgagtcggagttttgttctttttgcctaggctggagtgcagtggtacaatctcggctcactgcaacctccacctcccgggttcaagtgattctcctgcctcagcctcccaagtagctgggattacaggcacccgccaccacacctggctaatttttttgtatttttagtagagacggggtttcaccatgttggccaggctggtctcgaactcctgacctcaggtgatccgcccgcctcggcctcccaaagtgctgggattacaggcgtgagccaccgcgcccagccaaaccttactatttttttaaagaattttttccagagtttaatttctgacatagcttaagttttccagtaactctaaactccatctcctttatcgtcattaagtcattcacaaaaagccaggagaagcatttggaaagggcatgataatcagtataataatttgccttgtgtggtcagcacttaactgtttacaaagccctttcacgtgcacagcaggtgggaactgcgcggtgtgggctgggcctgcgctggaagcatatcccgtgaaaagtgttagtgccttaggtgaaagcaacatgtatccctttagactactaacggtatatgttgttcttatgtatttgtatttatttctattttttctatgtttatgtcatatttaaacgatatcctactgcttgttggtattaccctaaactgtttaaataaagagctctatttttaaagaaaaaaggtacaattga

SEQ ID NO: 1057 - DNA, 3981 bp, Homo sapiens
agagccggcccggagcgctctgacttgcaagcgggctgcgctgcggagcccagtgcccgagtgacacccgcggagagtgcagggccggggaacgcgagccctcgggggcagctgcaaggcgttgggcagcgcttgcctgcgccgagcgagtctccccttcccggcgctccgccgccccgcaccccactctcccaccctctcgcaacttgggtcgagttgacaactcccgcggcagcccgctggcccgtgccgcctccgctgcgcacccctcccccggggtgagagggagccggcgcgccggttccggggacgctcgggcggcagcagcttggccatgagggcagttcgagtagtctaactcgcggctgtcaccgccactgcagcggagccggccggccgggcgctgcgggacgggcgggcggctgccggcaggaggcgccgagccgggtgactgccgcggcgggcacagtccggggccacagcgccgagcccgggcgggagtggccccgcgcaggcagggagcggcgccgcgcactccaacccggcgggcacctcgggggcgggcgcggggcgcagccttctcgtcccggcctctgtgacaagcgccccggagccgggagcccgattgccgggctcggggtgggcgcggacgcaggcactgggctcgtgcggggccccgggcgtcgcgatgaacatcgtggtggagttcttcgtggtcactttcaaagtgctctgggcgttcgtgctggccgcggcgcgctggctggtgcggcccaaggagaagagcgtggcgggccaggtgtgcctcatcaccggcgccggcagcggcctgggccgcctcttcgcgctggagttcgcccggcgtcgggcgctgctggtgctgtgggacatcaacacgcaaagcaacgaggagacggctggcatggtgcgccacatctaccgcgacctggaggcggccgacgccgctgcgctgcaagctgggaatggtgaggaagaaattctgccccactgtaacttgcaggtttttacctacacctgtgacgtggggaagagggagaacgtctacctgacggctgaaagagtccgcaaggaggttggcgaagtctcagtcctggtcaataatgctggtgtggtctctgggcatcaccttctggaatgtcctgatgagctcattgagagaaccatgatggtcaattgccatgcacacttctggaccactaaggcttttcttcctacgatgctggagattaatcatggtcatattgtgacagttgcaagttccttgggattgttcagtactgccggagttgaggattactgtgccagtaaatttggagttgtgggttttcatgaatccctgagccatgaactaaaggctgctgaaaaggatggaattaaaacaaccttggtttgcccttatcttgtagacactggcatgttcagaggctgccgaatcaggaaagaaattgagccttttctgccacctctgaagcctgattactgtgtgaagcaggccatgaaggccatcctcactgaccagcccatgatctgcactccccgcctcatgtacatcgtgaccttcatgaagagcatcctaccatttgaagcagttgtgtgcatgtatcggttcctaggagcggacaagtgtatgtacccctttattgctcaaagaaagcaagccacaaacaataatgaagcaaaaaatggaatctaagaatctttttgtatggaatattacttctatcagaagatgatcaagatgtttcagtccagtgcacatcagcattgctgacattttatggattctaaacttgtgttgtttcttttttaaatcaactttttaaaaaaataaagtgtaaattaaccgactagagtacttggaaaatgtgatcagtacaagtgaacttaggttgttgccaacagggtccttttaggcagaacccagaaaccagtcaaatctgtagagaagcagtgtgacatcttcaggttaccattattttttaatgagcaggaagtctagaaatgataactagactgtatgtttcatgtgtgtgatttttcagaattcccagagtttactcattcttgttattaaactctagccagttgacatcttcgcaatttcaaggactgatagtgctgtattttctcacgttttctaagtttccgttttgcaaggcctaggtgactttttcatggtgtttgtatgtttagctcttttgaaaaggaattttgaaatctccatcaactgaagtaaatgatgtctgagtgttacagtaaaggtgaccaagtctctttcttaaagtcacaatgactaaagtattagttgaatttttttttttttttttttgatggagtctcgctctgtcaccaggctggagtgcagtagcacaatcacggctcactgcaatctctgcctcccagtttcaagtgattctgctgtctcagcctcccaagtagctgggactacaggcatgcgccaccacgcccagctaatttttgtatttttagtagagacggggtttcaccatgttggtcaggatggtctccatctcttgacattgtgatccacctgcctcggcctcccaaagtgctgggattacaggcatgagccactgcacccagccttgaatttttaattttatctctgatatacttcattaagtgtctggagacctaattatcctaaaagatcatacattttctacctatgaattttgctgcatacagaaagtgccctttcctcaggaagttgctgtgtttcatttctttggatggactcttatctagaatacatagcagctctgcaaaggaacagtttttaaaaatgggaacttctacattgaaaagtccccatttttgtgccaactatgattagtgagaggaagaaatcttattctatggcatatgtatggaagggtgtaaagattcttttgaaaggtttattcacattgtagaacagcaaatgacatttttacagtatttttttgtaaagcaaactattttgtgccttgaatttggtatatgtgtattagtgaaacattgtaaaggtgaacttctacctctgtatctaaatgtataccatccacttgtaaatgactataaactattatgtgattgcttttttttttagaatgtcttgtttaaatagtggccaatgtttaaggctgttaaaataagccaacttttactaattggggagttttataaatgactgattaaatttaaagaattaacttacatgcaattgtgtgattattagttatcagcagtgttgtaaggaaaattattgtgtttttttttatgatcattatcccactttaggtaaagaaaaatattggaatggaatagtgttgggaaacagacattaacaacctagggtgcctgcactcaaatagccgatgttactgtccctagattagagacttgattaagggcttgtttgtaccaaaagtggggaaacaatgccatgacctgtgttttagtttggctgcaccacagatcaaatctgcactgtgtctacatataggaaaggtcctggtgtgtgctaatgttcccaatgcaggacttgaggaagagctctgttatatgtttccatttctctttatcaaagataaccaaaccttatggcccttataacaatggaggcactggctgcctcttaattttcaatcatggacctaaagaagtactctgaagggtctcaacaatgccaggtggggacagatatactcagagattatccaggtctgcctcccagcgagcctggagtacaccagaccctcctagagaaatctgttataatttaacaacccacttatccaccttaaaactgaggaaagtcgtctttacatctaattttattcttgtgtgttataacttaaacctatttctatttttgtttgttattgcccttataagggtgtccatctccaagttcaataaactaattcatttaactttaaaaaaaaaaaaaaaaaa

SEQ ID NO: 1058 - DNA, 2886 bp, Homo sapiens
agaaagggtttgactggaggaacctctggagcagctgttggctggctcctctggctgatggcatgttgaggtacatgggccagcggcagcgagggcatccaatccagaggggtccactctagaggccaggccaccagcaccatgggccagtgtgtcaccaagtgtaagaatccctcatcgaccctgggcagcaaaaatggagaccgtgagcccagcaacaagtcacatagcaggaggggtgcaggccaccgtgaggagcaggtaccaccctgtggcaagccaggtggagatatcctcgtcaacgggaccaagaaggccgaggctgccactgaggcctgccagctgccaacgtcctcgggagatgctgggagggagtccaagtccaatgccgaggagtcttccttgcaaagattggaagaactgttcaggcgctacaaggatgagcgggaagatgcaattttggaggaaggcatggagcgcttttgcaatgacctgtgtgttgaccccacagaatttcgagtgctgctcttggcttggaagttccaggctgcaaccatgtgcaaattcaccaggaaggagttttttgatggctgcaaagcaataagtgcagacagcattgacggaatctgtgcacggttccctagcctcttaacagaagccaaacaagaggataaattcaaggatctctaccggtttacatttcagtttggcctggactctgaagaagggcagcggtcactgcatcgggaaatagccattgccctgtggaaactagtctttacccagaacaatcctccggtattggaccaatggctaaacttcctaacagagaacccctcggggatcaagggcatctcccgggacacttggaacatgttccttaacttcactcaggtgattggccctgacctcagcaactacagtgaagatgaggcctggccaagtctctttgacacctttgtggagtgggaaatggagcgaaggaaaagagaaggggaagggagaggtgcactcagctcagggcctgagggcttgtgtcccgaggagcagacttagtggctctgtcccaggagcagcagcaaggatctgccagctgccctgcagccaactgaggaattggaccattttggaaattactgaagatccggatattttctactttacacctttctctgccttgtatctgaaagggctctaaaatgctgtatcatgttttaggcactttcttcatttttttggttattttggttatttcctttttggggggatctcccagaatatttgaacctggttacatgttgtgtatctttttttgaagccttcagatagaataagcctgccatttcttgcacaaatttaggttttttttttgtttttttttgtttttttttttttttttttggtaggggagggcatagagcagggcggggggatgggactgttaggttgaattaacattacaaaatgatacagtgccagatctcagtttcgcatattgtttttcagggcaggtctgtactgtgtgtagtgctgtttacatagatgaatttaggttgtaataattatttttaaagatttacacagatttgaatagcagtgttaactgttaaccacattgcattaattcccaggcgatttagagctcttggagagccaaggccagccaagagcatttgtagtctggtgacaacccccttttaagctaatttatccagaaccctgatttccctcacttcttgctcattccttctttgacctattgcatttcatgttgagtttttccatcaacatgctgcacctgtcagtcaagtgagcattttttaagaacacattgtactgagaaccacttaagcattgaatgcggagaaagcagtgctacctcagttttgctggaagtagacttctttgatagttttctttctttgatgaagtttctgtattttcatgttgtaagtggaaatacttttttttgtttgtttgtttcatttgccttggagccaaagtttctgttcctggtggtcgggaaactgcctgccggccaactgacttgaaggaaaactgtggtatggagctctgcttgaatttttttttttttaatatttttatttttttctttgaatatcatcagcttacttgtctggcaagggcagaagcctggggttggcctgaactctgccaaacaaatatcaaagtgtatttaatagttaaatttgtgccctttcccttcttgctgcacccatgttgtcacttaacccccaggagttatttattatctttttgttaaagtcaggctcatttggggtaatgtgatgactgtttaggtttacatgaccctcctctcctttccctacccccaaatatgtatatatacatatataaaatatgtatatattttacctatataaaatatatatatatacacatatatgtatctatattcctttgtttctttgcctgcttatactggccataaaagagggagctgccttcaatgtataaagtataagaagagtgccagggaatgccataatggaggcttttggatctgaatttggaccatttcactaaagagaacatgagtttgctcagccctttcctcacaagagggagggccccggttccccagacttctccacgcgctggctccataaaggccagctttggccaggctgccacaggggcctgaggagctcactctgggcctacctggtttcagttagagggtcctcctgttatttttccatttaaaaagtatgtcctcagaaaactgtactggaaggatgggtggcaggaacttgtatagttcagcttccaacactttggaacagattaaaaagggaatcttttaaataaaaacgtataaaaataaaaaaaaaaaaaaaaaaa

SEQ ID NO: 1059 - DNA, 2561 bp, Homo sapiens
aaacatggaggagcgggagcggggggcgaggtcggctggcgccgggagccccgcgcgcccgcccagcccgcggctggatgtcagctctgacagcttcgacccgctgctggccctgtacgcgccccgcctgcctcccattccctaccccaatgccccctgcttcaacaacgtggcggagtacgagagcttcctcaggaccggagtccggggcggcgggcgcgggcgcgggcgagctcggggcgcggccgcgggctctggggttcccgccgcacccgggccctcgggcaggactcgtcgccgcccggacgcgcccgccccggaccccgagcgcatccagcgcctccgccgtctcatggtggccaaagaggaaggggacggggccgcaggagcgggccggaggggtccgggtcggagcaggaaggcgccacgcaacgtgctcacgcgaatgcccttgcacgaaggcagccctctgggtgaactccatcgctgtatccgtgagggggtgaaggtgaatgttcacatccgcactttcaagggacttcggggcgtctgtacaggcttccttgttgcattcgacaagttctggaatatggcacttactgatgtggacgagacctaccgaaaacctgtcctaggcaaagcatatgaacgggattcttcactgactctcactaggctatttgatcggctgaaacttcaagattcctccaagaaggaagcagattctaagtctgcagttgaagattccactctgtctagatactcacagacatccacttggaagttggcttcagtgtggggaagagcagacactggccggggctcacacaagcgttcccgctctgtcccttcttccctgcaggcctctgcaagggaggagtccaggtcagagctgtcagggaggactacacggacagacggctccagtgtgggaggtaccttttccagggctaccaccctttccagaggccagtcccgtaagaaaaagcgaaagcccaaagtggattaccagcaggtattcactcgacacataaatcagattttcattcgaggcgagaatgtcctgctggttcatcttgcacagtgaccagctcagcctgagctttggtttttagaaataaagtgcatgaattgctgctatgctgtatcctagtatcccagtgaaactctgagttggaatgattccctctggtcctgcatatgcagaggacggagcaggctcagccccctggaagatgagctcaaggggaggacaggccttgggagggcaggcgtttgcattaatatcaaggcaaaaagcattcatagatacatgcatctgatttggtattgtgatttacttcagaccctgaaaccaaatatctgatcttccattagacttaggggtcatgatatgagtggaatttacattttagatactataggggaaagaaaagtctcaaaaagaagtattgcatgtctaaaagctagtgccctgagtactcatgaattcgattccaagagtagtggtgtaaattgccttggagccctgcatccacgtcttgtaactaacttttgaattttgcctgacatgattctctcttgatgaagaaatgacatatattatctttgaatatctacaaggaaagttaccaacttatgtaggggtgaaatttggataggcggtatgctcaaagcagccagcaatgagtgctctgttttgatccttcttattattatggaaaggagtacaggacctcttcagtcttccccttaccagaggtagcctctgcaaatggcataccagatgggactctaagatgcttgtgtggtggcttcttgtccttctctttgacttctgtggcatggtgctagtgcatgtaccctgtggtattgcccctctgtccgtagtgtgaactgtcctgtgagctttatgtcaggagactgtgaccttcatgtccagcttcaaagagttgtgcatgaactcggtaatacacatcacacggctgagagtcccctttccaggcagggccagcatgtgtagaatatctttcagaatatggtttcaccatgaaacaggggtggtagatttattcccttgtgtcaggccaaagaagttcttacaaagtacagtgggtagtgtctaaagcgacactttactcacagcctggcttgagtcaacaggaacaccatagcacccacaaatacttctacttgaatcatattctgtgctttttcaatcactagtgcagaataggctgcatttgacacagactgttaggcaatattgatttttttgttttgtttttatttggttttatctgagataacttatgttcaaggtgagaataagaaatagccaactagttaaaatgtatgaaaagaaaactttcccctgctgtatttgttgtgtaacataaataagccttctgagaagcagggtgaataaagtttagggagctgggacacctggtcctgctagctggaccactggctcatcatgcaatgaaaaggtgagcagacttaacccctccgtgcctcagctttttccccacagacacctacctcacaggggcattgag

SEQ ID NO: 1060 - DNA, 2543 bp, Homo sapiens
aggctattgccgcttcctgtttggactaggagccccgcggtcgcaaattgcgagaatttgggaagggaatctttatcttctcgtctagttctccgaggttgaaggctcggcctgctcagagaaggaaactgaggtccaccgagttggagaaacctactcaacaccaggactaacttcttcagtgcttagagtgtgagaaaaatggcaaatatgaatagtgattctaggcatcttggcacctctgaggtagatcatgaaagagatcctggacctatgaatatccagtttgagccatcggatctaagatccaaaaggcctttctgtatagagcccacaaacatcgtgaatgtgaatcatgtcattcagagggttagtgaccatgcctctgccatgaacaagagaattcattactacagccggctcaccactcctgcagacaaggcactgattgccccagaccatgtagttccagctccagaagagtgctatgtgtatagtccattgggctctgcttataaacttcaaagttacactgaaggatacggtaaaaacaccagtttagtaaccatttttatgatttggaataccatgatgggaacatctatactaagcattccttggggcataaaacaggctggatttactactggaatgtgtgtcatcatactgatgggccttttaacactttattgctgctacagagtagtgaaatcacggactatgatgttttcgttggataccactagctgggaatatccagatgtctgcagacattatttcggctcctttgggcagtggtcgagtctccttttctccttggtgtctctcattggagcaatgatagtttattgggtgcttatgtcaaattttctttttaatactggaaagtttatttttaattttattcatcacattaatgacacagacactatactgagtaccaataatagcaaccctgtgatttgtccaagtgccgggagtggaggccatcctgacaacagctctatgattttctatgccaatgacacaggagcccaacagtttgaaaagtggtgggataagtccaggacagtccccttttatcttgtagggctcctcctcccactgctcaatttcaagtctccttcatttttttcaaaatttaatatcctaggcacagtgtctgtcctttatttgattttccttgtcacctttaaggctgttcgcttgggatttcatttggaatttcattggtttataccaacagaattttttgtaccagagataagatttcagtttccacagctgactggagtgcttacccttgctttttttattcataattgtatcatcacactcttgaagaacaacaagaaacaagaaaacaatgtgagggacttgtgcattgcttatatgctggtgacattaacttatctctatattggagtcctggtttttgcttcatttccttcaccaccattatccaaagattgtattgagcagaattttttagacaacttccctagcagtgacaccctgtccttcattgcaaggatattcctgctgttccagatgatgactgtatacccactcttaggctacctggctcgtgtccagcttttgggccatatcttcggtgacatttatcctagcattttccatgtgctgattcttaatctaattattgtgggagctggagtgatcatggcctgtttctacccaaacataggagggatcataagatattcaggagcagcatgtggactggcctttgtattcatatacccatctctcatctatataatttccctccaccaagaagagcgtctgacatggcctaaattaatcttccacgttttcatcatcattttgggcgtggctaacctgattgttcagttttttatgtgaaatacctcaactgtttttttcaagagctctcatgatattttgagccttgacaacagttctatataaattcacttgtaaatgctgctgttgtgtaattctaaatattttctaagataatttgaaagcaagggaaatagtggccccttaatgagtatttttttattggggtggggaaaggggcaaaaagaatgatcttagtgtctttacctttctcatattaactcacctctttattctgtggtcttttctgaatagaaatgtatgccctaggaagaaatcatgctgggttttgcttttagagataaaaggtggtggatttattttgcctgcagtaaagattctcagggtgtcagagcagcatattgtcaaatcctgcttctgttttatgtttcagtgtattcactttcattttcttacttactagaccatttctgcagtttgcccaaacctctactgtttgggacagtaagccaaatacctcatttttaaaaagaagttttcatggcatcagtgttaataaagtacatttttaactgagtcttaatctctatttgaagaaaaagtagagacaaaagtaatgtcaatgtaatccccaggatcatgaaatgtatacaaaataaataaagtaggagagtttgttgctgtctaaaaaaaaa

SEQ ID NO: 1061 - DNA, 1999 bp, Homo sapiens
ccggagccccgccagagcccgacttcagccccagccagatcccgcgtcaacggaggcggaacggcggaccccgtaccctggcagcatcggagcaccggcgggtgaaggcaaggtccctggactggtcatatacctcttgtggccctggcagaatcaagatgaggccctgtcatgcctccccagtgaggcctacagtctgagcagacagcatggcctgccactggcagtgaacaccatgtctgcaggaggtggccgggcctttgcttggcaagtgttcccccccatgcccacttgccgggtctatggcacagtggcacaccaagatgggcacctgctggtgttggggggttgtggccgggctggactgcccctggacactgctgagacactggacatggcctcgcacacatggctggcactggcacccctgcccactgcccgggctggtgcagctgcggtagttctgggcaagcaggtgctagtggtgggtggtgtggatgaggtccagagcccggtagctgctgtagaggccttcctgatggatgagggccgctgggagcgtcgggccaccctccctcaagcagccatgggggttgcaactgtggagagagatggtatggtgtatgctctggggggaatgggccctgacacggccccccaggcccaggtacgtgtgtatgagccccgtcgggactgctggctttcgctaccctccatgcccacaccctgctatggggcctccaccttcctgcacgggaacaagatctatgtcctggggggccgccagggcaagctcccggtgactgcttttgaagcctttgatctggaggcccgtacatggacccggcatccaagcctacccagccgtcgggcctttgctggctgcgccatggctgaaggcagcgtctttagcctgggtggcctgcagcagcctgggccccacaacttctactctcgcccacactttgtcaacactgtggagatgtttgacctggagcatgggtcctggaccaaattgccccgcagcctgcgcatgagggataagagggcagactttgtggttgggtcccttgggggccacattgtggccattgggggccttggaaaccagccatgtcctttgggctctgtggagagctttagccttgcacggcggcgctgggaggcattgcctgccatgcccactgcccgctgctcctgctctagtctgcaggctgggccccggctgtttgttattgggggtgtggcccagggccccagtcaagccgtggaggcactgtgtctgcgtgatggggtctgaaggcttggtgggagctgtccactggagcagctcattgccagaggcagctatttctatggctccttttgctgctgaggacactcactgtggctctgtgggatgagagaggcatgggggtgagcacttgaaacactgccttggggccttgggttaggggagcctttgtctttagtgcaggacacacatatgcttacacctacctttatcaccattcgttcatgaatcatgcctagctccatccttgccctgggacctactaggccttccatccaactgggaaatggggagaagcaaagctggcctcatgctcttcagggtcagttcctatctggagttgaccaggcctaccccagttgccattcctgaaaaatctcagctgccaggctgcctttagggtccctgcagacccaggagagttgagagggtgggggacacagagagaatagagaggatgtgggaactgccagagggccggagcgcaggagttcaagtggaggaatgctggctttgagccctctacactgctggttgtatgaccttggacaagtcacttcacctctctgtgcctcagcatcctcatctataaatggggatctctgaaaccttcctaccctacctacctcacagggctgttgtgaggacccagggagtttggatgtggaagtaaaagtgctgctaaaacctaaaaaaaaaaaaaaa

SEQ ID NO: 1062 - DNA, 3517 bp, Homo sapiens
ggctggggctccgctggggaaccggccgagcggcgcgcgcggaggtgtccggcggccaggaggatggccaaggtcccggagctggaagacaccttcctgcaggcgcagcctgcgccccaactgtccccggggatccaggaagactgctgtgtgcagctcctgggcaagggcttgctagtctatccggaagaaacagtgtacctggcggccgaagggcagcccgggggcgagcagggcggcggggagaaaggcgaagacccggagctgccgggggcagtgaaatcagaaatgcacttaaacaatggtaacttttcctctgaagaagaggacgccgacaaccacgacagcaaaaccaaagcagcggatcaatacctgtctcagaagaaaaccatcacgcagattgtgaaggataaaaagaagcagacacagctcacgctgcagtggcttgaagagaattacattgtatgtgaaggagtttgcttaccacggtgcattctttatgcacactacttagatttctgtaggaaagagaaattagagccagcctgtgcggccacctttggaaagacaattcgccagaagtttcccctcctaacaacaaggcggcttggaacaagaggccattcaaagtatcattactatgggattggcatcaaagagagcagtgcatattaccactccgtttattctggaaagggcttgacaaggttttctggaagcaagctaaagaatgagggtggcttcactcgtaaatattcgcttagctcaaaaactggaacacttcttccagaattccccagcgctcaacaccttgtataccaaggatgcatttctaaggacaaggttgatacgctcataatgatgtacaaaactcactgccagtgtatcctggacaatgcaattaatggaaactttgaagagatccagcattttttattacacttttggcaaggaatgcctgaccatctccttcccctgctcgaaaatcctgttatcattgatattttctgtgtttgtgactcaattctttataaggttcttacagatgtactcattcctgcaacaatgcaagaaatgcctgaaagcttattagcagacataagaaattttgctaaaaattgggaacagtgggttgtttcatccttggaaaacttgccagaagctctaactgacaagaaaatacctattgtgcgaagatttgtatcttctctgaaacgacaaacatctttcttacatcttgcccagattgccagaccagctctctttgaccagcatgtcgttaattctatggtgtctgatattgaaagggttgatttgaacagcattggctctcaagcccttcttaccatttcaggcagcacagacactgaatctggtatctacactgaacatgactctatcactgtgttccaagaactgaaggatctccttaagaagaatgccactgtggaggcttttattgaatggttggatactgtggtagaacagagagttattaagaccagcaaacaaaatggaaggtcattaaagaagagagctcaagactttctgttaaagtggagtttttttggtgctcgagtaatgcataatctcaccttgaacaatgcatccagttttggttcttttcatttgattcgaatgcttctcgatgaatacattctcctggccatggagacccagtttaataatgacaaagagcaggagttacagaatttattggacaagtatatgaagaattcagatgcgagtaaagctgctttcactgcttctccgagttcatgctttctggccaaccgtaataaagggagcatggtttccagcgacgctgtgaagaatgaaagccacgtggagacaacctatctccctctgccatccagtcaacctggaggcctaggccctgctctgcaccagttccctgctgggaacacagacaacatgccgctcacaggtcaaatggagctttcacagattgctggtcatctgatgacaccacccatttctccagccatggcaagccgaggaagtgtcattaaccaaggaccaatggcagggaggcccccaagtgtgggcccagtactgtcagctccatcacactgctccacatacccagagcccatttatcccactctccctcaagccaatcatgacttttatagcaccagctctaactaccagactgtgtttagggcacagccccactccacatcaggactctatcctcatcacaccgagcatggtcgatgcatggcttggactgaacagcagctttcaagagacttcttcagtggcagctgtgcggggtctccatataactcccggccaccgtctagctatggcccatccctgcaagcccaggattcacacaatatgcagtttttaaatacaggaagcttcaatttcttgagcaacacaggagctgccagctgccaaggagcaacactgcctcctaattcaccaaatggatactatggaagcaacataaactacccagagtctcacaggctcggatcaatggtgaatcagcacgtttctgtcatcagcagcattcgttcactgcccccctacagtgacatccacgatccacttaacattttagatgacagtggtagaaaacagaccagctcgttttacacagacacatcatctccagttgcatgtcgaactccagtcctagcttccagtttgcaaaccccaattccttcttcctcatcccaatgtatgtatggaacttccaaccagtatccagctcaagaaaccctggactcccatggaacaagcagtagagaaatggtgtcctctttaccacctatcaacactgtgttcatgggaacagcagctggaggcacttaaaccaccaatgtgggagggggtgctaaaactttaaaaaaaatctctactgtgcaaatatcattattcactcagacttccataagagtaaataaaaatgaatatgcagtggctgacattgttttaaagtcactggtactatggacaactccatagtgaatggagatacttgcagagcttgtcatgcacactaagagtttaaaatgtgagctcattattaatcatagtttcaaaattatcaaataaaaccagtgaagatctgaagatgcaaacatttcaactatgaagatttacatttcactttctaatttattaaacatctgtgtgcctttttatctttggtttcttttaaaaagtatatttaatgcctttacaatacctttaatttattaggatctcagaatcattgtttactatcccttatttgacaaaaagtcaaatgtgtatgttctacctccaacggaaatgtttacaaggtcaagacttaattcaattcagacaagaccaaagttgcttgacttcaattcctgtgcattagtgtgatgatttctgtcacatagcagcattccgattctatgtaactgaatggagatgataagtgctttcccctctttatttaaaaaagattaaaaggaataaaagaaataatgtatggaaataaaaaaaaaaa

SEQ ID NO: 1063 - DNA, 10844 bp, Homo sapiens
atagagacgaagaggtggcggcggccggagcgcccccggcctctgtcggctccgtaggctcaggtagacctggcgacgacggggctgcagctgcaggggctgagctggctgggcaagcgcgggccgcggaggaggtctcaggggtgaatcatttgatgtaaaagacttgactccataatctgcatctgtcctaatgctgtcatctggagtagagactcagccagttccacttgattcctccatgtctgccgtggtacaggaattatactctgaactcccagtaagtgtctccagagagcttcatgctgaccctgagccaagtgtgattccagatgtaaaacctggagcctcaagctctcttttaagtcagaatagggcattgcccttggagctgcagaggactcatgtggagagttgttgtgaagaaacctatgagaccttggatcatgggagtgagcctgggcgatgtgggctagtggactccacagcaggaggttctgtggcatctgggatcttggatagggcaaagagaagcgagagcatggagccaaaggtcttcagagatccagggggccaggcaggaattataagagaaccctctgagggagcaaaggaagatccacatcaacattccacagctgctgaagaaaagactagcccgagtcaggaggatctcctgatgcagtccagcaaagaactttcacatgtggacctccctgaagattttctaaggagcaaagaaggaaatgtacagattacagctgaaactctgctaaaatccgccgaagtacaaggtatgaaggtcaatgggactaagacggataataatgaaggacacaaaaatggcaatgtgagtaaagatctctcagctggatgcggtgaattccaagaagtagacaaaatcatgaccagtgatgaggtttcagaaaccagcacattagttaccccagaacctttaacctttgtggaccctgtattaacagaagcaactcctaaagaaaaagaatgtgaagaattaaaaagttgtccttggttgtcattaccaggaaacagtgccatttctaatgtggacaatgggaaggaagagttgtgtaaaccaaacctggtctgtgaagcagatgacaatcaccaacagcttcatggccaccataatgaacaacccagttctacacatgatagtcccacagccacaagccctttgaaagaaaattctgaagtttcatgtttcacatcagacttgtctggtccagaatccagaacaatatccttagaaaactgtggttttgaaggtggtggtttgctaaagagatctgctgaaaagacagacagttcttatttttataggggggatgatcaagggaagaacttggcttctagagaagaaaatgaggaacggcttttgattcctaggagtgaaagaggtggaccttttctttttaatgccagggaaccagaaaaggagattagtggtcgttgttctggtgaaaaagagcctgttgtttctccaaaggaaaatatccacaataactgcattcaagacagtctccatacagggaactctagttctttaatgcccaattcttttactgaagccacagaagtaatgttaaataaaaatgatttgaaaattactgtacacgttcaaggtaacttgacaaaccctgaggaccataaagaaacttttactaatatgagccatcctggtggacactctgaagaaagcagtttttcctccttgatgcagattgaagaggcaggacagacaacccctgtagagcccaatatattaagtaaatctttttacactaaagactgtaactccttagtcagcatccagagaaatctggaaggcaacacccagttaaatgaagcatcatgtaatgattttctgtttgaaagaaaatccattgtgagtttaatgccagaggatcaaataagtcctgtaagtgaggtattaaaacccaagcaaggtactgctctgttgctaccatccccagaatttgattacagacctgagtcagaaaaagttatacagacctcacatgatgatattccacttttagatgaacagagcatagcctgtgagatgaatgaactttcttgtaccaatgaactggttgtaaacaaagtagaaagtgaatgtgttttaaatcaacaagtgtcccttaattctcaagaacatgcaaatttgccaactgactctctactgcatttaaacaaagagatgcctttagcaacaggcagagatgcccatcagagccatcaccctccattagagggtagagcagatgtcattgctgatatacaaaccattcccattcagacaaaaataaaagacatctctccaccaggtaaccaaacctgtggtgcctcttcaaactgtcccaccttaaacatcaaaccagtaagcctagagagaaaaaaggaaatggctgattcaggaacaaaagctctacattccaggctgcgctcaaataagagagaagcagctggctttcctcaagtggtctctgtcatagaatgtcacagcgttcaatctcaggatatctctagctgtcatcgtgtaagaaaaaatgtatcccaggaaaacatgtgttctgcttctgctgctttcaagtccagcaaaatcagcctgcaagttgataactctttgataacaaaatatgaaaatgcatttcagcaccgtgatcactgctgccaaggaacaggacactctgtggaaaaaagcagctgtaaagtgagttacacatcacaggaaagggaacttgatgggaaagaaacgaatggcagccttccaggagataagatcagaaacaaaatggtagcaggcttgttaaatagtggaatttcaaacaaaaccattcacacctccagtagcatcaaactcagtgaggaagggctggaaggaaaggagcaggatgtatccaaagaaactgtattttgtaagtataacatctctgatcatgctatacaagaactaaaccagactgtaaacattccaggtcctgaaaaagtgttggaccagtctcctactgttatgttctccagttttaaaaatgtaaaatcagttgaaacactcgatcagaaggcagatgaagtccttgactgtcagagtaaccaaaacagaccagatgaatgcaaaagtgaaggtcagtcagccaaggagatgctaagtagtgaccagagagagactgtcaccgagcctcacggggaggtaaaccacaaccaaaaggatctgctggtcagctcaggcagtaataactcactaccttgtggtagtccaaagaaatgcaatttgaaaggagcctttgtcaagatgtctggttgtgatgagtccacagaaggtatggtagacatcgtctacacggactgtagtaataagcttgcagaaggtgtgctggacgtgaaggcatctaatctactggattgtggtgcaaggcaagagaaactggcatttcaagaggactccaggagtaccttgtctcggagagaactggatgctgcacatacaggaacaactggtcaggattcagatttcccagttactgctgcttctacagtggactttctcaaaataaaaaaatcatgtgaagaaaacgtatgcagatctttaaaagactgtgaaatggaaaagtgtccagactcttgtgcccatgagatggagtctgttgcagatcatgaaccaaataaaagaatattgggcagagtaaatttgtctttaaatgatagccattatggacagcaagataaaggaacatctctcagagaaacacaagaaatgactgaaggatcaagactagaaccaaactctgagtttggcaaagaaagtacctttggaatttcctcaaaagagtcgatgtcttgccatgatgaaagctctgtttccctaagaagcctgaaatccattgaaataatgccttctcaagaaaattcagaaactaatgttaacagtgaagaaactgacctgaaaaatctttgtaaaccaaaagatggtgaaatgctttgtgaaaatgtaaaggactgcacagtccttcctgagatgaaggaaatagtatcaagagattggagtaattctagtgacagagacagcgtatgtacctgtgtggaaaagaatgcttgcaaagcttgtcaccctcacgagaattcctctgacagacatttgcctttgacagtgaaaacagatattaaagtgaaaggagaagaaaccgaagagcatcagaggggacgactgggttacttaactgttggggagcaatctgaggagttggttaccagagaaactggcgatggcgatcccgtgagcaacatctctcagacccattttaaatgccgggggatacttaatcatgctgaaaaacagcagagccctgaggttttggactacatgttgcagaaagaagagaaatatatacgtcaacaaaaagcacatacgatatcgcaacagtgcatatcatctagtctgttgttagatgatgcacaaaatcagaaccaaccgaaggctgacaaagatgagtccaccatgatcaatgaaatcaccctagcaaagctggccaaggacagcattgtggcacagactcagaagttagaagaccagaaggaggaaaggttacatcatccattaaggaaggacactgagtcatgcacaagtccttgccttcttggtgcccctcggaaagcacaagacccctcctctgctgggtgtgatcaaatacatggtgcctttgcgaagaaaggagttcttcccttaaagaagcagccccatcgaacttgtaagaaagtttcctatcaggagcaaatcattgttgggagaaaaataggtaaaatcagaagttctgcctttttaaagagttcttccaatcccatccccacaaaagcgcacagacttctcagtttgtgtactctgtctgcacctacacgattagaacctgaaacagcacctaccaagagcttggttagtcacataccaaagcagatgtctacaccgtgccatcccttgaggagcctgaattttaggaagactaccaaagaatcagccttactaaacaagctgtccatccttgcctccaaactggccccagccatgaagactcagaagctaagataccgacggtgttcctctgaacttcttccaatggctaaaagctacaagcgcctcagatataaaagactcctggacggattttcatccagcacagagcagctgaatccatatttggcagctagtggatgggataagaggcctaacagtaagcccatggcactttattctctcgaatccatcaagatgaccttcatagatttgagcaacaagatgccgtccctgctgtttggttctgaaatcttcccagtatcctttcatgtgaaatcatccagctcagattgcacgactgagtcctcaaggacttttcctgagcactgtgctccggcaaggcttgccttaggagaggccctccagtgcccgtctcaacctcccaagtggaccttttctttcttcttgtcccacggttgccctgggatggcaacattcagggaagacactggcgtccatagtcagacccacactcaggctcctccccagcctccagctcctctccaagactatggaggcactgccatagtccagaccagagcagactgctctgtccttggccttcacacacttctagcactttgttccccaggatgttaccgaatctggacaaaaaaacggagcttctccagccacatgcctaccatgcagaggctcttcatgacccagtttacacagggcctgaaagggttacggtctccagcctccatagcagacaaggtcttctgttctctgccctactcggtgggcagagtcctatccatttggagccagcatggtccttctgtctgctccttcgaaatctcttctcttcattcccctcactgcaagcggcaaccaagtctgggcaccacaagcagccacaccatgttaccatatgtgcctcttccaggcatggaagctacatataacaccagcggcagtcagacgaggctggagcctccattccctgccttggtaccaaagtcttgcttggtagcagaatcagctgtcagcaagctcctgctttcagcctctgagttccaggttcgtggattggatgagctggatggtgtgaaagcagcatgcccctgcccacagagcagccccccagaacagaaagaggctgagccagagaagaggccaaagaaagtctcacagattcgcatccggaaaaccattcctaggccagatcctaatcttacccccatgggccttcctcgacccaaaaggttaaagaagaaggagtttagtttagaagagatatataccaacaagaattataaatctcctcctgcaaacaggtgtttagagaccatctttgaggaacccaaggaacgaaatggtacactaatctcaatcagccaacagaagaggaagcgagttctagaatttcaggattttacagtcccgcgaaagaggagagctcgaggcaaagtcaaggtggcaggcagctttaccagggcccagaaggcagctgtgcagagtcgagagctggatgctcttttgatacagaaactaatggaactggagaccttctttgccaaggaagaggagcaggaacaatcatcaggctgttgagaagcgattcagtttgagggtctcaattttagggtttttttgttttgttttgtttttgggttttttttttttttttggacctccttggaaaaggttgcctaattttgccctaccgccaaaccactcaaaaatgcacagtccatgaatttttacctatttcaaggtgcaacctttttagaaactggtgaaggagggtcctctacttttactgctgagtatagaacctcaggaatgctccctttctcctggaaatggacctgaacgacatccagccacctcctcagtctctgccatccacaggaggaagcagcagcctatcttcagtaacactaggattccaaggacacacaggatttgcacgtccatatgaaagttccgctttgtttacggtggtgctagaccaagattattagaaacgtggcctagggagggggacctggcgtcctgtcctgtgtggtctcactggctcatttcagtagttgaggaaagatgagctgttgtgttttcttatcttttgtctgcccaggacctattgatgtgagtgtatgtgagagtgtttgtgtgtgtgtggctttttcccatcgttttctcccctctgtgactgggtcactagtgccagaggagcccgtccaggccccattcgaagtaagttgcactttttaatgttgtggtgtggattattttcatttgttttattttcttttttgttgttgtttttgtactattattgctgcatgtgtggagcctttaaatgtgattttaaaacatttttttaaggagaaaaacaatacatgtcttaagaatacatgataggcatttgacccagttgatcgctgcatggaagagacatttttcctattcatgtgtttcaggcaatcccttccccatctccagcttctagtgtaactcattagagggagcactttttttcatctgggttctcattcttgcccaccaaatacatgtatttattttagtgatttaagtaagagcaggtttctctcccgatcattgaaaaactactatggttgggtgtggtcttaatggtttttatctgaaatggtgttaggtaacaaaattgagtacaacggcttgggcagtgatacaggctgacccacagtatttgtggctttccaggcagcccgcttcaagtgtggggagagagtcggggtcatgtttcagacccagagatgtgttcctgcagtgggatctcaaaaatccccagccagccttctttgagggccacctcattgtactctgggctcctacgtcacatctaccggaactgtcaaatgctggagttagccgagtttctgggtttgtgcctgcaggagtctgtgggcagagggatgctgtgggtcagcagcctcgaggtcttgttccttttccactgaagtcctgtgtgtccatatcctgctccccttcccctccttctctaggggtttctctttctctctcaaaacaagagtttagagaattaacattccatggctagtgagtgggatgcaaaagtcatcgtcaggacaccagcatcacctcttcatatcctcctgggagccactggcatggagcagccgccgatgggaaccgtcagagttctagggacatttccaagtcagtctattagagaagagtgagtggcacgtcctggaatgttggccaactctcctaggtttcttttgcttccccatttgctagtggatggggagatgggttgggggtggggggtctctatgtgccttgcttttgcaggttgacagtctatgccacactggagcagaaaaactgacatgagccagagggaaaagtgtgccacggctatgttctaggcccactgcctcagacatagcattgagacgagtgaaatacacacttggtcatccacggaggcttccaaggccatggccaaatacagttagaagagagccaggcttccgtaccagctctgaatgatgctaaccagattctgtcattctacatccactttgcccagactgtatagacacgacctatgtttcacctcaatacctctcccttcctgggacagggttcttagacactaaatgcttctctctgacttttttgcttaagggagtgggatgagtagtacattttgcccttgtccaggcatgtttaaggagctcctactggacaggttgcagactagcagtgagtcaacagagccctgtttgccagctctgttgccagtatagatgcagtgatgtggcggctatgtttcccagagacaacagtgggcacagctatagtgtcaccaacatggcagagatagtttcaactgtgcctgttacaggtgtggcactcgaaggaccagaagcagcggtttggaacatgggtaactgggagcagaggactggaagaaacagagctgggctccttccctgtcctgacaatgtaggagaggagttgttgtgaggccagccctgcccgtcgttgaaattctggacctaccctctagctaggtcccttcccctgctccaaagttgagaagggggccccactgcaaacttgaaattacttacctgaaggtgatgtatatacctaggctccagctgcgctcagccacacctgtcttaacattcagtttcggcactgagccagctgcagtgttgtcaggggtccccaggcccgtggtccctaaccacgatgggacatggtaatcggctgctggcacaccacctgcccagagctacaggaggtctggttctggggtggagttggtacagtttctgagtatgggaacttccctccccaagtggtgggaagttacagttaactacagcttactcaactatcacttccagaggtttagtgtttttaatatgggaaagaggagaaatctcaggtctaatcagggttctgcccatcagcttttcactgaaactttcaactgtgttttgttttttgtttttttttccatctttcagtttctagctgtgtttgccttctccctccgcgttccctcctctttttttgcttttggtctcctttccagcttcatgtctccatgagttcagctgtacctcatctcctgttaaagcagatcatgtccactttttcttactgaccttactctaagctacagtagctgagggaggtacggtgaagacatgtagcgtttgccttattcggagcctgaggagcccagaaacccatgctgtgaatcccaaaactcagcgctcctcaagagctgtgaaaatcatgatactttgtcacaattttgcctgaaagggtctttggcacgggctccagagccaacctgaggtccattccagatcccactatctgggcgtgagacctcccccgtggctccttccttgcccactgagccaagagcagcagggagcgtacaggacgggagcagcagatccaaggccgcggtgcagccaatgaatgcacggccgtcgctccgtctccaggctggaattccgtctcataatcaatgccatgtacattaagatctgcgaaagaccaacttttaggcagtgatacttttctcccattccctggggtggggggagtatgcagttggtgctttctgtaattcccttgttctgttttgtttctgtaagcttttcccctggtgtcatggaaaggacttcttaaataaccacattgtgggtggctgtatccaaagtttaaataattggccagaagtgcagagtatcctttcctggattcgtgtcagaaaagggctccttgccacaactgaacttactgtataaaaacctggctagggagatttaattttactaaaattacagtttaatgttaccgtctagccacaaatcaagcagcaaaagctattttgatgatgaaagggggtccccgttgagctggccatctagtgcagtgtgctctcagattccatgtttgttgattgtgtgtcttcacaagcccctctctggtgctgaattggatttgaattcttggtgagaggcctcagcatctccttgggctggtctgggccagtaaaaatagctgcctgacatgtttatatattatcatggtcagtagttcaatgaaatttgtacatttttggtaacattggtatacatgatgcccctgcagttccttttctgtttggtagtttgtgactctaagatttccactgttatgtgtgttaatttatgaaaataaatttttttgaaaacctttcaaaaaaaaaaaaaaaaaa

SEQ ID NO: 1064 - DNA, 14461 bp, Homo sapiens
atggcggagccgcgcagagtagcgttcattagcttgtcaccggtgcggcggcgcgaggccgagtacccggggcccgagcgtgagcccgagtacccccgcgagcccccccggctggagccgcagccgtaccgcgagccggcccgggcggagccgccggccccgcgggagcctgccccccgctcggacgcgcagcccccgtcgcgggagaagccgctcccccagcgcgaggtcagccgcgccgagccgcccatgtcgctgcagcgggagcccccgcggcccgagccgccgccgccgttcccgccgctgcccttgcagccgcccccgccgcgggagtcggcttcccgggctgagcagccgccgcggccgccgagggagacggtgcgcctggagctggtgcttaaggaccccaccgacgagagctgcgtggagttcagttacccggagctgctgctgtgcggagaacaacggaagaagctcattcacacagaagacccatttaatgatgaacatcaggagaggcaagaggtggaaatgttggctaagaagtttgaaatgaaatatggtgggaaaccccgtaaacaccggaaggatcggctacaagatttaattgatataggctttggctatgatgagacagatccatttattgataactcagaggcttatgatgaattagttcccgcttctctaacaacaaaatatggaggcttttatatcaacactggcactctacagtttcgccaagcttcagatactgaagaagatgatattacagacaaccaaaagcacaagccacccaaggtccccaaaataaaagaagatgatattgagatgaagaagcggaagcggaaagaggaaggggaaaaggagaagaagccaaggaaaaaagttcccaaacaactgggagttgtggctctaaattcacacaagtctgaaaaaaagaagaaacgttataaagattctctttctctagctgccatgattagaaaattccagaaagagaaggatgcattaaagaaggagtctaaccccaaagtcccagtgaccttgtcaaccccttctctgaataaacccccatgtgctgctgcagcactggggaatgacgtcccggacttaaatctgagcagcggtgatccagaccttcccatttttgttagcacaaatgaacatgagctgtttcaggaagctgaaaatgccctagagatgctagatgattttgacttcgacagattactggatgctgcttctgatggtagccccctatctgagtcggggggtgaaaatggaaccaccacccagccaacctacacttctcaggttatgcccaaagtggtacctacactcccagagggtctacctgtacttcttgaaaaacgtatcgaagaccttcgtgtagctgccaaactttttgatgaagaaggaaggaaaaaattctttacacaggatatgaataatattcttctggacattgagttacagctacaagaactaggccctgtcattcgcagtggtgtctactcccaccttgaagcttttgtgccatgcaataaagaaacactagtaaaacgtctgaagaagttacatctcaatgtccaggatgatcgtttaagagaacctctgcaaaaactgaaactggctgttagcaatgtcatgcctgaacagctatttaaataccaggaggactgccaggctcgtagtcaagctaagtgtgccaaattgcagacagatgaagaacgagaaaaaaatggatctgaagaggatgatgatgagaaaccaggaaaacgtgtcataggaccaagaaagaaattccactgggatgacactatcagaactttgttatgtaaccttgttgagatcaaattgggatgctatgagttagaaccaaataaaagccagtctgctgaagattatcttaagtcttttatggagacagaagtgaagcccctgtggcctaagggctggatgcaggcaagaatgctttttaaggaaagccggagtgttcataatcatcttacttctgctccggcaaagaaaaaggtgattcctgcacctaaacccaaagtaaaggaggtgatggtaaagacccttcctctccattctttccccactatgcttaaggagtgtagtccaaaaaaggaccagaaaactccaacatccctggtggcttcggttagcggtcctccaacgagctccagcacagctgccattgctgcagctagctctagctctgcaccagcccaagaaaccatctgcctcgacgactcactagatgaagacctttctttccattcaccttcactggatcttgtttctgaagctttagcggttatcaacaatgggaacaagggccctccagttggctcaaggataagcatgccaaccacaaagcctcgtccaggactgagagaagaaaaattagcaagtatcatgagtaagctgccactagctactcccaaaaaactagattctactcagactacacattcttcaagtcttattgctggtcacacagggccagtaccaaagaaaccccaggatttagctcatactggcatctcttcaggccttattgctggttcttccattcagaaccctaaagtttctttagaacctttgccagccaggctacttcaacaaggacttcagaggtcaagccagattcacacttcttcctcttcacagacccatgtctcctcttcttcccaagcccaaattgctgcctcttctcatgctctgggaacatccgaggcccaagatgcttcttcgttaacacaagtaacaaaggtgcaccagcattcagctgtccagcagaactatgtgtctccattacaggccaccatcagtaaatcccagaccaaccccgtcgtgaagttaagtaataatccccaactctcctgttcctcctcacttattaagacttcagataagccacttatgtaccgccttcccttatctaccccctcacctggaaatggttctcaagggtcccaccccctggtttctaggacagtacctagcaccactacctccagtaactatttagccaaggctatggtgtcacagatctccacgcagggtttcaaatctcccttctcgatggctgcctccccaaaacttgccgcatctcccaagcctgccacatctcctaaacccctgccctcgcctaagccttctgcctcacccaagccctctctgtcagctaagccttcagtatcaactaaacttatttctaaatccaacccaactcccaagcctactgtatccccaagtagttccagtccaaatgcactagttgcccagggtagccactccagcactaacagcccagtccataaacagcccagtggaatgaacatcagcagacagtctcccaccttgaatttattgccctctagtcgcacttcaggccttccacctacaaaaaatcttcaggccccctcaaagctaacaaactcatcatccactggaactgttgggaagaacagcttgagtggaattgcaatgaatgtacctgccagcagaggtagcaaccttaactcaagcggagctaataggactagtctgtctgggggaacaggaagtggaacacagggtgctaccaaaccattgtctactccacatagaccatccactgcctcagggtcttcagtggtaacagccagtgtgcagtccacagcaggagcatcattattggctaatgcctcacctctgactctcatgacatcacctttgtctgtaacaaatcaaaatgtgactccttttgggatgctgggtggccttgttccagtgaccatgcccttccagtttcccttggagatatttggctttggaacggacacagctggagtgacaaccacctcgggatctacctcagccgctttccaccatagcctaactcagaatttactaaagggtttacagccaggaggagctcagcatgcagcaacgctttcccactcacctctgcctgcacacttacagcaagcatttcacgatggaggccaaagtaaaggggacactaaattaccacggaaatctcagtgactgcccagcaagcaaaggagacgaaatgtttagttgactgatggaatctacctgatgggaaagtacttatgtggtcatagggctgctgtttctgtcgatgtttacattctctcgtcccaagcactgtggtgaggaggaaaaagaaaagaaaacattacttgagcaaagccaggtgcaggaggaagaaatgcttttgtgcaaagttagtgacctttggtctcttctaaagaatgacagagttaccgtattaacagacttgaaagagactcagttgtcaaacccacagaaatacaaatttgatttttcccgggggaggaagaaggaagtgaagagaatttgggtaaactccatccatcctgggggttggatctgaacacttacagacataattggtaataaaaggcattaaaaactggaattaggccagtttgtcaggaataatgatcatgtctatttgaatggactgtgtagcagatttgccacaaaaagaaataataatgattctatctccgatagacagtagctgcatagcacaccctcgaaaatcctgaacaaacttgaatctcctccagtgtgtagcaacttccctcaatcagtggactaaagatccttcaggaaagttattttagcacagtgatatatattattaaatcatctagatttttaaaaatcaggaagttgagcctgttgctcttaagagatgaaacctagatgtcccctttttgtaaaagggtcaatttcatcttccgttcagaagcaggtacttaactcttttcttcaggtgatttgtgcatctagtattgactggttaattcttatttccattcttgatgttaaaatgtgactgtgttcacatttttctcctgagaaatggggatctttacagggttattgctttgctgcttttagcccttgcagcaacataaactctaagtttccccagttcatctaacttcacaacttctccttctgttcttttagctagtggtccttcaggtgattattagctattggtataaacaggtagaagtgtacactatgtttcttcattggtcattcaaatggcatgaatatagtttttgaatttttaagatggtattttaaagggaggaatcacattaggatcacaatcacgacatatttttactccctgtatccagtgtagtgaaattgtttggagcatttgagatcctaaagcttcactatttactcagtgtattggtatgtgagtaaatctgcagaaaataagactccttagttattatagcttccttatgcaaatagcatattcaacaaaggatgttaagggaaaaatttatggttctccttggatacatttgatttgatgggtttttttgccgcattattctagttttttaagcttctgaatattttcatactatatcagagaatggtgtaaactctaaatggtataagcttcatccatttataatgacactaacctaaaaaaaatagactggtagtgacaagatttattgcatatgtgtttattatacattaccctataccattagatttactcaattaagagtattaaccaggcccttttttcttttatacacaaaagtcccagataccctacaggactgtgaataaataaccacagatcggttcagatctgtatgcctatattttgacttcaaagtcacattggcttgcttcatagcgaaaaagttaataaataactgaaaactttagttccaagaacttgttacagtaaagggaaaggattatttcaaaggaatcactgatataatttcttgactctaagaatttagtttatcaataaaacaaatatggatgtagtatgaaccccagtagatattttggaaggatactgggaggatgttgcagagaggtttgacttgaattcagtatgtttgatgaagatttgcttggtttcaattaaggaagcttgcccaatttttttaattttttcaaatgtagtggacctcttgcttttacgaaatatgaataaaaaggtctttgcttcatactaggggaagtgatgggattttcctttgggaaggtagcctttgttttacttctcataccacaagagaagtcgaagtgcgtattaatttctcttcctgaatacttgtatatatgtttgtctgtatgtatatatacatacacacatacattcatataaatgactagtttgagtcaaaaaatcatttgaatttcttaaaaccatcaattctgaatcatgccatatgaagatccctggtgactgtcatcattagaaaagaacaagataatcagttcttttccctgtaacattttatactaaccagtaaaaatatctgaaggcccttggctccaagaatacaatgtggagattcttctgtgttctctttagtcttgattccttgaggactactgtcagatccctaccttaaacccccacctgcactgacgacttacattcatttcagtcaggaccccccttttatgttgtatgaatcagtcaaacatcgttgtatttctgtatagataaagtatgatcagagagtttctacatgtaaatagtaatctatttctttcctagatcataacattgaaaaaggtgcccatactttatggtcacctgtctttaccgtttttattactaaaaacaaacatataaattggttattttttagcacagagacttgtgactcatactgtatttttgcacttaaaaatcaaattatgttattttttaaaatggtgagtcattggaaaggatatctatagagcaacgtgtatttctgaagagcattagcaacatccaaatgcaaaaataatcagcacacatgattatatcccactccttgggattcttgattcaggaagattaagctgtttgttttcaactgttttatattttaaattgccttcactgatatataagctgttactgtacatacaagttaatcctcagtattcacaagcaataacagtcagcagggttgtcctcggagatagctgtgctgagcctcagttggagactgggagcaaagtgtcaagctcattcagagcatccagaataaatgcaagcaataatttccattataattcaattataattcttgtatgcttttgaggtcagagggtaaatgaaatcgtgattttaaaacagcctgaagaaaaaggttttgggaaaggaaatgaggctaatctgtagtcataaaattctgatactttgcggaaattagaagatggtgatagtgcattcttttgtgcccaccccccctctgatggatgttgttagcccaaattacatttttcatatcatggacattgaatagggtttattgaatcaggaaggtaaggggaagaaccgggcacatatgtgttggaatactgtgggtttgacacctggttgaaaacaacttattggacatgatttttaacccaggatatttttttcccaaagcagatctaaattgtttactacccagggttggaaagggcaggcacctctaatctagtctttgtcctctggttgccctctcccacacccctttccacctatacttggttcaagacattttctgaaacgaaaattctgctgttgttcaaactgccattggttatgagaactctgcgtcctttgggatcatctcttagaactccagtgatctatcatatttgctgctacatttgtaaaatgaactttgcctgtattggttgactttaatttacagttctttatttctaggatgttttgtcctctagtttgactcatgtatagaattaggatactttattttaggagtgtaccgtaaaagcacactggtccctttgttgtttttattatttaggtttggaatttgtttgctttttttttgtttgttttttgttttgtttctgtttttgtttttttttaaagttggaaatagaagaatgagaaaaatctataatcaggccaaacttgagaactttcctgtgcttcagcactgtaattctgctgacctaatgttctcaaaagaggcacttttactttctattgtgcatgtatgattgttgttttttgcttttgagggggcttttgtgtttgtaataatgaagcagaagaaaagtgcagtagtagataaatgatcacaacatgttatgcaattttattttataaaattttaaggggaaaagtttaactctttgtaaatcatttcttagctctggtaaaatgcttatattactcctctaaaacatgctcaattcaggcctttgtctttgttaagtgccttttttctttcttttttcctctcttttgaaactgttgtcacattatcttaaagtacagactgataagtcaggggattcaggaggaagaatctcacacttgtcaacatcatgtcatgctgtgtaaccctcttcctttgctttctatgtatatggatatatgtgtaagatacatacattacatatatataaaactaggagctgctgtaccattgcatcctttccaaacactcccctttccatgtttgcaaaacttctgccttgtttattccattgcttttagttgattaaagtgggtggattagaaaagtatcttttcggccgggtgcggtggctcacgcctgtaatcccagctctttgggaggctgaggcaggtggatcacgaggtcaggagatcgagaccatcctggctaatatggtgaaaccccgtctctactaaaaatacaaaaaattagccaggcgtggtggcaggcgcctgtagtcccagctacttgggaggctgaggcaggagaatgacataaacccgggaggcggaagttgcagtgagctgagatcgcgccactgcactccagcctgggcgacagagcaagactccgtctcaaaaaaagaaaataaaagtatagaaaagtatcttttcacaagaggccaccttcgccctttgaatatctgcttgtagaagttaacaataacaacacacacacacacacacacacacacgtcagttactacaagtaaaataaacttagtgaatcattgactattcttggatataacccacttttctgtgctctttaaacttggcataagtaatataggagacagcattggaataacaagagtaccttgcaagtcacattggtaaggtgcgctagactaaacatgtgacaaggctagcgttagaaccgcagtttggtgtctaagtttagaagcaggttagcaactgtcaacatgaaaaatgtatcatattttcttctggaaaatgatttttgaagaaatcatatagctgcatatctatctgttaaaaggttaataaactcagaagtagaaagacttcagatgctgaggaaaacatataatctatagcattcttgagagattttccatttgctttttatttgctagataattacatttggcttaatctgattttatggttatttagatttctcccttgagcaaaataacataattttcagtatctaagattcatcgattttttgttgaaaacaaatagatgtgacatgttaagggagaccaagttgaaccatccctcagacccagtacaaatatacctagtaagtgcccccctttcaatacattctaattgggaagaagaagagactagtggcttaaaaggagaaagcagaagctcctggtagtgttacctgatagcagaacttaccaggcagttggaattcacgagtgttattcttgaatgactatgtctagggggaatattgtttaaccttcgtgcctcagattacccattagacaattgggtataatcatattcacctacctcccagggatatcagagactttactatttcaaaaatattttgagtttttgtaaaatgtcctatataattaaaaatagtattatcatcttcctgcagaggctaaaaaatgttttccttataatgagtataaaaagcaccctatggtttttaaatttaaaaaaatcactggaattttaatttagatacatatttgttatttaaacattatctttgaggtgggataaaatgtttagtttcaggttaacaagggagagaaataacactaagtttaagtagttttttttagccttttacggtgttactgtgatttttcgtcaaggttgtggagctaaagttagataaagttatgatgcttggttattggagttgataaatgatcctggaagttttaactgtctcacttttccatcttctcagtctaatttccttttattgcttgtttgaggacggatagctaagctttttaactttctaagaatgagtatgatgtctcattcttgcaaatcagagattgtgtactaattccattaactgtaggtgtatccagctctgcactgaaggggtgagcactacacacagtcagctggatactcttgtagccattgcacctttgtaattcatgcttcttcaacccatgaaagaggtggagccatcagctgctcaggttgtaagaaaatgggagacggaaggcaggattcactttctaactgggtcggggtggggaaggtcagggtagaaggaaacatgttttccccagctcccaggaggagacgaagatcattttatcccaccttccatccctgtatattaagtagtactactacatagaattttcccgttatcgtttaaaataatagcaacaggaaaagaaaaatggatgctgcagttttagttggggctaaatgctgagcaacgattgttggagtgtgtgtgtaaatttaaattgtagcacatattcagggtcaggaaagcaaaatgttggggatgaggaaccagtgttaccaggttcaagtgagttagtagaaagcaccaggtccaagcagacaaagcatctggttaatttccagaattggctaaggtccactgaatctctaatgatagggtgtgtgtgtgtgtgtgtgtgtgtgtgtgtgtgtctgtaagtcactttttggatttttgttgctttttccagataaggccttagtagcctctaaatatcaactatgcagataaacatactccttttttttttcacatgtccctgtcttttccattctcagataacaaatgttaagacccaaagaaataaggcataagggtttttgttgaatgtgtgtttgttcttctagggaaaattaacagaagcataaaatagagatactttgtgtgttcatctatcgtaaaatgtgaactctgtattcaaaaactatctacagatgctttcactggtgcaaagctgtagttagtatcatggaatgtctttgggttgttaatgataaaatcatcccagtgttcaattctgagagttttagattatatgacacaatgttcaggtttatagagctgaatgggtgatcaaactctaattaaaaatagctttgaatattaatgttgaattcttctttcttggtttcctttagtcttcattctttattcagagctcttaatcatattgctacactagaatatgaattgtatattaggagtctggggaggaaaggttaaattgtcttttacatcctcttctcactcactctggcaacctatcctgtgtccccatagaactgagaagtaaagccctgtgcaggcctgctttagaagactttacatcccagcagaggattcaggcagggactctcaggattttaatcagactgcctttgaataatgtgatattaaattttatttttctcatagactctcaaagtaccacttgcttgaaagtagctacttgtgatctttaatttccttatattgtgatagttctacttttcagtctttcctgtgtatctccatttcatagtgcgttagtacttaaacttcggacacttttccaaactgttaaacaagtcaggaatgcttttcagaatcgcagtagtattattagggtctctgtgtctaggacttacagtcatcagtggtcatcactgggactagaggtgttcttttttttcctcttctcctttgtattaaaaaatagattttgctactgtataatgcggcatttcatgacttcctcttgttacttttcaaggttattctaaagagatggagatcttcattagaggctatttctcataatagtctgccttgcttattttcatactccccctgaaataagcctacttttgcaaacaggccatatgaatcaaattttatgtttgttcctcacaaaattttctacacattatttgttcccactttgctaataataatataatgattttattgtaaatctgtgttttaaatattttataacagagcactaatggaaacctaataaatacaaacaagataactattacccaagataacatggaaatacttctgtttttgaagttaacaacaccgtctgccctcaaagcacatttaggagtatcaaccaagaccagccagttgacatgtttttctgtgtggcaacctgcccttaaattgtcagatcttaactatcttgtgtttgctgtgcttgcagccataagctttcctccttttttgcttatccctgctgtttgtagggttagtgtgccctctgtcagaaaattgggttttctttactatacctgcaaaattaccaagggttaccccaatattgtctagaggaattaaaaagaacttattctcagttgacaaaagtattactgttatacatagttaattggaaagttggccaactttggtcacctatttttgagtcttggctatgcctttgtaattagttacatataccttctgagaccttcagataatcaatgggcctttccccattagaggtaggttcccagcctacaagtatttcctgtgatccatggcaagcctccagagaaaagattcaagctttgcactgcccttttgttgattgtcattgaaaacttactttatttcagaaagtatcaaaaataccaaattggtctttcagagagtatgtaaatctggggcttgcccttggatttcacttgttaaacaccctcaaacttaaaagaagaaaatagatctccagctggtgaaaattttgtgccccaaataatatattaatccaagtctaccaaggtaactaagtaatggatgttttctctcttttattacaagcaagaaagttcatttgcagttgtaaaaatgattaccgaactccagacctatttgctataactgattggaaataatgattctgatttttagtctgggtaaacacatacttcggtgtgaattttgataagggaaagacttgtttggtagcccaaggaaaaacaggatgtatttatacagtgaatgttcactctgcagaggaacttccctccagttacatcttcctcatacattagccacctccacacttgacatagatgccaacatgtttcaaaaccaatcttgaaggagcctaaagagttgatggtcctctaggtgaaagacaagaattactgtattgcatttgcttatagggaggtgtgtttttgctaacttgaagggatatactgtatttcaaataagtgtgtgacttaatattttgggatttttttttcctcctttaaaaactggacctgaacacaagctttgagttgatgtttgtaataatctcaggacctgaaagattgtagcatttagtgtgtcttaaaaattatgtactgtaccagccatggatttttgtaaatatacctgtctcccttttttgtattttagtaaaaaaaaaaaaaaataaatttaaataaaagggggtggtgatgacatgtgaatgggtgcgggtatgtgtgcgtgtgtgtttgtataaggctcttttgagatgaactggtgcttgtttaatttccagctcaaatcggagcaggaatatggacaaactgctgctactgaaccctgcactgagccgaggtatttccatttggttaactaaacgctagctaccaggaaatgacgcagaagtcacgttcttcttcccactgccatcttgcctttgcattctcagttctacgtgccctttgaactttaatggtaaaacatttcacactttggatggtttgcttgtctctagtttttagaaagctcttatcactccttcctaagaaaaaagaagggcaggtaaatttttttaaccaaaaaaaaatcacacatttcataaaaccctgatgaattttggatatgtgagagggcataaacattcctaaatatggacctgtgaatttagtaaattacccccatgaatatactccttcagtgcagggatttttgtgttttttttttttttttaatttttttgcaacagccttgctcatattccaggtgtagctagcaaacccctgtttttgaagcaagagccttatttgattcagtgtagatgtttcctgtctatcctttgtgacagggccttttaatgagtgttttttctttttgtatatgttacgtgtttgttgttgtattaaataaagaggaatgtacatactaaaaaaaaaaaaaaaaaa

SEQ ID NO: 1065 - DNA, 8519 bp, Homo sapiens
cggcggcggagccaggacccagacatctgggactgttgttctctcgcggcgcgaccgcctcagtcacttcgcccagagacccggacctggtccgctggggagcaggcggccataaaccccctctctcccggttccctgacgccgcggcaggagctgttacaaacaccctgcggttggtctccgatgcccttcagtgaggtggggacgcctggaccctggtgagcgaaccccaagccaccccccaccccaactcagtgtcttcgccggcccccggcccgtacgcctgtctggtcgccatggctgaaaacacagagggggatctgaactccaacctgctccacgccccctaccacaccggggaccctcagctggacacggccatcgggcagtggctccgctgggataagaatcccaaaacaaaagagcagattgaaaacctgttacggaatgggatgaacaaggagctgcgagatcgtctttgttgccgaatgacttttgggactgcaggacttcgttctgccatgggggcagggttttgctatattaatgaccttacagtaatacagtcaacacaggggatgtacaaataccttgagagatgtttctcagacttcaagcagagaggctttgtggttgggtatgacactcggggtcaagtaactagcagctgcagcagccagaggcttgctaaactcactgctgcagtcttgctggccaaagatgttcctgtgtaccttttttcaagatatgttcctacaccttttgtaccatatgcagttcagaagctcaaagcagttgcaggtgtgatgattactgcctctcacaaccgcaaggaagacaatggatacaaggtttactgggaaactggtgctcagatcacatctcctcatgataaagaaattctaaaatgtatagaagaatgtgtggaaccctggaatggttcctggaatgataatttagtggataccagcccgctgaagagagaccctctgcaggacatttgcaggagatacatggaagatctgaaaaagatctgtttttacagggagttaaactcgaagaccaccttgaaatttgtgcacacatcttttcatggggtcggacatgactatgtgcagttggcttttaaagtgtttggttttaagcctccaattccagtaccagaacaaaaagatcctgatccagacttttctaccgttaaatgtccaaatcctgaagaaggagaatctgtgctggaactttccttgagactggcagagaaagaaaatgcccgggtagtgctagccacagatcctgatgcagacagactggcagcagcagaacttcaggagaatggttgttggaaagttttcacagggaatgagttggcagctttgtttggatggtggatgtttgattgctggaagaaaaataaatcaagaaatgctgatgtgaagaacgtttatatgttagccaccacagtctcttctaaaattctgaaggcaattgcacttaaagaaggatttcattttgaagaaacattaccaggttttaaatggattggaagtaggataatagacctcctggaaaatgggaaagaagtcctttttgcatttgaagagtctattggttttctctgtggaacttcagttttggataaagatggggtgagtgcagctgttgtggttgctgagatggcatcttacctggaaaccatgaatataacattgaaacagcaactggttaaggtttatgaaaaatatggttatcatatttcaaaaacttcctatttcttgtgttatgaaccacctaccatcaaaagtatatttgaaaggcttcgtaattttgattctccaaaagaatatccaaaattttgtggaacatttgctatattgcatgtacgggacgttaccactggatatgacagtagccagcctaataagaaatcagtgctgcctgtgagtaaaaacagccaaatgattacatttacttttcaaaatggctgtgttgctacccttcggacaagtggaacagaaccaaagataaagtattatgcagagatgtgtgcgtcacctgaccagagtgacactgctttactggaggaagaactgaagaaactcattgatgctctgatagagaattttcttcagcctagtaagaatggactgatctggcgttctgtttaggggtacaccaatatgtcatgacactgtgtgggcatatggaacagagcaaccgagaactgcatacattgaaccttgtgttagcattctctctctatctcatctggccgagtatctttttccttttattttctttctttttggtcaactggctagactaaacaaagtataagtttgaaatgaaatggtctagagggaaatgattcaaattttttcataattcaaacaaaagttattacactaaaagtattatagtaacgtattgtccttccgttaacagaaacatcacaattcaaaagtgagttttcttattatagtgtgattaagcctagttctgtatctcgtaattgtgtatagcatggtaaaagaaaaaaaaaaagacaggtaaatgttatataattgtagggttagttaaggaaattagtccataaaattggcaagaaaatggtactttccttgattgttatgaaaaagtgtcattgtgacatcacaggtattaatttacaaattagagtatttgaaataggatatttagcatttctgtagtttagaacagatgttacagtgtgtggttttggcatgtctgtttcaggtgcccttggtgcagtataaatttactgtatgtatttaaaattctgatgtttactgaacataaaacaatagtggcaacactcctattggctttgttcttatcaaatttctcagtgccttctcagggtctggtatgaacagaaaaaacagtgttcctgcatttaccataatttaatcagtcaatttgcagatagctaaggaaaatcttccaaaatctgtaggtgcttcctctatatcaagtgagtttgctgattttaaaatcttaggaatataaataaagatcttaataaaagcaagcttaatgtagttaaggatcttcatattagaattgtgtcatttatcaaaccttttattacagaaaaaaatctgaactgagaaaggagctctgaatttatttgacagtctaacttttgaattacatttttgtaagtagatttattcttttattttatgaagtaatgttaattttactaagaataaaacatccaaattttaagtattatgaaatactaaaactacatgttttaaaacagaggtccagtttattctaacatcttgctgacttctgtagaatttctgattgcatgactattatttatcttcttttagtgtagaaaataattttttacaaaaagtcacttttgggctgggcgcagtggctcacgcctgtaatcccagcactttgggaggctgaggcaggtggatcacaatgtcaggagtttgagactagcctggccaatatggtgaaaccctgtctctactaaaaatacaaaaattagccgggtgtggtggtgggcacctgtagtcccagctactcgggaggctgaggcaggagaattgcttgaacctaggaggctgagattgcagtgagccgaaatcacgccactacactccagcctgggcaacagagggagactccatctcaaaaaaaaaaaaagtcacttttggctaatcatgcagtcttctgaaaaggtttaatagagaaatgctgtttaggctgggcttggtggctcacatctgtaataccagcgctttgggaggctgaggcaggaggattgcttgaggccaggagtttaagttacagaactatgatcacactgccgcactgaagcctggatgacagagtgagaccttatctcaaaaaaaaaaaaaaaaagagagagagagagaaaaagaaatgctgtgtttaatcttcttaaaatgtatcttgtcctacatagttctcagaatacatatggggtatagttaggagataacaataacaagacctaaacaaattgcttatgggagatagcactgtaattagagaatttatttcatataaaataataatataaagtttgaactgattagaatgttccttaaatcatggtttcgtttgttgcagctgtcagctaacatttggttgagctcatataatccaaacctaattgtccaactattgtattgccactattgttaatttgttccttccttactttcttattgttggatcttatatgactgtatgactgtagataatagacagctagctaaatgtagagcaccatttttctcaatgagtttgttttcaaaggctttgcactggagaagatatgtgtagaatttttgttttatttttaaaatgtgtaaaacatcttttgttttatatgcttttaagaatgtagattgtaatttaggaaatggcatatattctgcaaagtggtataatgttgtatatatgaaaaacaggtatatttggtttagttctgtgtttcagtgactgataaacaaaaatgaagctaaaatgaatcaacggctcattcatagttactaaagccatgtcatgactgtcattctattatgaagaaaacagttttatttgagtgctttaatataatgcaacatttaagtcatcttaaggtgaaaagttattgaagtgttcttctctcaagttaacaaaattttacaaatgttcctgaagtgtatcgattgagggaattattttattctagcctgtcatgagtctgtctgagcatgatacttaacatgaacttgatgtagtaggtgcacatttgcctaacaggataaattcagtgatagcccaagctggtcaggagagacagaagtgctggctaggaggtctcagcctcgggcactacaatgtttatctttttctttttgaacaatattgtgaaaatgattgcattctcattgagcatgaaagtcaaaactggaattttctaaagctttggagaaaaggagagaattagtagggcaagatcaaagcatacattggaaataaacagtagaaataagcaaacaatataaagagacacgggaaatgcttctcgtgaagggcaaatgtaacaccataacagtagggaataaactgtgtcccacctgtttacttgtgtttatttgttgttatgatgagtatgcacctaccattttcctttattgtgatcactaaaatgaggccaaggtttaggaggtgagaaaaagtatcccttttacggattcagttcctgctaggatgttgtatcagaatcatgtgagaactcaggaagaggtagagcagaaataaaaaggaagaaaatgtagattagaaaataagacttctgagaaaaagttcaaggaataaagattgtttgactctggagaggagaaagctgttgagatagtttgctaagtttgctaataaagctttattgagtcttttattgaagggttcaaagtaagaaatactatgccatagtgttctccatctctagtgaagacagaaccagagggaataaggatcttttttttaaagacagcatggaaagtttaagatttaggaacttcttgagaaatcttcataatatcttctattcaaaatcttttttttatttttaagggaataaaaattttaaaaattaagagatatacagatgactttttaagggtccttctttccagcacattttttttaaaaactcaggttagaataaaaatgtcataaagggcactaaaagtaacatttgggtttcactccatatctagaagaatttagctcacaaaacaatttttgtgtgttttgagtaactgatgcataagtgcaatgaataattttcctgcttcactgttatttttaatttaacctggcaaattaagtgagacttgaacaaaattttgttcatcttgaagaatgtatagtggcttaggttatttgaggttttcgttttgaatatatatgttgttattttgatgtagatacgttagcagatggagaggttctaagagattggatactttggaatgtctttatataggaaatagacctcccatttcttaagcaagttgcttctggaattgatgcaacagggatattagctgtagtttaatggataagttgttctatgagctgctgctatcagtacttttttccacattttccattgatatttgtgatgcttgaaaaatccaaacttcacttggatacatttaattttatgcctttttctctctacctcccacttttcctaggcacccttgcacattttgttactgtgaaggactattgccctgttacctcactgataagaaatctcaactgtattcattcagaatgctttaagcttagtcataaactacatttgcctatggacctttggttattttgttaatgttgtcattatatttaagacttattgtaggaagtaattttaaatctatttcataacctgttttgatctgtctgcatactgctatatgttaatttattacggccttttacaattcacttgtcatctgagattgttctagaaactgatgaggaaagagtcgtactaaccaaaatgaatgggcaattgacataacattctatttcaggtttccttgtacttggggagccaaagcacaagatctaaggaaatcttattcacatttgtccctcagagcatcttaccctaagccatagaggtataaatagtaagatgagaattgctcattgtctgactccttgcacagcatgaatttaattctagttggaaacaaagttagtgttgactactggttaccttaaagtattcaccatactatatatttattagaccatctttcctctttgtttattcaagactatgtacttataaaagagaacctataagaatgtgtagagtgaccaaatagggacaaagtgacatacctagagtttgctgctcaaatttttccactagcgtaaccctaaagcagaggggcatgatgaagggggaaggggttctgagagcaaaatcagaatcagcctaccactgacatgaagtgtgttctgtctttaaaatgtaagtgaattttgcattctttataataaaacttttaatataaaaatgatatgtttaatctttactgaaacttatgccaccacaaaggagcaccatgttcatcacgtggctgctcagttttctcccccagtgccctcacccccagtggaggcaagtccttgagctacacacactggctgtagtgcaagatatataaacataggccgggctcggtggctcatgcctgtaatcctagcactttgggaggccgaagcaggtggatcatctgaggtcgggagattgagactagcctgaccgacatggagaaaccctgtgtccactaaaaatacaaaattagccgggtgtggtggcacatgcctgtaatcccagctactcgggaggctgaggcaggagaatcacttgaacccaggaggtggaggttgtggtgagccaagatcgcgccgttgcactccagcctgggcaacaagagtgaaactccatctcaaaaaaaaaaaaaaaagatatataaacatagaacatatccagactatttcctgcccttggaatctgaccttcagaaggattaatgccaaactaaactgacctgaaacagttttgttactattggcattccttgactaaaaaggaccacctgatgctcagtcccgagagtaggaatcgtggtttattatttttcatatccataccacctagttcagtacctgttatagagtgtttaattgctgatactaggaattaagggattttttaaaagtagcaaatagtttaaggaacaatcaaaaaatgaattttctaattcagttttttcaatgaagtcccatcactgaactttataatgtaatgtttattaagcagacatccccttaaatactcagtttctttggagagagcaaagcatatctctctgtggaaattatatataatgcctggtattttacactcaaagcaaggtgttggccaggaaggtaaagaaatggtgtctatgtagacttaatatcactagtctaagtgtcattttgagcctagtagcactaccttccaagtgagtcacaacaaatttgatcctatttggtatgtttttgtccactgttatgattcatcatgtatcttacaagagccactcaagcaagactctgcttctatgtatggtgaggccttgttgttctaggctagaataaactctttgtatgcctcattgaatatgccaggtaaaatatatgcagtcaagaatgaattatttttctgactaaagtgtgtagcagtagttcaaaattgtgcccttgttttaacagtttctgtcaacatcttctcatttttccctacaaaaacaccagggtgtattataagtactgcctgtgagaatttgcactttatgtatttgtgtgtggatttcttgtggttttagccaaatgaagtgttatcagtaataaacaggtctcttcataggaaaaaaaaaaaaaaaaaa

SEQ ID NO: 1066 - DNA, 8656 bp, Homo sapiens
cgcagccgccgcctgggccgctccgtgtccccggtggagccgccgccgccgccgccgggagctcgatgcggacggagcccgggccgagccatggggatcctcagcatcacggaccagccgcccctggtccaggccatctttagccgagatgtggaggaagtgcgttccctactctcgcagaaggagaacatcaatgtgctggaccaagagaggcgaactccattgcatgctgctgcctacgtaggcgatgtccccatcctccagttgctactgatgtcaggtgctaatgtcaatgctaaggacacactgtggctgacccctcttcatcgtgctgctgcctcccgaaacgagaaggtgctggggctgctgctggcacattcagcagatgtgaatgcccgggacaagctgtggcagacaccactgcatgtggctgctgccaaccgggccaccaagtgtgctgaggctctggcacccctgttgagcagcctcaacgtggctgacaggagcgggcgcagtgctctgcaccatgcagtgcatagtgggcatcttgagacggtgaacctgctcctcaacaagggagccagcctgaatgtctgtgacaaaaaggagcggcagcctctgcattgggcagcttttctagggcacttggaggtcctaaaactgctggtggcacggggagcagacctcggctgcaaggaccgcaagggctatgggctgctccatacagctgctgccagtggccagattgaagtggtgaagtacctgcttcggatgggagcggagatcgatgaacccaatgcttttggaaacacagctttgcacatcgcctgctacctgggccaggatgctgtggctattgagctggtgaatgccggagccaatgtcaaccagccgaatgacaagggcttcacgccactgcatgtggctgcagtctccaccaatggcgctctctgcttggagctactggttaataatggggctgacgtcaactaccagagcaaagaagggaaaagtcctctgcacatggctgcaatccatggccgtttcacacgctcccagatcctcatccagaatggcagcgagattgattgtgccgacaaatttgggaacacgccactgcatgtggctgctcgatatggacacgagctgctcatcagcaccctcatgaccaatggcgcagataccgcccggcgtggcatccatgacatgttccccctgcacttagctgttctctttggattctctgactgttgtcgtaagcttctttcctcaggtcagttgtacagcattgtgtcttcactcagcaatgagcatgtgctttcagctgggtttgacatcaatacacctgacaaccttggccgtacctgtcttcatgctgctgcttccggagggaatgttgaatgtcttaatttgctgttgagcagtggagctgacttgaggaggagggacaaatttggcaggaccccactgcactatgcagctgctaacggtagctaccagtgtgcagtaacattggtgactgctggggcaggtgtcaacgaggccgactgtaaaggctgctctcccctccactacgctgccgcttctgacacttacaggagagcggaaccccatacaccttccagccatgatgccgaagaggacgagccactgaaggagtcccgcaggaaggaggccttcttctgtctggagttcttactggataacggtgcagacccctccctgcgggacaggcagggctacacagctgtgcactatgcagccgcctatggcaacagacagaacctcgaactgctcttagaaatgtcctttaactgcctggaggatgtggagagcaccattccagtcagccctttgcacttagctgcctacaacggtcactgtgaagccttgaagacgctggcggagacgctggtgaatctggacgtaagggaccacaagggccggaccgcactcttcctggccacggagcgcggctctactgagtgtgtggaggtgcttacagcccacggcgcctctgccctcatcaaggagcgcaagcgcaagtggacacccctgcacgctgctgctgcctctggccacactgactccctgcacttgctgatcgacagtggggaacgagctgacatcacagatgtcatggatgcctatggacagaccccactgatgctggccatcatgaatggccatgtggactgtgtacatctgctgctagagaaaggatccacagctgatgctgctgacctccggggccgcactgccctccaccgcggggcagtgactggctgtgaggactgcctggctgccctgctggaccacgacgcatttgtgctgtgccgagactttaagggccgcacgcccattcacctggcctcagcctgtggccacactgcagtactgcggaccctgctgcaggctgccctttccacagatcccctggatgccggggtggattacagcggatactcgcccatgcactgggcctcctacactggacatgaagattgtctggagttgttacttgaacacagcccgttttcgtacctggaaggaaaccccttcactcctttgcactgtgcagtgattaataaccaagacagcaccacagagatgctactgggagctctgggtgccaagattgtgaacagccgagatgccaaaggacggaccccccttcacgccgctgccttcgcggacaatgtctctgggctccggatgctgctgcagcatcaagctgaggtgaacgccactgaccacactggccgcactgcgctcatgacggcggctgagaacgggcagaccgctgctgtggaatttctgctgtatcgagggaaggcagaccttactgtgttggatgagaacaagaacacggccctccacttggcttgtagcaagggccatgagaaatgtgccctcatgatcctggcagaaacccaagaccttggccttatcaatgctaccaacagtgcgctgcagatgccactccacattgctgcccggaatggtctagcttctgtggtacaggccctgctgagtcatggggccacagtgctggctgtggatgaagaaggtcacaccccagcactggcctgtgcccccaacaaagatgtggcagactgcctggccttgatcctttccaccatgaagcctttcccacccaaggacgccgtcagtcctttcagcttcagcctgctcaagaactgcagcattgcagccgccaagacggtgggtggctgcggcgccctgccccatggggcctcctgcccctacagccaggagcggcccggcgccattgggttagatggctgctactctgagtagccccctccagtgtccctcccccgccggtggcttgatatctaattctatttatttagaaaaagtctaaacatttagggcactttaaaggagaacacgactgggtggagggggcggaggggaaggaagccctggggagcagctgctcacccctttgccacaccatcttggcctggcaggggtctgggactgacagggagcaccccaggcccttggtacccccagggcgaccccttctgccaagtgtcccaaaatgattgctaaatgcctggctcccccactctttgactccatctcttggttccctctttctgctgccagctcccccgactcttccctggggactcctctctgtgtcccccttctcccctgcccctactgccaggcagatcccctcttcttccatacccatcactgcctccctgctcggccggtccctccatccccgcagcagtgagaagccttaatttctggtactgtgtgagcactctgggggtgtccccctccccccttcaggggcagctagaggatgaggggggaggatatttagcactggggcctggagctttttccccacttctgtaccctatcacccctaaagttcaaatgcaaaacacttgaagcagcaactactgtacctgggccccaatcctgcactctcccctggctcctcatatgcaaatcaagggctggttctgcccccacagcctgccccctccccattccctcccactcctagcctggcccctaaccacgcactttaaccttgcttctttcttttatcttcttttgggagggcagagcctgtggtcattcctgccctggctctccttcccttgaactttgaggcttgtcatgaatttttaagtaagcgttttatcctttaggggaagaaacaaattaatttcctgcccatttcaaaaccacagccctagtatgtccactgtgtttcaggcatgtgtttgcatgtatatggagggagggaccatgttcttcctcctgtgccgccaagcccatagtttatctgtgctccctatctgcctccaccttccgttatgtccaagagtacccactgccccagtcactcctgatctgaagccaaagatggtaggaggggcagggccgacaagggaccgtggctactcgggacccaggcttcccctccagtgtgaggaagaagctctgacctagagagagatgaataggtactggggcttggtccctgccttcccagcagggaggaaagatgggattgagctgggggctgcactgataagatttctaaagtcgcaccccaaaagccaaactgggctggagtgaagagggggcagttttctctctaaatgtagcattgaatttggccctggtccctttaagtgctctgtccacccatctcctagtgcagcctcctggacagttggacccactcctgcagcccagtgttcccttcctcacactcaatacctcagccaggggccaagacacagaacttgaatagaggtcatgccccctccgcccccacactgcatccttgcccagtttggctgccatcagtattgtcccctgagaactggacaggcttcgtttacacagtacagggtctcccctgaggggggatccttcagcctccctcccctactcaagtttgctttattcacagtcttacccatcttttagttgtataccctgaatgtcttgccacccttgtcaagggtgggctgaggggaggggggcgtcccagggaccccctccctccccaacggatacctttaaccatacctcatgctggtttccagaagcctggggtgttgtccaagtccttatcttttcatggtcccttttgatcccctgtctctctgtgttttgcttctcccaaccctcagttcctaaatcatttcaaggcttccaaatgaccattattgatgagaaggattgtgcagcttttagtttttatttttattttcaaagccaaagggccttgtgacgcccctcttgcccacctccctccacaccgtgtcctcccctatatgacaatcaatgtgacctctcttaagggctgcagcccccatccccaaccctgctggctctgcaaagcttgccttcccttcaattctctctcctgaaatcttcccattccaccccctccctctcatcttggtgctgggaattaggtggtggggggcaaggggagtgagaagatgggtcctccagagagaacttgccgggtgtgagtcgtgttctcctttcgtgatgtttggtgatggcgggaagcgtctgagtgtcagagccccgttgtcttgctagatgagatttctgggggctgtctgcgccctgctgccctcagcgcactgtcagcagtgctgggaggtggtggggagtcctctgtccctccatatgtggctgtgaggaagcctgggggacaagcagcctcctctccttatgccaaaggaaaccccacgccccaccctgggctccccagccctagtgttttttgaagcattttgaccattctcatggccactgcatatttattttaatgttaagattttttttaaacctctttgacttaaacgggtgtggagaagtaaaacaggcagaatgccccccagtcttcatgggggagggcggggagggaacagcgccttccctttgccctccccctcccccctctccccaccgcagccctaaagcacttgcttcaagtaataagcacttttgtgaaaaggcctattttaagcgaggaccctgggagcagccccaggtcccagcaaaggaaacagagcgagggcgacataggagacagggaaacagacgtgtgaatcagagggtgagatggaaagagccagtttttagtttctgattttgggggagctatttctgattgggcggtggctctggtagggtcatatactatccttcagaaaaacgaatggcacaaaccgtgggtcccaggaaggaccagcagacccgggtcactgccactgtccactgagactgacgggccacctcccctgccccgtggccccctgagccataggactgctgaaaaccactgaatgtacagcccaggttggggtggggagcagcccctgggggagggggcttctccttttgtttggtgctgtggggcgtgggagagaaaagactgagggactgccaccccacgtagatgtgtttcttggggtggaggggctgaggagggcctacctccctctccaaccccagccatggcccctcttccttcctcacccctatccgttttgactgtaagtccagctcacctttgccttcaatatgtaaccaaaggaaaactcaatactgtttccaccactgtctgcccacccgagcaccttcttactccctggacctagaaggggagaagaggctggaggtggggtggatggggccagagtgaacggttctacagctgtatccccagaacctcctccagggtcttggaaggagtcctgagaggtgggattggggccgggctggcagggctgagtttgcgcactgtgtatcttatgcacatgagtgtttttgtctaaatgactccagtgactgctccagcggggaggccccttcctccttccctctcagccatttctcacccacttcccatacccagtgttcatcccctacctccccttcccaccgcaaaggaaaatagccttacagaccctagcccagaaaccctactcctggggcaaaccagtatgggcccccatcccgcctagtttgaaccctaccttttaagaaggagggataaggaacaaagcagccccttcccctctaattgtggtggctccagccttctgcagccttgacccaggttgggcaagggcggaggtgaggaatctttgaggaccaagcccagtggtctgggaatcgggaggtagagagggaagggtctgccttgggggctccctcctcccaacccaacccctagagaagcgaccaaatcccagagatggggtgaagctggggtggggagggtctgctctttgaattacttgaaggtactgactccaaggctgctgttgcccacttaggtgtgagggggacactgtcactgcatttgggagggcagagggtggcgggtaaccagaggatccaccttggccctcacccactcctgctaggccctttccctggggaatctggaagcctgactttgcccccagggaagttggggaccgccttccctcccttctccacctctcactctgggcaccctctccaattgcactaaagtagctgttgtgccagtctgccccccacaaggggggaggtctctgcttccagtcttcttcccccgctgcctccgctcccaccctggacaatctccttgtttcccttgtgttcctggatagctcagctttgtatgtgtgtttggggggtgggggtgggttctggcttgagtgggtttggcaggggtttgggaagggttaggggaggatggaggatgaagtctcctacccccttctccagctccaggccacagaagcctgggaagggagggtgcctactctcgctgctgtgtgtcttgcagatgtgccaaaatgggggtgggtgggaggggagggtgcctggcagagcagcccctggggtggctctctcaaagcaatatagttcccctgcgggggacagcaagacaggggagagggttggggtggggacctgggggttccccatgtacagctatgtatattcaggggtgttctccgtctggtacccgctgtgggcatctatgtgtgtgtgaacctccccttccccatgccctgcatgacctgtgatgctgcagacaccaccatcctgtgtgcaggtgtgtgttggggggcacggaggggcatgttccatgtcctgttgcaccctccaccctgtgacccatgtactcggttgtaggaagtaaagagaactgagcacaattcactggattctagtggaatctttctctaagcaattttcccattcctgcctctccctgccccggaaccacctgtggtgctagtgttgggatcgggggcgtttaacgctggtgggcagcaataaggggcagatgtgcccagatgcctgcatccccagggtgccgagggcagcaggaaaaagtggggacctcggtgcatttgccccacccctcccctccctgggctaaagcacaatgttctccccgcagattaatgaccctgcaccctccaggcccctactcacatcctcccccaaccggcttcgggtcctcccaccacactctggttttctatgctgttttggtgcaagtacaactgtcgtagtcatggctttgggatgggttctgtttattaaaatcctattgctccta

SEQ ID NO: 1067 - DNA, 10583 bp, Homo sapiens
gacgcctggcgcacccgcgggagcggagccgtggcgcgctcgccccggacgccggccgcccctccgctcgccctactgagcgagcggcccggggcgccgaggggtccgcgccgcgcggggcgcaccgccctggccgccatgtgctcccagctctggttcctgacggaccggcgcatccgcgaggactacccgcaggtgcagatcctgcgcgccctccggcagcgctgctccgagcaggacgtgcgcttccgggcggtgcttatggaccagatcgccgtcaccatcgtcggcggccacctcggcctccagctaaaccagaaggccctcaccactttcccggatgtggtgcttgtacgggtacccacaccctcagtgcagtcagacagtgacatcactgtcctgcgacacctggagaagctgggctgccggttggtcaatcgcccacagagcatcttaaattgcatcaacaaattctggacgttccaagaactggctggacatggggtccccatgccagacaccttctcctatggtgggcatgaagacttttcaaaaatgattgatgaagctgagcccctgggctacccagtcgtggtgaagagcacacgaggccaccggggaaaagctgtttttctggcaagagataaacatcacctctctgacatctgccatctgatccgccacgatgtgccctacctgttccagaagtacgtgaaggagtcccatggaaaggacatccgggtggtggtggtagggggccaggtcataggctctatgcttcgctgctccactgatggacggatgcagagcaactgctctctcggtggcgtgggcgtcaagtgtccgctgacagaacaaggcaagcagttggctattcaggtgtccaacatcctaggcatggacttctgtggcattgatctccttatcatggacgatggctcctttgtggtgtgtgaggcaaatgctaatgttggcttcctagcctttgaccaggcatgcaacttagatgtgggtgggatcattgcagactataccatgtccttgctgccaaataggcagactggaaagatggctgtcctcccaggactgtcgagtccaagggagaagaacgagccggatggctgtgcttcagctcagggagttgcagagagcgtctataccatcaacagtgggtctacctctagtgaaagtgagcctgaactgggagagatccgggattcctcagcaagcacaatgggggccccaccctccatgctgcccgaacctggctacaacattaacaacaggattgcttctgagttaaaacttaagtgaattcctgctttttggcagcatttaaaccaaatcctactgcttccctagtagttttgagtgaataaaatctggactaatgtgatttcatttgcacagaaactagaaatcccatctgggcactcagcattttttctaacgatgatttaagcaaatggcctagctttgtggtttttacaaagacaaatataaaaacactcaagaacaacgtcccgactgatcagtatgagactgatgtctgctgtgagcacgtggatattacggctgacgctaaggcactgactctgctgttgcttctgacttttagcagtagaacccattagctcaaaatggctcttggaattatgtactcaaaagcaaccacgggatggaagcatgtgcagacgaggtggaatgtgactgcagtaataggttcttcactaagtgtgtgtgtgatgcttggaaaagacacagttcaaacactattagaggatcgatctctgctccccatcaatcaccatcttgaccatatttctccgacactcaggatatggtgttttagggagcttcctcattagcattttcagtgaagcactttgtagaaagtgagattgaacgttctttgacttcacaggttggcaaatgtcctgctttgtaactgggcctttctacaaattgctttgccactctgaatttatagaccctgcttcaactaacgtcagctctagcagcttcttgcacctttgctgcctttggcctcagctggaaatgcacttcaatgagctagtggccactcagtttatttcttaagcgtgcactagaatctaacaccatggactttgtttttcaatggactctgttcacttgtcatccagaagccagtgggtttttaccatagaaagctacttggagatcatcattcttcccctcctctactgaaactttgtgtactgcttagctgtagggggttttcttgtatgagtgggtgttggaggtctattgagtagatgggagccattggaaacactccaatccccttgaaactctacttttatctaagatccagacacctgtccttacccacttttccaaacggggaagactcaggtatcaggaattacccattgcacattttgcgggggggggggctaatgtagacatgacaccaagtgcttttcattttaattctctaagcagtagatgagatctttcccttgggagaaatcacagagatggagttttccatttctgcttatacgaaatatgactgaaaatgaacaaagccacctttttaaccaaatacactagaacatatgcactcaagagttagcataattggagttattttcttgatgttgcatgtgccaagaacacttagggttcccctttgggattacctttgaagccatgcaaggcaagaggcctcacaactttatagtcagaccttgtgttttatccaacccctcctcctgcccaccaagatcatcctgagctgcttcacccattttatttagcagacttattttctaatgctctttagctgttaaaaaaaaaaaatcattcctcaaaaaatagatctacccttaaaggacaaagatttaccaacactgaagacccttacaagttgacagtttctaaagagggttctaggaatgttctgtgtaaggtcagcttcactggaataaacatacatcttcccaaggtgactacttcaaaggcaacactacccattcgggtgcagaaattaccgtacttactctgccataaatgtaaaatgtgtataaagttaagctattgcattttttcataacacatttaaatagaaattggcttttaaagtattgtagttaaaaccagatctcaccaagtaatagttgtgcaattgacaaatgtttggtgccatgtaatggagatgtcacactacacagttgtagtttaaatgcagtccaacataaggtgcatgccactgaactgtaaccctagtaatgtgtcttgtacagttgaaaaataatacttcacctttatataggttaagatatgtaccttatctttaccactcagggtggctttaaaagacggacagctttaggtttgttctcactggaactggttacactttctgtgcaaacttaaccaagtgatgatcgtctggaagctgcattccctcatttccactgtttggtgtgaatctagtctccccactttatctaaaaggaggctagcagggccccagcctgagcagagcagctagagagtgcttccagattcctttgccaaaggaggcccattttccagctgtgagtgacatctgtagtcattggcttcattgcctggcactagccctgtctagaagtggagaaagctggatcacagctggaccacaaccagccccaatccaggatttcccataccatgctggctgtgggctctgtgagcctcagccaggtggccaggctatacttgtcacagctggccacaggcctgctgaaggaacatggggtgtagagccagagcctggttctggttctccgcttgaacagctgacctcgtgcaatcacaggaactctgcgtctccatgtttcactcagatagagaaaatgcctcctttgtttacctctttgaagctgaagtaagtgagactggtgcatgtaaattaatggtagtagagcacctcccacatctgattttataacagtttcccatcactccttaaagaaaaaggccaggccgggcgtggtggttcacgcctgtaatctcagcacttcgggaggccgaggcgggtggatcatgaggtcaggagattgagaccattctggctaacacagtgaacaaaaaattagtcgggcatggtggcgggcgcctgtagtcccagctacttgggaggctgaggcaggagaattgcttgaaccttggaggtggaggctgcagtgagccaagattatgccactgcactccagcctgggtgacagagcgagactccgtctcaaaaaaaaaaaaaaaaagccacacattcttggcattagcacaccaaacagtggtagggtaccctgagaaaggaatgcagcttctcagaggcctcacttccagccagggaaacttaagacctgaaaggaataaggctctttgtgtattcagacagccttctggatgtatcgtatataacctgaaactctccactcttgtataccaactaacaaagtcttccttatgtaacatagattgcagtgtctgtatatggtcttcccattatctggtagtagcatcttgaaactggtcaaaacttgaatgccaatagctcagtcactcagaatatacgattctgcacttgggaaaaatgtcttcatgctgtttttctgatcgggtatggggttgccagaatgaggatttggggctttaggtctttcggatctcagaaacaatataagtagatcataagccactagtgtcacaatttcaggcccattgcttccagctaaaaggagattccatgaccatggggaccaggagaggaggaaagggaaaagggaaaggtctggaatagttttgtgaaagaaataaaaaattgggatgatttggaattctagtaggaaggaggaaaaaatggctcttctgtgggctgttttaatgaaagaatcatgaatatgtattgatcagaggtagatgtctttgaagctgttctgcataaagataatgagatgcatggatttccatccaccctggagaagtgggggagatgtgcttcctcccttctttaaatcctgaggaatgctggtcttgagaacactgaatgcaaatctgaggaagatgtaagcggctggctggggagttttaggaccacccaaataaaagctgaccctcccagaggctaatgaaccacagtgctgtgtgcaggcatagccttagcaggtcagtttaaggagtcaggtcagagaataaatccaaccttagtcaagtcactacagtttaatattttcctttgcaactggaggtaagcctgtttgccattagtctgagtggatgtcttgggaaggcccctgaaaatagccatatttgtcactgtccctaaagtgaatgttcatagatctgggactgtttttgactgtacctctgagactcaagatcaggacagattgttactttaaaatgttacctggaagacgattcttctaagggctataatgttataatcttttcctaaaactaaatcatgcctccattccaggtctatggctagactctgcagccctccctcctaaaaccacagggctgaatgtggaaactttcttcttttaagcctttccatttccttctctaggtacagctcctgtgccaatatgcactgtctcaagccctgtgctggcattccaacctggtttggtaattttgctgtgaggttcatgttctctggggctccagggcaacactaagaaagtcgcttatgatccccatttgagaccatggaattagcattttggagaccagtctagtcccccatttcataagtagggaatcttacttagttccagaggccatgttcacttgctagtcaatagcaaggctggactcaggcagtctgattcctcatccactttggcatactgccagaggtagctccatccctccctggaatctagcacatgctcccatcctgggcctaccctccgcctcctccccttctgatgagcctctgttctggatcaacacggtgttgatgtgccagctgtcaagggttcagcacttggatggcttctaggtgagagccccaaaggcatgtatatttccatgatgcaagctggctcatggcccgcaccgtctttagaccagccaagaccatttaactctaccccacactttcagtggtgggatgtgaggaagaaagcccatgccaagctaactgaaagcttatttggctccaattcggctgatgttccctcactgcagaatgtcctggaaaccaagggtttgcagctcctaaacctattgcattaggcacacccaagaagaaatcctgttcgatgcacatgctccagtttcaatcagcaacaaggtcaaaagtttccccccactttctgttccacagtgcgttccccttgcagccagacattaggcacagattcatccctattgtaacccaaatgtcagctgagggctccttgcctcttgacatccagagaggtctgataactgggctctgtttctgaacctctagatttctgtgatttctcaaagacttatatttttgcagccactgctgactccacacttctgctacctcattttaaatagcgtcttatccctgcaatgcatcagctgagacatgaagctcagtttcctcgcccatttccacatagcaaaattcaagcgagtgagtgtgtgtgcctgcgtgtgtctcagtgacgtgggaaggaatggcagatgctacaacagtgcagactcggcaccccatttatagaatgttctttttatatactatggaggaatctccactcaccttccactccacgtggtccctgtctcctgtccttgggacagagcagttccatttatattctcacatacaaccagatggatagccattccttttcttaatttgattcctgccaacaccctaaccgtcatgacttcaccttttaccatgggtggcttattaaaaacattttcctggacgaagacagttccctccccaagcggaattcgagtgccatctcttaaggtgatgcatttttaattcccactgcacaagccaggcatcacaatgaccatattcaccactcgttgtcaggggtacaccttttggaaggcagcgtgggctaatgtgaatggtactagtctgagtcagatccagttcaaatccaggtaacttaaagcttgtgtgacccagggacactttacttcaacttgttaaaccttaattttgtcacctataaatgtgatacataaacaaacttgaatgtgtcgcacttaaccacatgcctggctttccataggttcctttcctcttgcttcccccactgtgagcaacacaagcatcgccttcttgtgatcatggctcagtgccaagggataaaagctggcagacagcagctttacagctgggaaaaagagctgctgggggcagggctggcggtagctcaagcatgctgtggttcaggctaatgactggaaggtcccatccatccttgagattttatgacgctatgtgcaagatctagcgaacgtatttggctaagaaaaatcctggaggagagactgcctcagacaactggggggctggaaagccgacctggaaagcagcctgaccttggatgatttagcacctgggttttttggctcttcctgtattaggtttgctggcttcgcatcaaatggaaggaggtggtgccagggacgtgaattaaacctgtcaaatagagggtgaggggagtgcagaaggctgggggaaggaggggctgtgtggggaactctgatagtctgacagcaccatctggacttggcagggatgacagccctgagatcagatggaactaaccaataaagctgctaaaattctgctgtcctgggcctatccggagtgggactcccgtaatctcctatttagaaggaacactgatctgcaaggggagagctggggcccttaatcattctgcagagctgataacggtcactgtggaggcaggactaggcgggtgcctggtttgcttagtcccaccttgaggtcccgagttccagtggtgtgccgaagtggtttgcactggcccatgagagtggattgttgaatttccaggaattttgtaagctggttggtaaacacagccacagtgaccattagagattatattaacctgcaattaaataaagtatgttaaaaacagtaataaatactcaaaactcatcacttcctaattattttactattatctatgttcttgaggatactgacatctattgtattggtatggtgtgctacaatataatggcgtgctattgcacatctcttcccaacctgaacattcagtgacatcacatcagtagctggggaatcggccctattgagagtatttacaccacagagattggcaaacactctatatcaagacccccctccccgagagctggttgttaaacatttgtcagcacaccactgctgctgggagacagagagaagaaactgatacacgtgagcactgaaacatcttagttccagggaggtagcatttgtgttgtatttctcagaagcaagtgtcctagtgtaatgtgcacaagtggcatgaagtttaacacctaaaagactgcttctctgcttgttctgtctaacttctgtgatttcaacacttgagaaagatgtttactttgctactaaacttattggagtgatttgtaaagttcactgtcacctgtgggcagtagttcagctaaattccctccaggaaagtggactgtagcttttcctgcctaactggcaaaatgaaaatatgctgaaaagaatacatcttaactaggcaccagaatagctcatttccaagtggtttatacagcaataacagtgttaacttctccaacagagacgaaatcatttataaatgattgttttgctgtttttgctttttattaaaattattactatggaacagaatgctttgtttgcctttgtctccaaaattctgtgccttttggtggttcttgtaaagtaagaatcacatgctgaatctacattttattattttcatatcataaaatgaggaagagccttcacagaagaaacttcaccctattcacttgcacaccagctgcgttctgaaaaactataattttcctttcaaacgcagagtgccgtctgaattgtaatactgccaactctcaactgtcaagatgatggaggaaaatactaatgcagatggcgtgagcttgtcacgggcctgctcagcgtgctctcccgggctgacattcgaattaagattcaaatagcaagtgagagctgaaagctgtttaaaatggctgtgtggtgcagtaaggggtctcaggggattgaaagaatctgtgtactcaccagaagaactctgacaggtcaggcagggccctcaggacttgtgtttgcctgacatttcaagaggcttcctgggagaagcggtgataagaccctgggggactaacagtcaaaacaaggctcaagacccttgaactaaggctattccccagcttctgagggtcagggagtccaaattgaggtcagagcatcaaagggatagtgcttgattgctgcagccgaggatgatttggggtatgacattatgtaccattcatattgtccttgaacccaaacactggggaatgtggcctatgtttctttcttcttctcttacatgaaaatcgtcaaactacacaaaagtggagagaatagtaaactccccagaaaaggacgtttccatttgcctttaccacatataaaaagattagcagtaatcccttgataccatctaattcccagtccgtattcaaattcccccattgtctcaaagagaactgcatttagctccatggtagaccagcgtatttggtgagaaaggaagtactttggaaaggttgctgatggcttccctaccctcttgacggtggctctggcagaaaccatgctgcaggggcacaggtggagagatgttcaggctggctgcagatgcctttccaagttgtgggatcttgggatttcctctcctcaaagaataagcctgtgacacttccccttctacttcccagagttacatggtgtccctctaggactctcccagcttcatgctgctggcacccacttgtctatcacgctggtatccgctgcttttcctgcagctgctgctttcactaatggcacttcttaaatctggtgagaggcttctctcaaaaatgatcgctcttccactaaccttaggtctactgtactcttggtgaatcacagctctttagagctcctcaagggcctaagcatcttttgttagaaaattctggctgaaattctcatgagatgggtcagggaaccttggagtggcagcacttgtgtcacatctaaaggcactcctctgactaaagagaagtggcagctgagcacactgcctgcccagggattttcttctgctctaaaggacattattaagacaactggtctgtactgtattgcctgatagtatcatatcaatgtcaatttcctcattttggtgattgttctaataagaatacgtaagaatgtgtccttgtttttagaaaatacacattaaatatcgagggatagagaaaaaaaaaaaaaa

SEQ ID NO: 1068 - DNA, 9127 bp, Homo sapiens
agtgtgagctgagctctttccctgaatgaatccaagtaaccctggccttctgaaatgaccagcagacacacaactgtccagaggctgcccaaagtataaactctggttctaaagtaccatgtccagccaaggaagtcctagtgttgcgctttctacgacgacagtcagttcagttgctgtgcaggctggggactccaaaatcgttatagctgtcataaagtgtggcaaatgggtacaacttcaactggctgaatcacagcccaatcttctagaaattggcagcagtcaagatgaaaccaaaaaacttcttcatgatcatgaacttcttttggccaagctcaaggctttggaagatcgggtatgggaactcttgcaggaagcagacaagacagctgaagagaacaaggatcagagtcaggtctatgatgccatggccgagactctgggtgaagcatgggcagctctggtgtccatgcttgaaagaagaacagagctccttaggttgacttctgaattttttgaaaatgccttagagtttgctattaaaatagaccaagctgaagatttcctccagaatactcatgagtttgagagtgctgagtccttaaaatcacttcttcagcttcatgaacatcatactaaagaactcttggaacggtctttagcccttttaaacaaaagtcaacaactcactgacttcatagaaaaattcaagtgtgaaggacctaatgtgaatcctgagttgactcagggagctcatagcagctgtctgaaggttgaccgccttcttgaacttctacaagacaggagaagacaactagacaagtacttgaagcaacagtggcaagaattgagtcaagttctgcagatatgtcagtgggaccaacaagaaaaccaggttacttgttggtttcagaaaactataagaaatttacaggaacaaagtctaggttcatcactttcagacaatgaggatcgaattcataagcaagaggaactgataataaaagcaaaggaatggaattctgctgttgagaagctgaagagtgaggcactgagaattctgctgtcaaaggactacgtggagaaagaacacctccagctctctcaccagaaactcagtcagcttcaagaagaatttggtcaactcatggtggaaaggaatacctggttaaagaaggcgaatgaattttttaacagtgctaacaaggcatttgatgtacttggaagagttgaagcttaccttaagctccttaaatcagagggtttaagtctggctgttttggcagtgaggcatgaggaattacacagaaaaattaaagactgcacaactgatgctttgcaaaagggacaaaccttaatcagccaagtagactcctgcagctctcaggtgtccggcatccatgagatgatggggtgcattaagagacgagtggatcatctgaccgaacagtgttcagcgcacaaggaatatgctcttaagaaacaacaactaacagcctcagtggagggttacctacggaaggtggaaatgtcaattcagaaaatcagtccagtactttctaatgcaatggatgttggttctacccgttctgaatcagagaagattttgaataaatatctggaactagatatccaagctaaggagacatcacatgaattagaagcagctgcaaaaaccatgatggagaaaaatgaatttgtatctgatgaaatggtatcactttcctctaaagctagatggctagcagaagaattaaacctatttggccaaagcattgactatagatcgcaagtcctgcaaacttacgtggcatttctgaagtcatcagaggaggtagagatgcagtttcagagcttaaaagaattttatgaaaccgaaatccctcagaaggagcaggatgatgctaaagccaagcattgttctgactcggctgagaagcagtggcagctatttttaaagaagagttttataacacaagatctagggcttgagttccttaatttaataaatatggcaaaagagaacgagatattagatgtgaaaaatgaagtgtacctcatgaagaacaccatggaaaaccagaaagcagaacgggaagaacttagcctccttcggctggcatggcagcttaaagccacggaaagcaagcctggaaaacagcagtgggcggcattcaaagagcaacttaaaaagacttctcacaacttaaaacttcttcaggaagcacttatgcctgtgtctgcacttgacctcggagggagcctccagttcattttagatctacgacaaaaatggaatgacatgaagcctcagttccagcaattgaatgatgaggttcagtacattatgaaagaatcagaggagttaactggcagaggagcccctgtaaaagaaaagtctcaacaactgaaggaccttattcacttccatcaaaaacagaaagagagaatccaggattacgaggatatcctgtacaaggtggtccagttccatcaagtcaaggaagagctgggacgtctcatcaaatcaagagagctggagtttgtagagcagccgaaggaactgggtgatgcccatgatgtgcagattcacctccggtgctctcaggaaaagcaagcccgtgtagaccatctccacagactggccctttccttaggagtcgacatcatctcatcagtgcagcggcctcactgctctaatgtttctgcaaagaacctacagcagcagctggagctccttgaggaggacagcatgaagtggcgtgccaaagctgaggagtatggacggaccctgtcccgtagtgtggagtactgcgccatgagagacgagataaatgagctcaaagactcattcaaagatatcaaaaagaaattcaataatttgaagtttaattacactaagaaaaatgaaaaatctcggaatctgaaggcgcttaaatatcaaattcagcaagttgatatgtatgctgaaaaaatgcaggctttgaaaaggaaaatggaaaaagttagtaataaaacctctgattctttcttaaattatccaagtgataaagttaatgtccttttggaagtcatgaaggatttgcaaaaacatgtggatgactttgacaaagttgtgacagattacaagaagaatttggacctgactgagcatttccaggaggtgatagaagagtgtcatttttggtacgaagatgcaagtgccacagttgtaagagttggaaaatattccacagagtgcaagacaaaggaagctgtgaaaattctccaccagcagtttaataagtttattgcaccctcagtgccgcagcaagaagaaaggattcaggaggccactgaccttgctcagcacttatatggtttggaagaaggacagaaatatattgagaaaatagtgacaaaacacaaagaggttcttgaatctgtgactgaattatgtgagtccctcacagagctcgaagaaaaactgaagcagggagatgttttaaagatgaatccgaatttggaagacttccattatgattacattgacttgctaaaggaaccagcaaaaaataagcagacaatattcaatgaagaaaggaataaggggcaggtgcaggtggcagatcttttgggcatcaatggaacaggggaagagcgactaccacaagacctgaaggtgtccactgacaaggagggtggcgtccaggacctgctcctgcctgaagacatgctctcaggggaagaatatgagtgtgtctcacctgatgacatctccttgcctcctctcccaggaagccctgagtcccctcttgcaccatctgacatggaggtggaagagcctgtcagctcctccctcagccttcacataagcagctatggggtgcaggctgggaccagcagcccaggggatgcccaggaatctgttcttccaccacctgttgcctttgcggatgcatgcaatgataagagagaaacattttcaagtcattttgagaggccttacctccagttcaaagctgagcccccactaacctccagaggattcgtggaaaagagtactgccttacacagaatcagtgctgaacatccagagagcatgatgagtgaagtgcatgagagagctttacagcagcaccctcaggctcagggtggtttgctagaaacacgggagaaaatgcatgctgataataacttcactaaaacccaagataggctgcatgcttcctctgatgcattctcgggcctcaggtttcaatcaggcaccagcaggggctatcagaggcaaatggttcctcgagaagagattaaaagcacatcagcaaagagcagcgtggtcagcctagctgaccaggcacctaatttctccaggctcctgtctaatgtaactgtcatggaaggttctccagtgactttggaagttgaagtaacaggatttccagagcctacactgacatggtacaagaagggccagaaattgtctgcagatgggcacttacaggttttacacaaggagacaaggcattcggtgttcattccaaaggtatgcaaggcagacgcaggcctctatgtggctcgggcccaaaactctagcggcgctctctcttccaatgtcatcctccacgtgacaggtaactgcaggctgccaatcacaagagtaaactggataaccctgtgtgtcgtctatgttagtgtgtccctaatgtactggctcctcacacaataactgtggtgttggcaccaatggacatcattctcatgtgcctaaagaaaagtgccgccgtttatcttcctgcacctcctgcaaagcatctcccaccaagtgtatctccagtctgatcaccatacttgtttggctaataccactgctaggtgaaataatcaaattttctggagcgtttaatatatttgagaagcttggtaaattatctgtagtggataagaacagatttttgtactctagaaacagatgttttcaacataatatgcagcaaaattattctatgcctattccctcctaatttaagggcgtgcagatgaaggctgacatcggcatagaaatgtgctaaatttcaaatatggttgttcaataatatatttttaattgtattttaaaacatccctttgtagggaatatcagtagaactattgaattgatgttgtatttttgcattagctgtcctttaattttgctttccatgtcttgatcttgttaccgaaatgcattctgtgtaatttcaacgtagactacgttcctgagtctgatgatgtcattgtaaataatcattcctcatgttgctctcacgggtttgacattggaggatagatgtgccatcaactttaaatagagtttccatcttttgtcagctctgcatgtcatacagcaagatggaacacaggttgcaagaaagaaccaacgttattcctgacattctattgatgtgttttgagcagcaatgtgtaaccaggtgtttctgcttctaatcttgattctgctgatgaccatttttatactttatggcaaagcctcattgcctcagtttcctgtctggaaaatgagttcatcatctacctcttgggcaattgagagttttcattttgtgtcttttaaacatctggaaaatggaaaacactgagggctaaggataatgatattgtttaatgtaatttgtcatcagaccggcctcctgctcactatttctttttttttagatgctgtttttttagaatattaaattaaaggagtgctgttaatatgtaatcttcaactagttccatggaggaaagtgatgttttatgaattagagcttaaattcctatctaatttctgaagactgcattcttttcaaagacttgaaattaaactcaggaggatacattttgtttgttctagggggaaacgtaatagaatggtatgagatgaattctatccttttacaataattattactataatattgaagtattctatgcctttctgaaacactttattcagaaaagatcattttttggcttccttttaaaaataagcttgaagtagggaagcatttgcttcttagattttaaatgtagtcttattatgctgaggaaaatctttagttgaaagaataattcattacagatttttgatgaagggaagaaattaattatgttgctggaagactgtctacaaataatcaaaatatttaaatgtaatgtattcaagttgttattaaaaagttactgaatgttatctgaagatgtgaaatgtgtagtcaagtaaaaagttggcgtatactttcttgggctgcatatccaatttaattaaaaaattaaatctcagtttccttctaaattttgatagaactatattaaaagcttgtatacacagcattctaggaaatttctcttaactatcttttttttgttttttttgttttttttttttttttttgagaaagagtcttgctctcttgcccagtgcagtggtgccatcttggctcactgcaacctccacctccgggttcaagcaattctcctgcttcagcctcctgagtagctaggattacaggcatgcctacctaatatttacatttttagtagaaaccaggtttcaccatgttggccaggctgggcctcagcctcccaaagtgccaggattacaggtatgagccaccatagccggcctcttgtatcctttttgtccaatttcaaataatgtgtgaatcttgcctaactgctgttgcccacgttgaagctaaagagtaaaaacctattcatgaacaaagaaggcaggtgagacccggtaacaaactgtctctcttcccactttctctttcttattaatttggcaggatctcccttcccattttgtcaacatggttgaatttgtgtgttggggttgttagggcatgggaattcctggtttgctttctctattgcatgcttgttcatgttaactctttggggagcagaatgagatacatatgcatccatggttatgatggaaaaaagcatgcaaaatccatttttagagagagagagaaagagaaaggtgggggtgggggagcacaaagatcagaagagtactatgctgatattcaagatatagtacagatagctttctgtgtacctatccatctacctattcatctgggctattgattgactcccacagcagtaaagaataattacgcagttattcttctggttatgttttaatttcaaaaagttaagtgtgattttcctttttgctgggatttctgtcttgagcaaataattattcttatgaaagtatcaattgcagttactggttaaaaatgtaagacctaggaaatttaagtgttgtttctattttaaggtatatacataatttataaccatttacttctagagaaaatcctgaatggttagtaatatcaaaacattttcaacaagaaaactaaaatgaaaagaaagtttaaaaattacatgtgttacagctcttttagaatttgtctagcaggttttctggtgaaaattaaactcaagattttcaccagaaaacgttttaaaacttctaaactcttaaacaaattataaatacttgatactttgaagaactgcaaaacaaaatgtttttaagttttcataaggcaaaatcattgagttttccagctttgattttccaataaaaggatgtataaatatttggtggtagtttttcacactcaattccaagagaaatttactgtaggaatctgtacatttgaatctctgaatattctatgatatttaaaatatttgaacaagatgcagaaaattttttagctatattaatcaataatggtaacctctatcactcataatcaagacacatacttaaaatagatgactacaagacccttctaactgctttgctcaaatttaaatttcctcaagtagttcatagaccctttacaacctggcctcccctctctggcctcggtttgatcccctcctattacccccaacccctagtaaagtgacatttaacttcagggttttaacatatcatgctcttctctccagccctttcttcctataactctcttactatcttcaccaccctatcttcatgtgacttaactcttgcttatgttccagttctgctgagacacaacttcccctgggaagcctcctgacccatcaagtccagagtagatggtcctgccatgtgcactgtcagcacctgcactgcccagccacgcccctgaatatacacaaaggaatcgcaggtttgagcatcagtctcctctggctaggctgtaagaaccttatcagcaggattcatgacagccctgttgtcattgtattgccagtacctaagacacagtcacactcagtaaactcttttgaattgaattgttgccaaaggtaaacaaagataaacctagcttgtttttctcccctttttagagggaggagaggggaaatgtaaaaagacaaagatgattctcccttcttatagacaggagtcaatccgaatcaggccctaacaatgaagcactcatgaaaatctctcacctcatctgcaaaacttgtgtgagaaccctccagaccctctgggctagaccctgattgaaaatttgaatttaaaaatagatgctggctccacggactaaaataatagtaaggaggaaagaggaaaggtccaggattgttgttcctggatcaatattgttccaacattttaaagtgttccaacattttaaaacatatgtacttaggcataaatcatcatccggtatgaggaactggatgcctccactctctatgactaaatccaaactgtcaaaaccagaatttatgtacttctttagaacactacgtaaatgatcaatatttaattgtagctggggctcagtagtctgggctgtgaacagatcttatttgaaaccagtatttcatacaaacttgtaaatataaagaaagccaaatccaagaacttaagagtatttgaattccaaatgaagaaaggaaagaatatcttattttgttctgctttatgtttgtctttattcatgaccatttcttactaaaaatcaccatctgaagcttttgaaactcctgttgtatgcacagcattttaagtgcagccatgaaataagttagttgaaacaaaataaaatatctccttccagta

SEQ ID NO: 1069 - DNA, 3647 bp, Homo sapiens
aaaagagacagggctgctttaagagagaaacaggaagttgtaactagaagccatctgaatactaagccagggcagaatgcttgtgaagtagcaactaaagtggcagtgtttcttctgaaattctcaggcagtcagactgtcttaggcaaatcttgataaaatagcctttatccaggtttttatctaaggaatcccaagaagactggggaatggagagacagtcaagggttatgtcagaaaaggatgagtatcagtttcaacatcagggagcggtggagctgcttgtcttcaattttttgctcatccttaccattttgacaatctggttatttaaaaatcatcgattccgcttcttgcatgaaactggaggagcaatggtgtatggccttataatgggactaattttacgatatgctacagcaccaactgatattgaaagtggaactgtctatgactgtgtaaaactaactttcagtccatcaactctgctggttaatatcactgaccaagtttatgaatataaatacaaaagagaaataagtcagcacaacatcaatcctcatcaaggaaatgctatacttgaaaagatgacatttgatccagaaatcttcttcaatgttttactgccaccaattatatttcatgcaggatatagtctaaagaagagacacttttttcaaaacttaggatctattttaacgtatgccttcttgggaactgccatctcctgcatcgtcatagggttaattatgtatggttttgtgaaggctatgatacatgctggccagctgaaaaatggagactttcatttcactgactgtttattttttggttcactgatgtctgctacagatccagtgacagtgctggccattttccatgaactgcacgtcgaccctgacctgtacacactcttgtttggagagagtgtgttgaatgatgcagtggccatagtccttacatattctatatccatttacagtcccaaggagaatccaaatgcatttgatgccgcagcattcttccagtctgtggggaatttcctgggaatcttcgctggctcatttgcaatggggtctgcgtatgccatcatcacagcactgttgaccaaatttaccaagctgtgtgagttcccgatgctggaaaccggcctgtttttcctgctttcttggagtgccttcctgtctgccgaggctgccggcctaacagggatagttgctgttctcttctgtggagtcacacaagcacattatacctacaacaatctgtcttcggattccaaaataagaactaaacagttgtttgaatttatgaactttttggcggagaacgtcatcttctgttacatgggcctggcactgttcacgttccagaatcatatctttaatgctctttttatacttggagcctttctagcaatttttgttgccagagcctgcaacatatatcccctctccttcctcctgaatctaggccgaaaacagaagatcccctggaactttcagcacatgatgatgttttcaggtttgcgaggagcgatcgcatttgccttagctattcggaacacagaatctcagcccaaacaaatgatgtttaccactacgctgctcctcgtgttcttcactgtctgggtatttggaggaggaacaacccccatgttgacttggcttcagatcagagttggcgtggacctggatgaaaatctgaaggaggacccctcctcacaacaccaggaagcaaataacttggataaaaacatgacgaaagcagagagtgctcggctcttcagaatgtggtatagctttgaccacaagtatctgaaaccaattttaacccactctggtcctccgctgactacaacattacctgaatggtgtggtccgatttccaggctgcttaccagtcctcaagcctatggggaacagctaaaagaggatgatgtggaatgcattgtaaaccaggatgaactagccataaattaccaggagcaagcctcctcaccctgcagtcctcctgcaaggctaggtctggaccagaaagcttcaccccagacgccaggcaaggaaaacatttatgagggagacctcggcctgggaggctatgaactcaagcttgagcaaactttgggtcaatcccagttgaattaattggcatgaagagtacagatgtaatcacaagtaatgcaagactcactgaggaatacaagccaagctgatgaggcagtacaggggagaggctggaaaacatattaagagcataaattggagagaatcaaagccttgtcacatggatcctctggtgcctgaagaaatgagattttattatccctctctattatgcaaatgaatttagttttttgacagcagccattctgattactggattggctggggtggggatggaggtatcaggagtctagctgctggaggatgggacagctgtgctgggtcttcagggcatttctgctgcgaatgcggctctccaggcccttcacttctattctggattttattccctccattaaggagagtttaaaaataaaagaaagcttctgagagtaaacattttgctcctaagctgaagggaatgcccagctatttagtaagtgataagtttcttattttgaggacttgactcccatttgctctcagtgaccccagggcagagcccagagaagtgttccgtacccactgctgatggtttcccagagcccacactgagttgaagaacctattgttcttcttggcatccttcttatgctacttctcccatcgctcaaaggggttgcctatggctgggtgtgccctgccctaaatgcagcaccactttcaagcttagtaggaccattccaagaaaaccaggtttcttctccccataccacgttgtgcctgaagaacaagccttcccgtccttgcctgcatgtgagtcacttcttggctgtgcagcaggtccccccctccccgcgatatgctggagggtaggattctgcagcctgtgttgctctctacctggcagcagactgtgcaggagccccaacctgtcctccaattccagcattcacagctgatgagcagtgcaggagcagggcgagaggaacagagccaatgatgtgtgggttacactgaggagccaaggacagggcctcaggtctcccccttacaaggcgtggctcatggcctgcattccagagaccaacatgatagcttttaattcagctgcatgacctgtgccttttaagccataaagatacctcaagcctagcacctcttgaaatccagatgttcatattagactcgaaaaaataggctccaggcctaggtgcccaggctatgatgagtctgcttttgaaggaggtagggaatgacatcttccttggacccaaagcttaaaagtaatgtatgctttgctgaccactgtttgttaggccttaaacaacattcactgtggtggtatcaggcacactgctatgtgcatcaattatttttttgctttccaaacagaatctctggggcacaagttttacactcaagctaagtataactttgtcatttcaggtaaatatgacaagtggtggagcatgaagttttctaatttgacttaatcctaataaatttttgttacaaagtaaaaaaaaaaaaaaaaaaaaa

SEQ ID NO: 1070 - DNA, 4414 bp, Homo sapiens
agatggttcctcgactctgagcccctccctgctgcgctcgccgggtcgaggccgctcgccgggctgaagccgctccgagcgtcgggccccgcgccctggccctcctgggtgtagtcccggtcctgcctctgcggggcccgagcccgcccacggcgccggctggccaaggtgtcccagctgctccttggcgccccctggcccagctcccgcgcccgaggtttccggtgagcggcagtagccggttatgacgactccctcctctggaacagccgccgtctcctccgcctcctcctcggtagttcacggctgccccggctccaggcctgtggaaatcgaatcaagggtttctggagtggagtgattccagctgctttgagctgaaggaaaagtagcctggccagtaaagcgtccgtgtgctggaggagtgcagccacccatcccggcgggccttgcaggacgaccgacaccaggaaggctttgtgccaggcccagcagccacccccagccgccttatgcaagtgggtacatgccctcgccagacgccagctttctgatctgcgtctttagattttttccatcgcctaagcgttacttctccactgatcggttttagagacctgaaacatcacagaagcttctgagtggttctgaagattcaagaggtttgcaggttgctatgttaatgttgtttgtctttggagtcttacttcatgaagtctcactgagtggtcagaatgaagctcctcctaatactcacagcattccaggcgaacctctgtataactatgccagcatccgcttgccagaggagcacattcccttctttttgcacaacaataggcatattgccactgtctgtaggaaagactctctttgtccatataagaaacacctagagaagctaaagtactgctggggttatgagaaatcctgcaaaccagagttcaggtttggttacccagtttgcagctatgtcgacatgggatggacggacactcttgagtcagctgaggacatattttggaaacaagctgactttggatatgccagagagaggctggaggagatgcatgtgctctgtcagcctaaggaaacgagtgactcaagtctggtgtgttcccgttatcttcagtactgcagagcaaccaatctctatcttgatttaagaaacatcaagagaaatcatgacagatttaaggaggactttttccagagtggtgaaattggagggcactgtaaacttgacatccgtacattgacgtctgaaggtcagcgcaaaagccctctgcagtcatggtttgctgagctacaaagctatactcagctcaacttcagacctatagaagatgctaaatgtgacattgtcattgaaaaaccaacatatttcatgaaattagatgcaggtgttaacatgtatcaccacttctgtgatttcatcaatctttatattactcagcacgttaataactcattcagtactgacgtgtacatcgtgatgtgggacaccgatggaaaaattcgagtcaccattcttgcacggagcacagaataccggaaaatccttaaccaaaatgagcttgtaaatgcactgaaaacagtatctacatttgaagtccagattgttgattacaagtatagagaacttgggtttttagatcaactaaggatcacacacaacacggacatatttattggaatgcatggagctggtctgacccatttacttttccttccagactgggctgctgtatttgaactgtacaactgtgaagatgaacgctgttacttagacttggccaggctgagaggcgttcactacatcacttggcgacggcagaacaaagtctttcctcaggataagggccaccatccaaccctgggggagcacccgaagttcaccaactactctttcgatgtagaagaatttatgtatcttgtccttcaggctgcagaccacgtattgcaacacccaaagtggccatttaagaagaaacatgatgagctataaatatgctgagtctgtttgcaaaaagagagtgtttaaacactccaacacccagacttagaattaaatcagtaaagcaatctgttatttcctatccccgaattaccttttctatgccaaaacataccttcaggatattgttatgtgttgtatagatgttaagtgtttcatgtggtttttgtgtcattgctatttatcaatagcaataattttgcactgaaaactttttatagttcaaaaattaagcatggactccccagtatactttaactttctttctttctttttttttttttggagacagagtctcactgtcacccaggctggagtgcagtggcatgatctcagtttatgcaacttctgcctccccaggttcaagcgattcttttgcctcagccacctgactagctgggattgcagcctgcaccaccacacctggctaaatttttgttgttgtcgttgagatacagtttcactctgtcacccaggctggagtgcagtggcatgatctcagctcactgcaacctctgccttctggattcaagtgattcttgtgccttagcctcccaagtagctgggattacaggcgtgcaccaccacgcccagttgatttttgtatttttgatagagacggagtttcaccatgttggccaggctggtctcgaactctgggttcaagaaatcctcccaccttgcctcccaaagtgctgggattacaggtgtgagccaccacgcatggccctgaactttctctttttaggaataccaaagttttcaactttttcagctttagaatttgtaaatatttttgtagaatatcatatgactgtaattccagagtgttccaacttgtttatgatatatttgggtaaatttacaactgttcttttatttgccataatctggttataacactgtttgtggtaggaaaggaaaacatgcaaaacatacacacacacacacacacacacacacacacgcagagttgtgattctcagtaccaagctataggaccatgttatagatcagcgtttagtcacctccaggttatatgcatcgagaacctgaataaatcatgccactatattaatttatattacatgtttcatatttaaatcatgttttcctaaaatgtagcaactacatgtgataaaagcaaattagaacattctgtaggactgtcttgcataccttctgtctggtttccactgattccttcttagccatggagagcatttgtgattaattaatttatatatgaaataatggtttccattttatgcgagtatttgtaactgcatataccagtgcgtgtgcgtctacctctgtcagcatgaaagtattccagtctttaatttcaaaaacttcaaattagcctcatgaagagaatttttccctgtgaaaagtaagaccaagaaaaaacaaactaaagacatgtgacttattcaatgaaagtgaaaaagaagctctaaaacagtgtcattgattaaaaagaatatctggaatgtagccccactctttgagtgggattcatttcttactgcttatgaactttcaatttagtagtcagaaaccatggatttattttactgcacaatgtgaagtttacattttattaacacttgagtagtctgatttagagactagttacttctattttttaaaataatggagtaacaaattacagaatagctaaataattttttaaaaatattttacagttgtaaaaaatatccatcagaaaaatgacacacaaaacaaaatatctggacctttacagaagacgtttgctgacccccactttaaaggattggaacagtcttctagaattgaggaatatttattaaaatacctgtaaagaaaatagtgaatcactgtagcaatggctttgattcagaccttaaaatcacataagaagaattacaacatgttatggatttttaagtggcaggtattgtaactgttttttgtgtgcaaaatactgagtaaccactgggaaaatatttcagatgaaagggatgacaaaagcatgttgcgctttgcatcagcaaggcattgacttctgaaaaaatgatctgaaaaaagtttcaccgtttgtcttcttacctcattttaagaagcatgtgaaaatgggatactatagactactgagaatttcagaaattgagaacaatttcataataaaacggctatatttgaagagagaatacattttatataaacaggaaaatacatttgacactttatggaattttatgagactttttgtgggaacagaaggtcttcaaattgtaaaatgtaaagattgctctttttattaagtctttaacagggatgtatttcattgtatgttttgggtatggctttggaataaatcattttatattttatttgaatatcagaaccatt

SEQ ID NO: 1071 - DNA, 5641 bp, Homo sapiens
tagtgctggttggagggacgaggggggtgcggagccagccaggccgccctcccgttctcacagcagccgagcagagcgcagagcgggctgccatggcgctggccaggcctgggaccccggacccccaggccctggcctctgtcctgctactgctgctctgggcccctgccctttccctcctggctgggacggtgccttcagagccccccagtgcctgtgcctcagacccgtgcgctccagggaccgagtgccaggctaccgagagtggtggctatacctgtgggcccatggagccccggggctgtgccacccagccatgccaccacggcgctctgtgtgtgccccagggtccagatcccaccggcttccgctgctactgcgtgccgggtttccagggcccacgctgcgagctggacatcgatgagtgtgcatcccggccgtgccaccatggggccacctgccgcaacctggccgatcgctacgagtgccattgcccccttggctatgcaggcgtgacctgcgagatggaggtggacgagtgcgcctcagcgccctgcctgcacgggggctcgtgcctggacggcgtgggctccttccgctgtgtgtgcgcgccaggctacgggggcacccgttgccagctggacctcgacgagtgccagagccagccgtgcgcacatgggggcacgtgccacgacctggtcaacgggttccggtgcgactgcgcgggcaccggctacgagggcacgcactgcgagcgggaggtgctggagtgcgcatcggcgccctgcgagcacaacgcgtcctgcctcgagggcctcgggagcttccgctgcctctgttggccaggctacagcggcgagctgtgcgaggtggacgaggacgagtgtgcatcgagcccctgccagcatgggggccgatgcctgcagcgctctgacccggccctctacgggggtgtccaggccgccttccctggcgccttcagcttccgccatgctgcgggtttcctgtgccactgccctcctggctttgagggagccgactgcggtgtggaggtggacgagtgtgcctcacggccatgcctcaacggaggccactgccaggacctgcccaatggcttccagtgtcactgcccagatggctacgcagggccgacatgtgaggaagatgtggatgaatgcctgtcggatccctgcctgcacggcggaacctgcagtgacactgtggcaggctatatctgcaggtgcccagagacctggggtgggcgcgactgttctgtgcagctcactggctgccagggccacacctgcccgctggctgccacctgcatccctatcttcgagtctggggtccacagttacgtctgccactgcccacctggtacccatggaccgttctgtggccagaataccaccttctctgtgatggctgggagccccattcaggcatcagtgccagctggtggccccctgggtctggcactgaggtttcgcaccacactgcccgctgggaccttggccactcgcaatgacaccaaggaaagcttggagctggcattggtggcagccacacttcaggccacactctggagctacagcaccactgtgcttgtcctgagactgccggacctggccctaaacgatggccattggcaccaggtggaggttgtgctccatctagcgaccctggagctacggctctggcatgagggctgccctgcccggctctgtgtggcctctggtcctgtggccctggcttccacggcttcggcaactccgctgcctgccgggatctcctctgcccagctgggggacgcgacctttgcaggctgcctccaggacgtgcgtgtggatggccacctcctgctgcctgaggatctcggtgagaacgtcctcctgggctgtgagcgccgagagcagtgccggcctctgccttgtgtccacggagggtcctgtgtggatctgtggactcatttccgttgcgactgtgcccggccccatagaggtcccacgtgcgctgatgagattcctgctgccacctttggcttgggaggcgccccaagctctgcctcctttctgctccaagagctgccaggtcccaacctcacagtgtctttccttctccgcactcgggagtccgctggcctgttgctccagtttgccaatgactccgcagctggcctaacagtattcctgagtgagggtcggatccgggctgaggtgccgggcagtcctgctgtagtgctccctgggcgctgggatgatgggctccgtcacctggtgatgctcagcttcgggcctgaccagctgcaggacctggggcagcacgtgcacgtgggtgggaggctccttgctgccgacagccagccctggggtgggcccttccgaggctgcctccaggacctgcgactcgatggctgccacctccccttctttcctctgccactggataactcaagccagcccagcgagctcggcggcaggcagtcctggaacctcactgcgggctgcgtctccgaggacatgtgcagtcctgacccctgtttcaatggtgggacttgcctcgtcacctggaatgacttccactgtacctgccctgccaatttcacggggcctacgtgtgcccagcagctgtggtgtcccggccagccctgtctcccacctgccacgtgtgaggaggtccctgatggctttgtgtgtgtggcggaggccacgttccgcgagggtccccccgccgcgttcagcgggcacaacgcgtcgtcagggcgcttgctcggcggcctgtcgctggcctttcgcacgcgcgactccgaggcctggctgctgcgtgccgcggcgggcgccctggaaggcgtgtggctggcggtgcgcaatggctcgctggcggggggcgtgcgcggaggccatggcctgcccggcgctgtgctgcccataccggggccgcgcgtggccgatggtgcctggcaccgcgtgcgtctggccatggagcgcccggcggccaccacctcgcgctggctgctgtggctggatggtgccgccaccccggtggcgctgcgcggcctggccagtgacctgggcttcctgcagggcccgggtgctgtgcgcatcctgctggctgagaacttcaccggctgcttgggccgcgtggcgctgggcggcctgcccctgcccttggcgcggccccggcccggcgcggcccctggcgcccgagagcacttcgcgtcttggcctgggacgccggccccgatcctcggctgccgcggcgcgcccgtgtgtgcgccctcgccctgtctgcacgacggtgcctgccgtgacctcttcgacgcctttgcctgcgcctgcggcccggggtgggaaggcccgcgctgcgaagcccacgtcgacccctgtcactccgccccctgcgcccgtggccgctgtcacacgcaccccgacggccgcttcgagtgccgctgcccgcctggcttcgggggcccgcgctgcaggttgcctgtcccatccaaggagtgcagcctgaatgtcacctgcctcgatggcagcccatgtgagggtggctctcccgctgccaactgcagctgcctggagggtcttgctggccagaggtgtcaggtccccactctcccctgtgaagccaacccctgcttgaatgggggcacctgccgggcagctggaggggtgtctgaatgtatctgcaatgccagattctccggccagttctgtgaagtggcgaagggcctgcccctgccgctgccattcccactgctggaggtggccgtacctgcagcctgtgcctgcctcctcctcctcctcctgggcctcctttcagggatcctggcagcccgaaagcgccgccagtctgagggcacctacagcccaagccagcaggaggtggctggggcccggctggagatggacagtgtcctcaaggtgccaccggaggagagactcatctaggccagcctggctgctggcaccagcacctggaggtcctgaatggtttctacctggagacccaaggaagctgcttccagggctcgggacattgctacggaagtgtccccttggctggcagcctctgcctctgcctctgccccatcctggatggaggacgaggggagcaactcagggaaacagaggcctagagaggctgcggacttctccatcccaccctcggggttccgccttggcaggtgtacggctgtgcgtgggagggcacacgtgggttcacagtgtgttcaggagtgtgtgtatctggaggagtgtgtgtgtgagtgtgtacctgggcctgtgttagtctgcagatgctagtgtgagtgtgtcctgacatggctccagggcgtgtctgccgtgtttactgtgtgtctatgactgtgatgggtgtagctgatcccaggaggtggcggctgcgccatggggtcaaccattacagtcctagggcaggggcggcccaaggctgcatgttctccaggaggccaggccggggttgcccaggcacctccttccccgcctctgggggctgctcctgctgtggaggcagctgggaagtcagggaaggccactagcagaggctgagtgggcttctggctcctagaacaaatgtcccttcaggcaggtctgtctgccagaagccagagccagtcatgcgagggaaccacagacccacccgccccctcagccggagcagcccgagggagcagaggaggggctgcctggagcttcccaccctgctgtggtcatttgtcaaagggggaaggcacccactgcctacctcacagggctgttgtgaggatcagagaggacgacagtggggaaagaatctggaagtcttcaactgccgtctgatgggaaggaccgtctgggtgtccttctgggatgaggatgacagagcaacccttctcctgccctgaacccccccagctcacctgaccacctctggttctccagctccggtccttcctagcagcctggtgagctcactccttcccctgatgactggctgcctctacacagactcggcgagaggacttgaaggaagccctctgggttgtctgctgagtacaggggctcagtgaacactggcgctgcctctgagtcggggctgggcctgcagaggccgactcagaggagactctgctgcttgctcccagccccttccccggcgatgcccatcacactgtgacctcccatccctgaagggcacctgcctgagggcctggcctccttccagcttcatggacctggagatgtgccctttcatccttcctgcttcccaggccagtagatccgtttacacttttgggtcgacagtcagcttttccttttggttttggcgggtcccagaggcatgggtgtccagtccaatgtggggagccacgtgacaacgtgggggactgggacatgggactgggaagtcagcagacgctgggatagagagggccctgaacaccaggctcaggggcttgcttggtccttatcctgtaggaggtgggaccacctttccctgaactttctctacaacccttgggagcgtggggaggaggcggctggttccagggtcagtttactaagttagagatttggaaaacctgtgtcagctgtaactcctaggatattttatgtggaacctaacatgcagatgaaagctg

SEQ ID NO: 1072 - DNA, 11998 bp, Homo sapiens
gacaggggctctgggcggccggggagcatgcccgcgcggctacgctgaatggcgcctcctctgcgacccctcgcccggctgcgaccgccggggatgctgctccgcgcgctcctgctcctgctgctgctcagtcctttgccaggagtgtggtgctttagcgaactgtcttttgtaaaagaaccacaggatgtaactgtcacaagaaaggacccagtcgttttagattgccaggctcacggagaagttcctattaaggtcacatggttgaaaaatggagcaaaaatgtctgaaaataaacggatcgaggttctttctaacggctctttatacatcagtgaggtggaaggcaggcgaggagagcagtccgatgaaggattttatcagtgcttggcaatgaacaaatatggagccattcttagtcaaaaagctcatcttgccttatcaactatttctgcatttgaagtccagccaatttccactgaggtccacgaaggtggagttgctcgatttgcatgcaagatttcatcccaccctcctgcagtcataacatgggagttcaatcggacaactctacctatgactatggacaggataactgccctaccaacaggagtattgcagatctatgatgtcagccaaagggattctggaaattatcgttgtattgctgccactgtagcccaccgacgtaaaagtatggaggcctcgctaactgtgattccagctaaggagtcaaaatccttccacacaccaacaattatagcaggtccacagaacataacaacatctcttcatcagactgtagttttggaatgcatggccacaggaaatcccaaaccaatcatttcttggagccgccttgatcacaaatccattgatgtctttaatactcgggtacttggaaatggtaatctcatgatatctgatgtcaggctacaacatgctggagtatatgtttgtcgggccactacccctggcacacgcaactttacagttgctatggcaactttaactgtattagctcctccttcatttgttgaatggccagaaagtttaacaaggcctcgagctggcactgctcgatttgtgtgtcaggcagaaggaatcccctctcccaagatgtcatggttgaaaaatggaaggaagatacattcgaatggtagaattaaaatgtacaacagtaaattggtaattaaccagattattcctgaagatgatgctatttatcagtgcatggctgagaatagccaaggatctattttatctagagccagactgactgtagtgatgtcagaagacagacccagtgctccctataatgtacatgctgaaaccatgtcaagctcagccattcttttagcctgggagaggccactttataattcagacaaagtcattgcctattctgtacactacatgaaagcagaaggtttaaataatgaagagtatcaagtagtcatcggaaatgacacaactcattatattattgatgacttagagcctgccagcaattatactttctacattgtagcatatatgccaatgggagccagccagatgtctgaccatgtgacacagaatactctagaggatgttcccctgagacctcctgaaattagtttgacaagtcgaagtcccactgatattctcatctcctggctgccaatcccagccaaatatcggcggggccaagtggtgctgtatcgcttgtctttccgcctaagtactgagaattcaatccaagttctggagctcccggggaccacgcatgagtaccttttggaaggcctgaaacctgacagtgtctacctggttcggattactgctgccaccagagtggggctgggagagtcatcagtatggacttcacataggacgcccaaagctacaagcgtgaaagcccctaagtctccagagttgcatttggagcctctgaactgtaccaccatttctgtgaggtggcagcaagatgtagaggacacagctgctattcagggctacaagctgtactacaaggaagaagggcagcaggagaatgggcccattttcttggataccaaggacctactctatactctcagtggcttagaccccagaagaaaatatcatgtgagactcctggcttacaacaacatagacgatggctatcaggcagatcagactgtcagcactccaggatgcgtgtctgttcgtgatcgcatggtccctcctccaccaccaccccaccatctctatgcgaaggctaacacctcatcttccatcttcctgcactggaggaggcctgcattcaccgctgcacaaatcattaactacaccatccgctgtaatcctgttggcctgcagaatgcttctttggttctgtaccttcaaacatcagaaactcacatgttggttcaaggtctagaaccaaacaccaaatacgaatttgccgttcgattacatgtggatcagctttccagtccttggagccctgtagtctaccattctactcttccagaagcaccagcaggcccaccagttggagtaaaagtgacattaatagaggatgacactgccctggtttcttggaaaccccctgatggcccagaaacagttgtgacccgctatactatcttatatgcatctaggaaggcctggattgcaggagagtggcaggtcttacaccgtgaaggggcaataaccatggctttgctagaaaacttggtagcaggaaatgtgtacattgtcaagatatctgcatccaatgaggtgggagaaggacccttttcaaattctgtggagctggcagtacttccaaaggaaacctctgaatcaaatcagaggcccaagcgtttagattctgctgatgccaaagtttattcaggatattaccatctggaccaaaaatcaatgactggcattgctgtaggtgttggcatagccttgacctgcatcctcatctgtgttctcatcttgatataccgaagtaaagccaggaaatcatctgcttccaagacggcacagaatggaactcaacagttacctcgtaccagtgcctccttagctagtggaaatgaggtaggaaagaacctggaaggagctgtaggaaatgaagaatctttaatgccaatgatcatgccaaacagcttcattgatgcaaagggaggaactgacctgataattaatagctatggtcctataattaaaaacaactctaagaaaaagtggttttttttccaagactcaaagaagatacaagttgagcagcctcaaagaagatttactccagcggtctgcttttaccagccaggcaccactgtattaatcagtgatgaagactcccctagctccccaggtcagacaaccagcttctcaagaccctttggtgttgcagctgatacagaacattcagcaaatagtgaaggcagccatgagactggggattctgggcggttttctcatgagtccaacgatgagatacatctgtcctcagttataagtaccacaccccccaacctctgattctttcactggcagtgattcaggtggagattccgcattgaggaagtgtgaagaccctgctgtgtcatctgttagtgagcagacttcctccttagttctgcagccgccatctgccatgctatgctttgataaaaatgattttccaatctagacggccatgctcaggtattctcaccattaaatctgttcgaaggacaatgaacagggaaccaaagccttttgtgaaaatcttaatatctttatggggtattttagctttttttgaatgtgttttgttttttatttttaaacttgtgtaatttgaatgtttcattgtcagcaatgtgaaagaacggtcgagatgtttgactggattataaaatatatcactggagcaaagggaagacttttgaaagcccctttgctgactatctacctcagtttgcctcccggcaaactctgaagacaactttgttacctcatttgttgttatagtttatctcagctacataaccaatgatacttcctagtagtattgtgttttcattgctgtacgtgtaatgtgtgtgatcaaaggagtcatataggtagatgagtaagaatgtttatctgaagctctgatttttttaaaaaaagaaactatgacatctgcatggtttggataagttcatacctctggctgtgaggaccgttaaaccactgagaagaggaaaagtggggctatttcttctaacgatgaccaaaacaagaaagtatatttcttttgagaacagaactattcaataccaggtagggatcattttgcttaaaaggcctttatgttttgggcattagagtctgagtgctttatctcctatatcccaaacctcaagctgcccagaactgtgccttttctaccttcccctttgcctgacggttggccaaaggctgcactgtctagtttgcaaagcatcctcaactttgccagtattagttgcaaaaccccatgcagaatatggatttttaaagaaaatgggttaaggtggttttttttctttttttaaatcccagtttggcttaaaggagtgaagacatttcatgaactattaagaatgaaggtaaatgcaacagtagacagtaaaatgaactcgaagttattatggtaacagtgcctttcagtataatgaaattctttgccttatacctttttaatattcatgaaattgtttaggaacaggagtacaaaaagttgccttaagagtttcttggattttatcagtaactattttgatgtatagtatcttaccaaggcattttttttaagtgcaggttttgtttagggataaatattcagagttctaccaccctacttgtgttttcttgaattctttagagaatatggtatctacttaatcttccttcagtgtcagtgctgtgaatgaggaatgctaactccaggagtgagttaatcctcttgcaggtttgaaatcagcaaattgtttactcagctacataacataggccttttctccgtcatgagacagttacctaggtgccgagcagtgggagaggataaagaactaaacgcgtgtagagaaggggtcccatatccttttaaaagtattttttcaaattttctggaagtgacttttgattctcattttaaaaggaatcataatgggtttacacttgaaatgctttgttcctagaggaggcagggtcatgttcactgatgttctaaaatcaaaggaatattagcagataatagtcccagcatcatctgctagtctaatgactgtagatataacatttttaatttttttaaatctgtaattttgtgccaaactggatgtgattaagactaaagttcaatgccagcaaccacttctgaactaaactcagagtcccccagttagttatctaagtacggaattcatcgcaaaacaaacaaaaaagcagagctttaggtgaacagtctgcagcaaggaaaaatgctgctcctgcctttatagctcctgttttatactacctccttttaaagttattctagtgttattttttttcctgtactcagggaacgttttgttacttttgagctgcctcatggaagcataggcagattgacagggtatagcgctttgtggttggtaagtagaagtatatagggccaacttttatcagtatctaaaattaagtacagtgagatcattttatttttaagctttcattaaaaggcaaacaaaatctaaagctgaaacatcatccatcatggttatggaagatgtgtctaggactacatgaattcgagtggttttaaatggctaaaaagacgagctaaagtccttgaggaaagtattttgtttgtttggtttttgatgaataggcttatagttacaatagaactttaggctataactatttgataattatttaacagtacattttttaccttttcattttgttcttatacggactttttcataataattctgttaccaaagaattttcagtagaaaataaaattttgattataattccccccaaattgaattaactagaagcatttatagatatgaaacttacacaagtagttactaacccaaaacaatagggtttatattgattgttgtagttaaatagattagtaatgttaactaccttattgttaccagagcatttaaaataagttgtaatactttctttaccagcagatcgttccaaagaatttcaggtatagttttttcttcagcaagtaaatcttcaactatacagtattaaagtatttttatattgttgaaactacttgttggagagaaaattttttttttttaccaaaaataaatactttggtctcattgaataagatatttagtaatacagcaaagacttctttttacttgaccaaatcaagcttctttgaagtcttaagtatgaaattgtaattaaaatgtgaagattttcactcatttttcatagtggtattacttcatggtattgtacttcaaaggggctaatatgcaaatggtaactattttcttttccaaagatgtatttgctgtaagtactgatacctgcatgtcatttttatgccaaatattacaagatactgctcatcagtattttcataccaaagaccattaagatgtataggttagcctgtaagtaagtaaagatgagcagatttgaaataaatttatttagaggccgatagagaatctagctttagtagcaaaaaatatcaaagggctaagtttacataattaaaagcaatacaattatattggtatttatcagtgtttttattcaagtactttttatcagcaaattaaaaagaaaaaaaccaaagatatttaaggttacctccgcatataggcaaatatagttgtacattaaactgttgtttcttgtttttatgttaaaccaaacatgtctcttcggaacacagtctgtatacaaataacatgcatgaggactttccatttaatctgtgattcagccacatgatgtttttgccaaatgatgtgatactttccaaagcaccttgagtgtgaaatgtcaacagaaatatcagcaagcttttatgttgcagagtattatggtacctctgaattagcctgtatagttctcttcctgctttaagcattacctggttagctcagacggcttgaggcagtcccttaataatagggatgcttttcatctctaaggatgtaagaggcaaacaaatcatgtcattctttaagtgggctatgctttgatagatgtgctctttaaaggtgtgagattggaatttagagttgttaaattgaaatgtttgcattgcaccaaaggagctcagttttcaaactttaatggaaccttgggtaaagggaaaaaatttttaatgaaatctggggttttatattttgattagcctaaaagtaaaaatacagctttatccattaagtgacttttaaaaatcagttttgccataccaaagaaattagattcttagtgtcacatgctatacttttgtctgtgcttgaaacgagcaatgccaacattgggaacaatgacagaggtttgcatcagtttgtcttggctttgttaaggacttctgccagaaatgtgctcgtggttgacaacccaggatcattgttcaagttcttatgcagacacctttgaaaacaattcagatcgtgtcacaagaatttggaattgaaaatatcatttattttttaatgcaagaatacccagatgtggtttcacttcagcagtagctatagtggttcacttatatacatttctgtttcactgaatgtaaattttgaatactgaatgtaaaaaaaaaactccagttatattgaaacagtcactaagactgcacatgtgttttgcagactttcttcctgaccatttgccacatgggtctctgataagattctgttggtttaatagtcaaaataatctttgcagtttgtgagcactgagtagcaggttctggagactaccatatacaaccagttgtctaattgtgatttttttattgatgtttagaagaatgtaaccgtagagttctgtgttaagttgatttatgctcaggacataagatcacaggctaatgcaatgtgtatgtttcaggctttaatcttctcaatttccctttttaagccgttgatggtgtttaagattaacatgacagtcttgtatttttaccagatactgtattatttttcctattgctgctgtaacacattaccatgaaggtggtggcttaaaataacacaaatttttcttaagttctgcagatcagaagtctaacacaggtctccctgggacaaaatcaaggcgcttgcagggctgtttctttttgaggctttagggaaaaatctatttccttttctagttttttaaggctgggaacccctccttccatcttcaaagccagccatgtagcatctctctgaagctccttccgttatcatttctctttgtccaaccccagctgatacaggttatctaggtttaaggattccagtgatcacattgagcccacctaaataatccaggataatctccccaactgaagttcctcaacttaatcacatctacagagttccttttgctatgtttggtaacatattcactggttccagggatttgggcatggacttctgtaggtggccagtattttgcccacaacaggtacattctttctgtggaattctgatccctgtaaaatgtctgtagcattaaagagattggaaatctgaggtcatgtgccccttggggatctttaaagattaaaagcatgaaaactttgacttgtagcctaccaaaattatacactaaactttctctccaaaatacttgtgaaacaatttatctttaaagtttctgaatatgtgcttcataaaataacatctcatgtttatcagcaagtgtcctaaatatttgcgtctaactttatggaatttattcagaaaaagaattgaaaactcttcttatagttaccctttctccttttctcttcagtggttatgttgctggggaagagttgggggaagacctcaaaacacaggaactcagagtgatgaacaggaccatgctcaagtttattctttgttttcttttaatgacatattcacaacattcacaactttctgcctttaaatctggttcctctcttcagcttcaccaagccactgaatgcttttcagttttattaaccctcacattccccatccttctcagcaagagcctctccttatgccatcagcatgtatatacatttcctaggaaatttgatctttcttgtcattcttttttggttccaatcggccttttcctggttctcaaagctctagtttcttctaatttctggatcatcgcaagtctggccctctttgaactttaaaacataatgtctaattccaccccaattttcagcatttcttcaactaaatcgataaagctgtctccattatgagaaaggccagaataatactccgagtaagcataagaaagctggtcattttacaacttctcccgactctaggaagtaatatgatgccatttgttgagcatctacagtgtgccaagcacatggttcatctctgcaaactgctgctacattctgtaaagcaagtattatccgcattttagggattaggaacagcttcctgatctcttgccaaaagtcacagctagtgagtggtttaggcaagatacaaaccctagttagttaatccttactcagaagtgtataggactatgatacattgtctcagcttaaaaaaaaaaaaaaaaaaaaaaggtatttaatcacccagggtcatagtgccttccatagtgtgaccagatacaactgttttttccttgtatccacaaaagccaggttgtgtcagaacaacctttctacagagtaataaccaatcgaaaaagagaagactaccttatttaaatccacttattcacaggagggattaaggcggctgtaactcatcccttatcatctcctaatttctctcctccaaaaccttccatttatctcagctaaaattgtgtctgaaggctgtttgtacttagagttacattacaaataaggtaggcatggtttctagagtccttttctagtcaagcatttccttattcgacaatgtcttcagaattgcattttatcttttgtaattttctgtagctcccatattccaaacaggaattcattgacttgaaaaagtcaggtgtgtaaacagtaatcctttcttgttaggtctgaagagttcatgattttttatgaatataaactaatttattatttgcattaatgtaggagacagcaaagttaacggagagtcataaaacagaacaagtataagttaggctttggagcacctaagttctaatcttgacaattttgagaatcgtttggtacaaaaattcttaaactgtttctgtgccttctccatccatgaaatgaggataatttttttgtgcaaaatgaaacaatagtactttgaaaacttaagagaaaattcaagtgtaaataatcataatctgaaactcatttgtatgaggctgtgaaagattttacagactctttcttttcaagtcagcctttgcaattatattttgcctttgttgaaatgaaaaatgtttgcatctcccgtacgcatacacaaaaccaatagaagaaagtggttggtaaaagatatagctgaaatggaaacactcatatgttaggtggataaaatcataagagaaaatgggaattgactgtactttcaaagtactaaatttgaagtcatcttactccaatttaagtcatatatatatatatatatatatatatatatatatatatatatatatatatattggcttttaaagagttaaagagagaatcagatctgtccagcaggatagatgggtgaggagaaaagtacatatttaggatttttctctaaaagatctttttcaagattatggagtattttaatatttctgcaaactattccaaatgaatgcattttatatagggcaacacatactggcacctgattctggtttattcgagttcatatgtagggtttgttgggaagaattatatgattggcttctttttttagaggaaatattttcccttttttcttatccatatactattctgaacagctttgcagatttccttaagttcatagcttgtaagtagttcatggtatatagacatagtcttgacttacaactgaaaaaaaatttatgttacagaagtttattttttctatggaactgtctttaaaaacaaaaatattacaaatcttgaccttgaaatattctgtttcctgttatcacattctggatatctattttgtttgcaaatgaaaattattactgatgattagcaacttgagcctgttaataggaaattgcaaagcctgaatacacacacattgccttagcctatcagtagagtagaggacatatgttaagaaaatgtgtctgcttgttgctgttgttggacaaaattttatgtctgtgtgtatgatttttttttttctattttcttcaaagatgtgaattaaatgaaagtgtgggagccagttaaattattttgtattatgggtgttctggatcctttcactccgtataccattttcttgtaagggcagcatttgtagacttgctaatggactgtagagctgagctatattaattttatacttgactcaggggatcagttctgtgaatgccattgcacgaagaaagcaaatgtttgccttgattttgaatgtatctttttaatgtcttcttaaaacatatttgtttaataatgtagatttgtttttttttttctagtatcatagtaaatattgcttagtacttgcccccaccccactgggtagtttatatactaccctataggtcatgccaaaaatgaataaaagtttaaatgccaaaatgtttatgaaactgctgtctaaatactgattgattgcacaatttaaataaaagctttccttagttaaaaaagacaaaaaaaaaaaaaaaaaaaaaaaaaaaa

SEQ ID NO: 1073 - DNA, 6856 bp, Homo sapiens
agaggcgtacaggcccttcccgaccgtagcgagggtgctgctgcgctgggggaaggaaaacgccgctttgactgtgccttgttctcacagctggcgggaagcaagcgccttttcgaaagccagaggctcgagttacccctcttaccaccgtcatggcagtcccaggttgcaacaaggacagtgtcagagcaggctgtaaaaaatgtggctaccctggtcacctgacttttgaatgccgcaattttctccgagtagaccctaaaagggacatagttttggatgtcagcagtacaagtagtgaagatagcgatgaagagaatgaagaactgaataaattgcaggcattacaggaaaaaagaataaatgaagaagaggaaaagaagaaagaaaaaagcaaagaaaaaatcaaattgaaaaaaaaaaggaaaaggtcttactcatccagttccactgaagaggacacttcaaaacaaaagaaacaaaaatatcagaagaaagaaaagaaaaaagaaaaaaagagtaaatcaaaaaaagggaaacatcacaaaaaggaaaaaaagaagagaaaaaaggaaaagcattcttctacacctaatagttctgaattctccagaaagtaactgagactttggcttaagccgttaaatttaaaaatttgtttttaaaacgtgtttgcccttccttggaatttgctatatattatgctttgcaataaatcacagccttttccatatagacatttttcgtatttgggaccattatccctctggcaatatatttttaatgtgctgtaactgtaaagtattaaatcagtcttgttacttgatagccatgccccaagtatagctatttgtgtatactaaacacatcatttttggtatttgtgtctctgtgtgtttggctagtgttactacttcataagttcattgtaaaatggctttactgccatcaacatgggtcatctacctagcagttaatgagtattgctggatcaggtgtccaccttccaatgatgaagcaaggtaaggggtaatgttttgctcttgacacagagaaatttaatagctttatgtactaaaatataatatcttttaaagatagtgaaattcttcagttttttaaatctctagggattttttttcaatgttgtagaagatgcagctgcttaatggtcttgactaggactttttaaatgaatggtgtctgcaggtagatgatcatgaaaatatctctaacaaagttttactcttctatgaaatgcagaatttctagtacctgcctcctttgtttttgtaataattaaaatacttcttgtataaagagattagttcagcctgttagtaagtctgcagagatgatgctgagttggttgtgatttttagaatagactcctgggttgttttacaaatgtgccatattggcatgtcttacagtgatacctcaaacacagaaatttttatttaggaagatagctaaatctttattagaactgatttttattgtattcagtataaattttatgaagcttgtttctatgagtactgtggaaaattttataaatgtgagcatatatatttattttgtctgacataatttgtagttttaaagcaagtttcacactgaacttaacgttttcataaatgaccagtttgggatgtttctctcttttactttagtggcaaactcaagagtaaaaagtgtcaaaaaaagaattgagaattttattctgtactttttaaaatttaagagccagggagttgcatcatgaaagcctttgtataataatggaaattttatatgggtaagcattttcaaacacatattagtagatacgttttttaaatttctattttcacattgatcagtgttactttgcttaatacttaggtagcccttatgtccactaaagtaaatgcttatgttgtagaagcatcgaacatcaaccaatgtcatggcacagcaccaaagattgcaaatacctcactatggtgcgcttagaaattttcaaattgataacctatagatacggctgcaggtgaattcatgatagtgaaatcagctaagtatacttaacctcacaggctagaaaggtttactgattcttgtttcacctggcacccaatgtggataccctcagtaagactcagggagccttataactcctcttaacatatgcttacccatgcttaaattctagggaagctgtatccacagccctctgcattgcagccatgagagctctcacgctttcaacccttccataacctaatttagtcatttgggcctctcaaaaggaaatgcttttgtttaaataggtcagtcagttactgggagaaaaaatacagagccagtaggtttttagggatttgttttgcctttgctgctagttttttgaaaatattcttcgattatcaagattttaaaaatcggtttttaatataaagcttttttaaaaacgaggctggcacaagtgcagtggtgtttctttactcccactgcttgacttgactagccttgaaaaaataacagtaaaataaaatattaaaaaataattagaaaatgctacaaaggcaatgaccttattccattgagtaagatagttaaaaatgatagtaattgtagtgaaatagttaattacttgtaagttttattactgttaattgtagagattataaattggctcattaggtttctgaatggtgacacaataatgactgagaagagcaaaagtcagtcctcgttaactaatgtagtatgcaaattaaaatattttaatgatcagtaattttccccccagaaatgatgttggcatttctaagtaaatttcccataattttagcatagtttatgaaattgaataaaaatttattttcactgaagtaattttcttctaatatgatattattattgagattggatgcaaatctcatgaatatgttttagaagaaaattaatgaaattccctcccaggcagtatgtaccagaaggaaaactgaatttagcagtaaaacagtcctggtcattctaactacctgtatgatcttgaacaaagtcacttagtttccctgggccttggtgtctttcgtctataaaatattgtaccagattatctctgaaatcacttcaaggtttaatatatataattatcaatattttaaaattcaagcaatattcactttagaaattattataacattctataatagtaaaggttgaatttattaatataataaacacgttcaacttcttcaagcagataattgatatttggttcatattcttacaacctaatgcatgtcattttcaccaaatgcaggcagaatttatatttaggtttgcatctggaactagattatctggcactttatggccattatttttgggttgatggaccttctcaccacacaatttcccccttttttttttttgcatatcatatgttggttgatatttctcagaggtatccctatttcttcatacttaatatacatctccatttacatctttgactctctgaggtcaaaacaacaataaatgagaagtaaaacaactatatgtgtttgtatttacaactgtatctaaaattatataaccctagtttaccttcagagtaaactaggctgaagagttgttaataatgttgataaaaatgccattgaatcctttcttcaacaaatatttattgagtacctaacgtggcaaacgctgtgctaagtactggggatacagagataagtaagacacatttgcctccctgaaggacttcacagtgtagttggtaggagaaacaccagagcatacaccgttatataattagtgcagtaattgacatgaacatgagtttatagaaactcggggttacctaaagtagtctggataaattagaagaggctacctagagaaagtagtgactgaattgcaatttgattaaggataagaatgagggttatggcagttcctgacagagtgggtactgtgaacaaacaccagaggtagaacaagctgtgttatgtgtttgtcaagaattacaagcaatctggtgttgctggtgtatcataggcgaggcaggaagtggtaagaattgagactaccattttaagttcttaggaacaggaggaaggagtcgtgtgttccgtgtttgggagcttgaactgtaatgtgtaagcaatgagacaccattaaagagtttcaaggggggccgggcacagtggctcacgcctgtaatcccagcactttgggaggctgaggcgggcggatcacctgaggtcaggagttcaagaccagcctggccaacttggcgaaaccctgtctctactaaaaatagaaaaattagccggacgtggtgacaggcacctgtattcccagctactctggagtctggggcaggagaatcgctcaaacccaggaggtggaagttgcagtaagctgagatcacaccactgtactccagcctgggcgacagagcgagactctatctcaaaaaaaaaaaaagattttaaggaaggaaatgacttttattagggtttggttttatcaatttcataatccgattaatcccaccatttttaaaagatgaaattgctttcattagaaggctacataaaatataatttgattattttaggctctattattagactcacatttctttctacagtctcattattatttccaaaaattacacagtaacctaaatcatctaaaaacacataaagctactgtattctttattagatccatccccagagttatatgtacatgtacatactttgagatgtgttttgttcttaattgtattttaggttatttttgactgacttaaattctatcactattttaatatttgttaggtccgaataaaccatttagaatatttttcagtgtacaaaatgtgctgtaatttaataaggccccttgcttttaaaatttggcttaacctgtgaagcacaactgcttcagagttacagagaaacataccagttggtccactggatgagccctgtggttctacctcaggtaacctagtgataagctagctcagcagggagtgcttcaaggactccagctgatcctagtgctgagaccaaaacttcctggacattgggtgcccaagaacagtaggtttcttataccagtgtgacaataatcccagttgcgaaggccagtcttctgatctcagtatctcctcccaactcctctaaaaataggtagagtggcagagaattggggtgcctcttctatagcacaacccatgatgcatccagtcatgcctgaccccactatgcctttcccacaaattgggaggagttggggcagtgagcattttgctagctctgtctgtttcttgcttcttgtgccatttatagtccttggccatgagcaacaaaagtagaatggtgccagtgccttaactaaatttttctcaacctagattttcacctgagacaatatggtaatattattaaattactgtaaagatagcaaattttctgggatactttaaaatcaaagttgtatcaaagatcaagaagcacccataaaagctttataaactttcacaaaaaataagtgaaaattctttgtttttatggccgtgtaaaatgtcatttttataatggaaatgtcttaattttcaaacttaacatatactttaagcaattttagtatttaaacctttgcaaaattgtatttttgaatgtgaagttcaactttggcagtaggttgttgcaatagtgatctggcactatggtgccagtatagccacatagggttatttaaattaattaaataaatgaaaaattttattttttcagttgcattagccacatcttaagtgttcagtagccacatgtgactggtggctaccatattagtgcagatatagaaagaacatttccatcatcacagaaacttctcttaattctggtctagaagataaccttagtacttggtagaaattttgacaggctaatgacgaaaagtttgtaaccctgagctttgcatgcccaagaaaaataaggtattcttttttatatatcagaccagagaagctgtattcagcacattttgaaatgctagtttttggctatggccataccaccctaaatgtgccagatcttgtctgaaatgctagtttctgactacaaaaactacaggacatagtagatatgctcagtagagctgcttaaaataattccctttttttttctgttgaattctgttacaaaaccaggtctgtgttataatagaaaacacacttatgaataaaaatctttaaaaattataatttgcagaaattagttttatttctagatttctaggtggtattaatgtgatagcattaggtgggaccagagaactcatttgttttgtagctttcattatacagattatttaggaaatatatcagcaaaggattttttgttatgcttatctcttgaaacaaaatatttattgtacagattatacattgtgatttttttgttactgagtatattgtttgtgcccagaaaaatctaaaaagatgtgggttgacttctaagagatttaagaacaagtcacctctagtttttaagacagttcccttgatatttacctatccagtaccatctcataagaataactgcctgtaagtatcagaaagttgagaaatgctggtaatgtgacataaacttctcactgttcttcactgagataggactgcttatcttgttattgataaattatttaatttctcctgaataattagcataatctcatgtgatacagaaacatcttaattagcaaataaatttatacaaaggaaaaccaataaaaccttaatgtgcgtttaataaagtaactgaatgatcaaaaa

SEQ ID NO: 1074 - DNA, 5503 bp, Homo sapiens
aaatgccacgggctgcgctcccgcccgggagcccggagccggatctacaatcccgtccctccagctccggtgcttgttgctcgcccggcccaagcgggagctgttgccgccaggctgcgaggctgccgtcctctcctcctcgcgccccacctcccccgagagctggctgaggaggggcagcagccccagctggcgggaggaagcgcggtgtgaacagggattgccccccgccttcaagtatcggggcgctacgcagccgcgggggaaagacatgcccctagtctgcccgctgcgctgccctctgcccagcctcgctgccgcccgcgccgggagaggagggactgccgagcctacaccttcaaactcgccctagaagtctcggggcgcggcagggagcccttccccaggccccacggccttcacctctccgcgggtagcctcagcccctgtccggggacctgtgcaaatgaccctggagttggtttcgctttctccccttgcggcggtgtgaacgtgtgtccgcagcgtgatgggcaaccaggtggagaaattgacccacctaagttacaaggaagttcccacggccgacccgactggcgtggaccgggacgacgggccccgcattggggtctcctacattttctccaatgacgatgaggacgtggagccgcagccgccgcctcaggggccagatggcggcggcttgcccgacggtggggacgggccgccgccgccccagccgcagccctacgatccgcggctgcacgaggtggaatgctccgtgttctaccgggacgaatgcatctaccagaagagcttcgcgccgggctcggcggcgctgagtacctacacgcccgagaacctgctcaacaagtgcaagccgggcgatctggtggagttcgtgtcgcaggctcagtacccgcactgggccgtatatgtgggtaacttccaggtggtgcacctgcaccggctggaggtgattaacagcttcctgactgacgccagccagggccgtcgcggccgcgtggtcaacgatctgtaccgctacaagccgctaagctccagcgccgtggtgcgcaacgcgctggcgcacgtgggtgccaaggagcgcgagctgagctggcgcaactcggagagtttcgccgcctggtgccgctacggcaagcgcgagttcaagatcggcggcgagctgcgcatcggcaagcagccctaccggctgcagattcagctgtcggcgcagcgcagccacacgctcgagttccagagtctagaggacctgatcatggagaagcgacgcaacgaccagatcgggcgcgcggccgtgctgcaggagctcgccacgcacctgcacccggcggagccggaggagggcgacagcaacgtggcgcggactacgccgcctcccgggcgcccccctgcgcccagctccgaggaggaggacggagaggcagtggcacactgatgggcgagctgagcgcagagctgcgaaggggaactgtttgcagtagcagccgctgctccctttctccctctcttcctccctcttttgccactgtctgggccccatctgggattcctgggccctttggaaaagagttggtgaaatgcgcagccggctgtggacgggggaggaggaaggggacagagggagcaggtaggaaacactttagttgggggtggggggcgtctccctctggccccctgtctgtcttcctctccgcggtggagcaaactgtggacttgcctggcacttaaaccttggtagatctgggtttataatcggccattcttaagcacgtggggttgggggaaagttcggagtacccattcctgccgttgcttcctatcctgggcttggaagaatcctggtagaaaggccagagtgggtttgtggagtcgccactgcgggaccagcacgaaagctgcttgtctgctttggcggagctgagctgtgtatgggatccaggaggctggggtgatttattttatgggattcctggagcgcagggctggtgaatccatgacaaggtccgggagcagcagaccaaaaccacagcagcctcctattaagtgtaacaaatagttaagcaaactcgggctacaaacaaagactttgctacctccctcctccacaacccccaagtaattagccttctggagctggctcttagctgaggctcctgctacctcctgctccacccgccccttcctaggttacaagtaaatcattgtcaagggccagccaggggaaggtttcaattaaggttctgttctgctgcctttgtttctcccctgctgttgtaggcacttacagctgcgttgttatgaaaggagggaatagccctttgtgtctttgatctaattaaacctgcttggctgtgtttatccgcagggcaggtcacagatagggttggctgtgccactccataaagtatctattgtggaagcagccaaaaagggctgctgtggcaggaattggttaatttctccttccacttcccttcctgaatagtgaagggagcccttttaaaacaaggctttggtggtaatcctgtgatttttttttctcccccatcccctcactggcccatccctctcaccctcacttttgttctgctggtgggtaaaatcttaggctgaacacatatttcaatggtaagatacttattttgctatccacacttgatgcaattgaattcaaggtgcaaagtcttgtactgaagcagtctccttgttgcttggagaacacctccttcagagccctttgttaaataagaggggcgacgttgatcatagatgccacctggttagcaccgaatctgactttggtgacagtcctaaagcacagttggtgattgtgagatctgttagcggcaggctgagcagatactacttggttttgcttggtatgagatactactgtttgcttagtatgagattttttccagcctgtctcttaaactcctgtgacatcttcaatgatatgtgccctcagttgcagcatagcttctctgctgcctattgccattgctgtctcaaaagttgagtgaattttgaggcgtctttttttttttttcctctcttgggagtcgttgtaaactactgtgtacaagtcattttgtgatatgattctgaacagttggaatagaatcatagttaagtggtacagccatggctatcgtcaggcctgttgcctggagatctctaagttaaggcaacaagacttaaagaattttctaatacacttgtttcacacatggacgttgaggccatagtctttaaaagcttggacctttgtagcacctcaacatgaaagggcattagctatgtttcctgtttttacagtgatcaccaaacagatcttgccactttgattgttaaaaatgaaccacattctagccctggtctgggactttggagggagatgaatttcttgttggaaatgtaaatctagtgtccatatttaatactctcacagctttgtgtttattctctttgctcatggaatagcagaacaagataaacatgggttaagacatttaggagaacctgctgtatctaacccagttggattttctttcatgcttaacacagtagtgaaaatagaaggtaggccgggcacagtggctcatgcctgtaatcccagcactttgggaggctgaggcaggtagatcacctgaagttaggagttcgagaccagcctggccaacatggcgaaaccctgtctctaccacaaatacagaaaattagctgggcgtggtggcaggcgcctgtaatgcctgctacttgggagcctgaggcagaagaattgcttgaagctgggaagcagaggttgcagtgagccgagatcgcaccactgcactccagcctgggcagcagagcaagtagtaataaccaccgtgtagacaagtgggagggaagaatagaatggcactgtccagctctgggctagccagatcaactcccccacccgtcttcttcctctgtcccagaatggaaaatgatgtatggtcagtcacgctgaagtatagcagcgactgtgttaagagagagcagtgactctctcttctagagaagaggttttcaataacagggcttggaaatgaactagaataggaaatagatcttttcagatgctgctttcccatgtaatacaagcgtttctacagggtaccagaggtgtgaaatatgtgacacttaagaacagtgatttttattgggaattttcttagggttattacacttaaagcaacaaccaactagtaacagctccaggaaaggggaatgaatcaactcttggttctttcctgaagacggcagtgttgtggataagtgagtttttaatgccctggcagtggctacatttgacactttagaaaaaataaacatatttaataatttttgtttctccttaggaataagactgtagaactgttttgtactgtgaattacggatgctctttgaaggaaagaaatatcgattctaatgttcttcagaagttctggcagggataagcaggacatcgactggaacgtatgctaaatgaaagcagacaaatttctattttcttacctgagcaaatattttattgaaactgcttatgtatgtcaaaggagcccacaacttcagctacacaactttttgtattgaaagaactcatactttttgtagcttttatttcacatttaatttaaagtgacttttagcactaaaatgcctagaagattttactccagacctataaggaaatgtttagtttttatgaaaaatgacaagtcgatggttaaacttctcatgtctttggtgctttggccctaatagcactggacaacaccacgaccacatggaaacatatttttggaagcaaaactttaattttatataacgtatgctatggagagctaagacaatttaaggactacttgttttctattttttttcttaataaaatggaatccactgtgttgaagactcttgatatcatgtgcttgtctaaccattttttgttttataaattagaataaaatatagttgtgataatggtcatcgaatggatttgtttggaaagctacatcttatttgtgaaatgttttttaaatcagagtaactatcaactgattcagctttttgttgttttgttcttggctataatacttgtgactcatgaagaattatgttgacaaacaggataaattccacatgcattttatttcccagtgagttgtataaactttatttttgttgaaggttgtatgttaaatcaatgttacattcttatatcacttcttgagaaggaagttccgatttgaaattgtatcatttccttcaaaatgaagggcagtgcttagttaaataaaagattgatgatatcttttaagccatttcctcttcactatgtcttattaaaataaaacctgtcaagttcttttcaaaagatgctatgagcgtttccaataaaccatctattagagttcactggaaaaaaaaaaaaaaaaaaaaaaa

SEQ ID NO: 1075 - DNA, 3639 bp, Homo sapiens
taaagggtgttaacataatcccccaatcccatacaattcaatttcagaaaagtatttagggactgtgctaaaatagcatctccaagcttgctatggcaagatgatgctcaggttttccatgtgcaggggaaatgatgaaggttttgcaatggaacaaatatggttgctgctgcttctaacaattagagtgcttccggggtctgctcagttcaacggctacaactgtgatgccaacctccacagtagatttcctgctgaaagagacatcagtgtctattgtggagtgcaggctattacgatgaagattaatttttgcacggtacttttctcgggttattcggaaacagatctggcactgaatggaaggcatggggactcccactgcagagggttcatcaataacaacacctttccagcagtggtcatttttatcatcaatctcagcaccttggagggctgtggaaacaacctggtggtatccacaattcctggagtcagtgcttatggaaatgcaacttcagtgcaagtaggaaatatttcaggatatattgatactccagacccaccaacaatcatcagctatctacctgggcttctttacaaatttagttgtagttatccattggaatacctggttaataatacccagcttgcttcgtcctcagcggctatttctgtgagagagaacaatggcacatttgtcagcactttgaacctgctcctttataacgattcaacctacaaccagcagttaattatccccagtataggattacctttgaaaaccaaagtatttgcagctgtccaagccactaatttggatggcagatggaatgttttaatggattattgctatactaccccatcaggaaacccaaatgatgacattcgatatgatcttttccttagctgtgacaaggaccctcagaccaccgtcattgagaatggccgaagccagcggggccggttttcttttgaagtgttccgatttgtgaaacacaagaatcagaaaatgtccactgtcttcttgcactgcgttaccaagctctgcagagcagatgactgccccttccttatgccgatttgcagccacagagaaaggagagatgctgggaggaggacgacttggagcccccagagctcttctggcagcgcggtgctctctgctggtcccatcattactcggagtgatgagactccaaccaacaattcgcaacttggttctccaagtatgcctcccttccagctgaacgccatcaccagcgcactgatatcaggaatggtcattctgggagttacgagcttttctcttcttctgtgctcactggcccttctgcacaggaagggacccacaagtttagtgttgaatggcataagaaacccagtctttgactgactataacagattcctgctctctggagaaggcttcactgactaaactatgtgtgactgcagtcagtgttccgtctgaatttcatgtcagtccacattcaatatttgtaggtttgataaatttcacagtatagcttgtcagcataatgatagtgaaagaagtttattatattgctattgtcacttatgtacgtggcgagccgtatttttatgccaccagtgaatatattgacaataagtgaaaaatattcaggacttagggcttacaggatcagtaatatttcattttatttcagttttcttttgattgttggttaaaagataaaaggtgggagtagacaaaaaatgaaatgtgttgcatttcccccttaagcattaatggcatttagatttgcacacgtggtcctagaataaatgttgctttttgttttaatccggatattcccagcttcaggatgtgttttaataggactggccaatttggatacctgagatttaactactcattctatgacctcctgtgtttttggccgattttcatgtctgaccatattcattttaaaagaaactcttgggacatatctcttaacctggggcacccttttgtgtagaagatagtgaaaatagttgttagcttccaaggctactgctaagtggccctagatcattattcattagaataggaatggctgcgatcagttttcttcttctggttcaggtgagaacaccagcacatgttaactctcctcccaggtaaacagttcagctgctgttgcagctgtgcttccagcagtgaggtaactatgcaaagattatttttaattcaagaatcatcacatgtgaaaacaagctgtagttgtgaaaagagttcctagaagggtttttaacaatttagattccctttttcctaaaacaaaaaggaaacttaggttaagtgtagtttgcagaacattgttggaatctacataaaaagatattccttcccccatattttcgatgccaggcaataatcaggagagggtttctttttaaggtatcttcttgtaggtgtcataattgccatgaataaacaatattttcctctaacagtaaactgcaagaagcttctgatcctttatcagttttgcaaaaaagcaagctttaagcagcccatgttcttacaaaaaaaatcaacattctctttgtttaagctacctatgcactgaacaaacaaaacaatttaatagccaacaccaaaacccagcatgtgaagttactagaattgccatgttaactataagcaattgctgtaatcactaatttctattcaacatttgtgacccattagtccggacttaatttactatactgcatgcaaatcatcaagcaattgcttcaaaggaaatgtctacaatgtgagttaataattaaatcaatcctcaagttgaaaaacactttttctccaatttgcctgaatatttcaggaggaagtgtttatattataataattagctatataattgcatcaactttttatttcaaggtatagttgccaagtaaagtgggatctggaaagtctctggataatttctttacaaaaaaagtttaaatcacataaaaagccaatctactcttccctgtgttactttaaaataactttgaagtgactattctgagctttatctgtgttaacatgattaactgaccatactactaatgtgaccctgtatatacatggatagtattgaaatatgctggtaaatctatttcagatactttaagtgaattgccattgattctacgattaagttctgtgaataggacattatatcatttaagctgttttgtcaatttgatttttatgcttttggaacggctgctgtttcagctgttggccttttcaattctatactccattttatagaattgaataatggacacatgtcacttgggaagcaacgtaagtatcacattattttttgccaccctttcatcataaatggaagaatcagagttataatgagataaaccaggtctgttttttacaactttgttcttataaatctgcagttatatggagtatttagttatactgaattttacagttattatagtgtgaaaaaccttacaaaatatgtgcaaatgtttcttcagttttaatacctcaaactgttttttgcacttcaggggtaaggtctgatgacatgtaaaagatgatcgtttaataaaataattgtttaaaatgttaaaaaaaaaaaaaaaaaaaa

SEQ ID NO: 1076 - DNA, 4843 bp, Homo sapiens
gaggtggggaagccatcggacgtcggcggtgaggatcttctcctgacccagcatcgctcatcacaatgaagaaccaagacaaaaagaacggggctgccaaacaatccaatccaaaaagcagcccaggacaaccggaagcaggacccgagggagcccaggagcggcccagccaggcggctcctgcagtagaagcagaaggtcccggcagcagccaggctcctcggaagccggagggggctcaagccagaacggctcagtctggggcccttcgtgatgtctctgaggagctgagccgccaactggaagacatactgagcacatactgtgtggacaataaccaggggggccccggcgaggatggggcacagggtgagccggctgaacccgaagatgcagagaagtcccggacctatgtggcaaggaatggggagcctgaaccaactccagtagtcaatggagagaaggaaccctccaagggggatccaaacacagaagagatccggcagagtgacgaggtcggagaccgagaccatcgaaggccacaggagaagaaaaaagccaagggtttggggaaggagatcacgttgctgatgcagacattgaatactctgagtaccccagaggagaagctggctgctctgtgcaagaagtatgctgaactgctggaggagcaccggaattcacagaagcagatgaagctcctacagaaaaagcagagccagctggtgcaagagaaggaccacctgcgcggtgagcacagcaaggccgtcctggcccgcagcaagcttgagagcctatgccgtgagctgcagcggcacaaccgctccctcaaggaagaaggtgtgcagcgggcccgggaggaggaggagaagcgcaaggaggtgacctcgcacttccaggtgacactgaatgacattcagctgcagatggaacagcacaatgagcgcaactccaagctgcgccaagagaacatggagctggctgagaggctcaagaagctgattgagcagtatgagctgcgcgaggagcatatcgacaaagtcttcaaacacaaggacctacaacagcagctggtggatgccaagctccagcaggcccaggagatgctaaaggaggcagaagagcggcaccagcgggagaaggattttctcctgaaagaggcagtagagtcccagaggatgtgtgagctgatgaagcagcaagagacccacctgaagcaacagcttgccctatacacagagaagtttgaggagttccagaacacactttccaaaagcagcgaggtattcaccacattcaagcaggagatggaaaagatgactaagaagatcaagaagctggagaaagaaaccaccatgtaccggtcccggtgggagagcagcaacaaggccctgcttgagatggctgaggagaaaacagtccgggataaagaactggagggcctgcaggtaaaaatccaacggctggagaagctgtgccgggcactgcagacagagcgcaatgacctgaacaagagggtacaggacctgagtgctggtggccagggctccctcactgacagtggccctgagaggaggccagaggggcctggggctcaagcacccagctcccccagggtcacagaagcgccttgctacccaggagcaccgagcacagaagcatcaggccagactgggcctcaagagcccacctccgccagggcctagagagcctggtgttgggtcatgctgggaagggagcggcagcccagccaggcctggcccataaaaggctcccatgctgagcagcccattgctgaagccaggatgttctgacctggctggcatctggcacttgcaattttggattttgtgggtcagttttacgtacatagggcattttgcaaggccttgcaaatgcatttatacctgtaagtgtacagtgggcttgcattggggatgggggtgtgtacagatgaagtcagtggcttgtctgtgagctgaagagtcttgagaggggctgtcatctgtagctgccatcacagtgagttggcagaagtgacttgagcatttctctgtctgatttgaggctcagacccctccctgcccttcagagctcaagacaagtaatacacccaggtcttgactgcatttgtcttgtgagcagggcttgcttggtcagctcaggccctcctagctgctctggaggctcctttgattctctagacctggaaaaggtgtccctaggcagagccctggcagggcgctcagagctggggatttcctgcctggaacaagggacctggagaatgtttttgcgtgggatgatgtgctggtcaggagccccttgggcatcgcttcccctgccctttggtagtgccaggaccaggccaatgatgcttctcagtagccttatcattcacaggtgcctctctagcctgcacaaatgattgacaagagatcacccaaaggattatttctgaaggtgtttttttctttatttctttttctttttttttttttttctttttcttttttttttgcacatgacagtgtttgtattgaggaccttccaaggaagagggatgctgtagcagtggtgcctgggtgcctggcctccagtgtcccacctccttcaccaccccacttggctcctttgccatcttgatgctgaggtttcctgtttggtgagatcaggttgtttgtggtaaaagaaaggaaagggcttctgatggctttgccacaagcttacctgtgggtttcagtcctgagaggccaccaccagttcccatcagcactgtctccatgcagcagttgctgggtcccatgtccagctgcctctttggcttcatgggtttttctgcttcctgcccccacccccacatgtgcaatcctcaagatttgtcctgattctatttcctggcacctccctgcctgtccttggggattctacttcttcctgtgtgggagcccatagctgttgtctaacaggtaagaaatgaaattgaactattgactgggccccagaaatccataaaatggctgcagacagttgtttctgtgtcctgttctacccccactccagtacataactactatgtactgtgtagagccattctatatgctgaatgttctgctgttgcaaacttgccagggtattagccagtgtttgtgccaagcagttttctgggacaacagaatgactcagaccaagatggataggatggttagggctttgcttcttgctgtttttctttgaagctagttcattgtcctgcaggtcccttcatcttccatacctagcccactcttttagcccttaccttaaatctctcagataagttggttcacaaagaatgttaagtactgaatcatgtgtgactgagaccagagatggcaaatgaatggcacaccatttctccttctcctgccccagggcaggtaccactgatctgcatcagagttgcctgctattctctggtgtatccttcacatctaggtgccctcaagcagctgtgtgagtgttgagatctctgccatctctggctgagatactgctgtcctgtgaagtgtttcccatgacctttttcttcccctttgaatccctctgtctggagtagtccttgcctcttcctgctccagtagggccttttccctaccccagcccctgtgccaggctaagctggtacaagagctgccaacctcacagagtgtttgctaggcgagagaggtgcagggaagaggcagaggtatgcaccttcccccttgaagagaggggaaaggcctacagtggcccacataattgcctgactcacacttcagctacctcttaatgcctgtggagggactggagctgctggatcccagtgtggtggtgtaggaggccacagtgagcaggtggccccagctgggtttcccaggtcaggaatgtgggccccaggcaaggtgcagcctttgctcacagctccatccatgtctagaccttcaggccagtctgcagatgaggttccctacctttttcttctcttcattgaccaaatcaaccaatcactacagctgctctgcttctgctttccaaagtagcccaggtcctgggccagatgcaggggaggtgcctatccatgagtgaaggccagtgtcttcctcacctgggtgggtcccacacttgtgacctcagttttaggaccaagatctgtgttggtttcttagattgctagcttttcctccaggggaccacagcaggtgaagctcaagagcgcatggctctgctaatagtaaattgttttcagggccttgtccagctgagagcttcatgtccaccagattctgagaggtgtcagcagcactttttttttttatttgttgtttgttttccatgaggttatcggaccatgggctgagctcaggcactttctgtaggagactgttatttctgtaaagatggttatttaaccctcctccaccccatcacggtggccctgagggctgacccggaggccagtggagctgcctggtgtccacgggggagggccaaggcctgctgagctgattctccagctgctgccccagcctttccgccttgcacagcacagaggtggtcaccccagggacagccaggcacctgctcctcttgcccttcctgggggaagggagctgccttctgtccctgtaactgctttccttatggcccagcccggccactcagacttgtttgaagctgcactggcagcttttttgtctcctttgggtattcacaacagccagggacttgattttgatgtattttaaaccacattaaataaagagtctgttgccttaaaaaaaaaaaaaaaaaaaaaaaaaaaaaaaaaaaaaaaaaaaaaaaa

SEQ ID NO: 1077 - DNA, 3523 bp, Homo sapiens
atggctgtgcgctctcgccgcccgtggatgagcgtggcattagggctggtgctgggcttcaccgccgcgtcctggctcatcgcccccagggtggcggagctgagcgagaggaagagacgtggctccagcctctgctcctactacggtcgctctgctgctggcccccgcgccggcgctcagcagccgctcccccagccccagtcccgaccacggcaggagcagtcgccgccccccgcgcgccaggatctccaggggccaccgctgcccgaggcagcacccgggatcaccagttttcgaagcagcccctggcagcagccacctccgctgcagcagcggcggcgaggacgcgagcctgagggcgcgacggggcttcccggtgctccagcggccgagggggagcccgaggaggaggacgggggcgcggctgggcagcggagagacggccggccggggagtagccacaacggcagcggggacgggggcgctgccgccccgagcgcccgaccccgggacttcctgtacgtgggggtgatgaccgcgcagaagtacctgggcagccgcgcgctggccgcgcagcggacctgggcgcgtttcatcccgggccgcgtggagttcttttccagccagcagccccccaacgccggccagcccccgccacccctgcctgtcatcgcgctaccgggtgtggacgactcctatcctccccagaaaaagtccttcatgatgatcaagtacatgcacgaccactacctggacaagtatgagtggttcatgcgcgccgacgacgatgtctacatcaaaggtgataaattagaagagtttcttagatcgctaaacagcagtaagcctctctacctgggacagactggcctggggaatattgaagagcttggaaagctgggactggagcctggggaaaacttctgtatgggaggacctggcatgatctttagccgagaagttctcaggaggatggtgccacatattggtgaatgccttagagaaatgtacacgactcatgaggatgtggaagtaggaagatgcgttcgccgttttggtgggactcagtgtgtctggtcttacgagatgcaacaactgttccatgaaaattatgaacacaatcggaagggttacatccaagaccttcacaatagcaaaatccatgcagccataacacttcatcccaacaaaaggcctgcataccaatacaggctgcataattacatgctcagccgcaaaatttctgaacttcgctaccgcaccatccagctccacagggaaagtgccctgatgagcaagctcagtaacacagaagtgagcaaagaggaccagcagctgggagtgataccttctttcaaccacttccagcctcgggagagaaatgaagtgatagaatgggagttcctgacagggaagcttctatactcagcagctgagaaccagccccctcgacagagcctcagtagcattttaagaacagcactggatgataccgtcctacaggtgatggagatgatcaatgagaatgccaagagcagaggacggctcattgacttcaaggaaattcagtatggctaccgcagagttaaccccatgcacggggtggagtacattttggatttactccttttatacaaaagacacaagggaaggaaactgactgtgccagtgagacgtcatgcctatcttcagcagttgttcagcaagcctttcttcagagagaccgaagagctagatgtcaacagtcttgtggagagtattaacagtgaaactcagtcattctcctttatatctaattctttaaagatattatcttcttttcaaggtgccaaagaaatgggagggcacaatgaaaagaaagtacacattctcgttcctctcatcggaaggtatgacattttcttgagattcatggagaactttgaaaacatgtgtcttatcccaaagcagaatgtaaagttggtcattatccttttcagtagggattctggccaagactccagcaagcatattgagctgataaaagggtaccagaacaagtaccccaaagcagaaatgaccctgatcccaatgaagggagagttttccagaggtcttggtcttgaaatggcttctgcccagtttgacaatgacactttgctgctattttgtgatgttgacttgatcttcagagaagattttctccaacgatgtagagacaatacaattcagggacaacaggtgtactatcccatcatctttagccagtatgacccaaaggtaacaaacgggggaaatcctcccactgatgattacttcatattctcaaaaaagactggattttggagagactatggatatggcatcacctgtatttacaaaagtgatcttctaggtgcaggtggatttgatacctcaatacaaggctggggactagaagatgtagatctctacaataaagtcattctatctggcttaaggccattcagaagccaagaagtaggagtggtgcatattttccatccagttcattgtgatcctaacttggaccctaagcagtataagatgtgcttaggatccaaggcaagtactttcgcctcaaccatgcaactggctgaactctggcttgaaaaacatttaggtgtcaggtacaatcgaactctctcctgacagtccaggcaacacattttgccttttttaaggggagtttacctcattgttggttgttgttatttttattgtattattgttattttattattattattgttataattttattttgttgtcctggtcttaaactactcttggttgtcttcctaagggtgtttgttgacctcaagcaagaagagtctgcagttcactgatgtttcagatttctactgaagtcaatatgttattacttttatataactttatttgagattgagttaaatcatagcaatcaaatgacttttgaaacgcattcatcacaagagacagcttagaagaatgttctcttggggcttaaagatgcaatatcgacttttatttggtttctcaaattcaatgtgatacaaatatttactggtgaaaggtaccacaaaagtgctttatgcttcctatggggaagggactctgtaacataaacttgagttttgtaatttatacaaggacttaaatatataaacaataattttcttcatctttagaatttttaaagtaaatgaatacctatgattgtatgtttattttttaaaaaaagttttaaaaattgaggagttttgttccacaagcaaccggtactggctaccctggtcttatgacaattatgagctcctcacaactgtctgctataaatgcgaatgaactttattttctcaaggaaatatgatttaattaaatattcatgtacattttagaagctttatgaaacaatgtccttcatttgctggcaagaagataaaatatgacagaacctgtttatttaaaataaaacacaggtatagcagtattctttttcaaaaacactgaaaaaaaaaaaaaaaaaaaaaaaaaaaaaaaa

SEQ ID NO: 1078 - DNA, 1662 bp, Homo sapiens
aaccaggggcggtgcggcctggtccggggaggagaacatgcctgccgccggaccgcctttgctgctgctcggtacaccaggatctggaaaaacagcgctgctatttgctgcggccctagaggcggcgggggagggccaaggcccagtcctcttcctgacacgaaggcctcttcaaagcatgccccgcgggaccggaacgactctagacccaatgcgactccagaagatccgcttccagtacccaccctcaacccgagagcttttccggctcctgtgctctgcccatgaggccccggggccagccccctcccttctgctgctcgacggcctagaagagtacctagcggaagacccagagccccaggaagccgcctacctcattgccttacttctagacacagctgcccacttcagccaccggcttgggcctggccgggattgtgggctcatggtggccctccagacccaggaggaagcaggtagtggggacgtcctgcacctggcactgctccagcggtattttcctgcccagtgctggctgcagccagatgcaccaggtccaggagagcacggcctccgagcctgcctggagccaggcgggctgggccccagaacagagtggtgggtgactttccgatcagatggagaaatgatgatcgctccgtggcccacccaggctggtgaccccagctcaggcaagggttcaagctctggaggccagccctgagctttggtgggtgactacctctctgtgcttcagtttcccatggctggaatacttacctcagggacatatgcagatccaaagacctaaacaatgtaaagtgctttttctcttttaaaagtatagcattatcttgtatatattttacccaatcaatatgttgtttatagtttcattgctttaaactttataaaaagagcttcaggccaggcgtggtggctcacgcctgtaatcccagcactttgggaggctgaggcggtcagatcaccagaggtcaggagttggagaccagcctgcccaacatgatgaaaccctgtatcaactaaaagtacaaaaaaaattagctgggtgtggtggcaggtgcctgtagtctcagctactcaggaggcttaggcaggagaattgcttgaacccaggaagcggaggttgcagtgagccgagattgtgccactacactccagcctgggtgacaaagcgagactccatctcaaaaaaaaaaaaaaaaaaaagtttgagacttccttctttttgcactcaacgttgttactaagattcatctacatttttttagttcattcctttttccatattgcatataattccatgggtgactataccctgatttcttcatcagattgccttatttactgctgcgaacattcttgcacacatgccctggtacgtgtgtgtgtttttaggggccgagacaggtggatcacctgaggtcaggagttcgaggtcagcccggcctacatggtgaaaccccgtctctactaaaaatacaaaatttagccaggcatggtggcatgcacttgtactcccagctacttgggaggctgagacaggagaattgcttgaacccgggaggcagaggttgcagtgagctgagatcgagccactgcactccagcctgggtgatgaagacgagactctgtctc

SEQ ID NO: 1079 - DNA, 3473 bp, Homo sapiens
gcccattggacagaatacaaaggcagaaacctaccccgaaggccggggcccggcggggcgctgggggtgggcgctccccgcggcccccggcgcccttcgccccgagacgccccggcccagcggcactggcgcgaccgaggtccagcttcggggacacgcccggctggccgcggggaaggcaccaggtgagcgcggccgcgcctcccggaaccccgctcccgcgcgtcccgcggcgacgcggcgcccacccgccccgggagccaggaacccagggccccaccatggcgctggccgccgccgccgccgctgcggctgccggggtgagccaggcggcggtgctgggcttcctgcaggagcacggcgggaaggtgcgcaactccgagctgctgagccgcttcaagccgctgctcgatgccggcgacccgcggggccgcgccgcccgcagggaccgcttcaagcagttcgtcaacaacgtggcggtggtgaaggagctcgacggcgtcaagttcgtggtgctgaggaagaagccccggcccccggagcccgagcccgcacccttcggccccccgggggcagcggcccagccgtcgaaacccacttcgacggtcttgccgcggagcgcctctgccccgggagctccgcccttggtccgggtgccgcggccagtggagccgccaggggacctgggtctgccaacagagccacaggacaccccgggggggccggcctccgagcccgctcagccgcccggggagcggtccgccgacccaccgcttccagcccttgagctagcccaggccaccgagagaccctccgcagacgcggccccaccgcctagggccccttctgaggcggcatcgccctgctctgatccgccagacgcggagcccgggcccggggcagcgaaagggccgccgcagcagaagccctgtatgctgccggtgcgctgcgtcccggcccccgccacgctccgcctccgggcggaggagcccggcctgcgccggcagctgtcggaggagccgagcccgcggagctcccctctgctgctgaggcggctctcggtggaagagtccggtctgggcctcggcctgggcccgggccgctccccgcacctgaggcgcctgtcgcgcgccggcccgcgtctgctgagccctgacgccgaggagttgcccgccgcgccgccgccgtccgcggtgcccctggagccgtccgagcacgagtggctcgtgcggactgccgggggccgctggacccaccagctgcacgggctgctgctgcgcgaccgcggcttggcggccaagcgcgacttcatgtctggcttcacggccctgcattgggccgccaagagcggcgacggcgagatggcgctgcagctggtggaggtcgcgcggcgcagtggcgcaccagtcgacgtgaacgcacgctcccacggcggctacacgccgctgcacctggctgcactgcacggccacgaggacgctgccgtgctgctggtggtgcgtctgggtgcccaggtgcacgtgcgtgatcacagcgggcgtcgcgcctaccagtacctgcggcccggctcctcgtacgcgctgcgccgccttcttggcgatccaggcctgcgaggcaccacggagccagatgcgaccggtggtggaagtggcagtcttgctgccaggcgccccgtacaggtggccgccaccatcctcagttccaccaccagtgcatttctgggcgtcctggctgacgacctcatgctccaggacctggcccgaggcttgaagaagtcgagctccttcagcaagttcttgagcgcctcgcccatggctccacgtaaaaagacaaagatccgcggtggtctgccagccttctcagaaatctctcgtcgacctactccggggcctttagctggtctagtgcccagttttcctccaacaacctgaaggtccctggggctaccacctggttgatctatcgtggcctgctcgtcgcagtccaaacccgcccaagactgcagcccaatcaacgcctggagcctcattctgtttccagctttgtccagggcagcctgttttacccagatgggcctgcacctccagcttctttctgaagcatgacccatctccagagatgggatttgagaaatcagtgagagcttcctataaagaactccaggagacaggcctgaactctagagggaacttgaaatccagggtcaaaggttaaggggcagcagctggtctggcccctgaaagccttcacctgatgcctctgcagctacacaatcccaagacagagctagagcaagggtctctttaaatgttgaaagatgttaggttgtcagctttaagatatgtggtggttttgtaatttgatgcttttattctgtttttaaattgaaatgaggtaatgcaactttcgtaataaccttttggaattatatttttccacttttaggcaaagtgcttagacattttcaattttttttttgctaaatactttggaattctatttaaaaaatagatgatcaagatctaaaggaaattaatcccaaccaacaaacttaaaagtttatctacctcgttttaggcaatcaagattctggagagtcttgaacacagaataacgattgtgaccattatgaatgtaactaatttcagttgtactgtgaatgctaaatatttgcaaacaagtacatcttgaaagtaaaggtgacttagagaaaagagacattttgacagatacttttaatttgtggttgtctccatcatgaaatagaaacgtgtttggcacttgtgggtggctattttgatttggcatgactacttaattttttaaaaaaattgtggtttgtgaattgcacctttgtgccatgtttctgaatctggttttcaaatccagtggagcctttcagtgaaataggtgactattaaaaaagtaatagtattacagaaaaatgagcgattaaatagtaatggatacaattaaggagcaactattttatatgactgttctgtacaaacaaaaagtatgtaatacccattttaaaaaaccatttgaaagtagacaacttattccaaaatagcaaatgcagaatctctgctcagtgagcttggatgagtggcttaacttctctgggcctttgttcctatctgtaaatgagaaagtttgtagatattgccaagatttcccaggctcaatacagtgtaattattttatgttttaaagatatgaaatctgtttactcaaccaattttttaaatgtcatattgtgataatgctctgcttttgcaaattgtgtttgcatgtcattagttatatcaaatagttttgtggcatggggtagtggagcttccctccccacccccatatgtatcagtgaagcctttgaaattacttaaggcagtctttcatggaatgttttgattgagcaatgaaataaacagtcctccattttgtttctgcttgaaaaaaaaaaaaaaaaa

SEQ ID NO: 1080 - DNA, 4426 bp, Homo sapiens
tttaaagaaaggcagccggcgaaaagaggcaagagaggagaagaaagagaaaccaggggggcgaggcgccgtccaatgacaaagcccaggggtgggcgccggccgccatcttgtaccgggcagcaggatattcgcccgcgtcctccgccctcggagggggaggggcggcggcggaggcgagaaaagtagcgagagacgccagcagcagccgccgccgcggagccaacgcggactgggacggcggcggcagtagtgggacccggcgagcgtgagtggcccggagcggccttcgatgcggcgcagtatgaagaggcggcggcgccggcgcccggtcgccccggccacggccgcccggggcggcgactttagggcagaagacggggctgggttggaggcgcgggaggagaaggtggtgtactcgcggtcgcaactgtcgctggctgacagcaccaaggcgctgggcgacgccttcaagctcttcatgccccgcagcacggagttcatgagctcggacgcggagctctggagcttcctctgcagcctcaagcaccagttctccccgcacatcctgcgcagcaaggacgtctacggctactcctcctgccgggccctggtacccgaccccccggggccccctacagcccgcggccaggcgcgccggccggttccgcgcgcagcggccaggaggaggcgccgcggagcccgggcggccgctgcccgcaggaggaagccccggccgccacccccaccgccgccgccccccgaggagagctgcccggccaagcccgtggcccccgggccctgcttcgggggccgcaccttggaggagatctggagggcggccaccccgacgctgaccaccttccccaccatccgcgtcggcagcgacgtgtggggcgagcgcagcctggcggcagcgcggcgcagggcgcgccaggtcctgcgagtgaacctggaacccatggtgaggctccgccgcttcccggtgccccgggcatgaggtgcggcctccagggcgcctcctgccggccccgaccttgggacaggccttccgcccggaggaatgaacaagtgtcagtcgagtgtttacagatccggccaggaccccggcccccaatgcactttacgcgcgaagaagttgccggatggttgtccctgtcccgggccgcggcgcggtcgtcttggacgctggggcaggtgtgccctctgctgcctcccgtacccggcctgcggagggaggggacagctggacccgcaggggaggtccctttcttcctgaccaccgattgagacgtctccaggaccttaggggcagatccgttttctcactgttggactctacctcactggtctggaagtcctccgaagacattatttttccaaaggaatttggtttcgtgcttgtgtaataaagccagaatttacttgttctttatctccccctttttctatttcactgtcacccctctttgtggacagaagttcgaacatgtggtgttgcactagtttgtgctcagggtattctgaagcccactcgtttcctaatttttactggattccaaagctttgatcgaggatattttttaagaggttcaagcttgtgactgttagtagtgcaaggatttgtatgggctcagtgattacaaacaaagacatgcaaaatacaactgtttaaacattttcaaggtatttttaaaggttttgtattgaaacaatgtttatatttactgagctcctaaaaatggtagaatacacatgaaaacttttgtttaggaaaagttaacttgttaaattcttttgaattgaataaaaaaatgcattgaaaccatatggtgtgtgattaaaaaaaatgaataaattgtgaagaactggttttggttacaggagtcactggaatccgactggagatgatttggccccctgtcctggtctaacatacaaatctaggaatattatgcgttaaagtattttaaaatacattatccttgtaatgtattttacaaggataatgtattttaaaatgggagttgcataggagagatggatgtgtgtaaacattatcactaaaatgataaacagaatacccattagaattcttagaactattaatgatcaagaggggtggaggcatttcttggtatcaaataactggttaaggttactttgggcgaaatctatttcctttttgtttttgttgttggataacaagaaatgtctagactaatattcatcagttttacaaacataatgaaaattagttgatttttagttgatttttttgtcccaacattttttttaacctttttgccactcattatatgtttgcagttctaggtctttgacagctgaagaccacaggaatcaaacaggcgagacacacagaatactgacccttctttacgcttttatagtgtttataccatatggcccagtgtggaattcttgattatccaagtgcctttggtcatttgtggcaggaaaacttaatagtttttagccagcagtgccacagccagcttttactgcaatacctaaagggtcaagtagtgtttttgtaccactattatttcaaatttaagtattctgccatgaaacgatccatactgggctggaacttgacatgtgaaatctttaatactaaagcttatctctgcttggcagctttttaggagaataatgagagttacaattttgactcttgcgttcctagaattcaaatggcatagctttctgaaatgagtatttcaagtttagtagtccgtataggagtgttgtgacttcaatttcagtgttcttgttaaaagaaataatatgatatatatatacacacatatatataacttgatgccagttttctagtaagcctcagtcttttattcactactcaatgataatgcattgtacaaacactgtcacatgagtaaataaaaatgaataattccttagaagatggagagtgttaaattatatttgtgataggaagcttagacatatcttttggttattagcttccattgccaattgtatttcagatgcatagggttttcttcccaaaaatatattgttaacttttatagctaactagcacctggaaaaaatgtatttgtacaactttactattgtatatagttttataataatgaaaaataaacccaatggccatattagaatgcaatttcgacatacagcttatctagatagttttccagaggattttgaaatttggcttaactgggaggataactgctcagcacaccactgaaacataaccactgacaccattcatttattttaactgagattcttgacatttttctctcctatgccttgttactttagcatacttgaactcacataaatgcttctttggattacatgggctatctgattccattttggatctgattgtccatcttgaattcaatatggtattcatctggactattcaaaaattatgccatttctagtctgtgaaataagatgtaaaaaatctttatttttgccctttggtaaaaacctatgtgacaacttttaaaatgtgaagcaacatctaatatagttgactggtatactaataggaaagtgaaagtatttcatgggtactttgtcacagaatgtgaaaagaaacttggcatagtggcctttataatgaggcatccacttactcctctgaagtgaagtctgtagcttagcttgtgtatagtttttgaaagaaatctcatgatcttcgttcattctcttgccttctcttttatctcatatggcacaagtagagggggaagccaggaggaaattcatcacctcgctatgcttttatttgatttttaattcctgagtgcctaaatgtggtgaccggcacctcacataactttttgagattcttgatgtcatttttatccttcctgtcaaccagcaatgtatttttatgttactaaaaccagtaacgtcataattgttgagggcaagcttcattgttgatagtgcaaagtgtcgctgttgtgatgtgtgtttattttattcaagtttgaatattgacaagtgtaacttaagctggtgactgacacctattgatctgctgtgtgcaaatgatagtactattttttagaaaactcttaagtaaattttaaaaatatttgaatacaaaatatctgagcaattttgaactcaaaagtttttcattgttttaaggattgccacaggactctttaatggtttttaatggacatacatgcctaatatttattggtgtgtttaaaatattttttgatagagtgttatgtcttaagcgcattagaaaacaattgtttgtaatggaatcaaagtgtttccctggacagtttgatgtgcttatggttgagatttataatctgcttgtactttgctttttaacttattaactgtaaataaattttagagaatacataaa

SEQ ID NO: 1081 - DNA, 5250 bp, Homo sapiens
atggcggccgcagtctctagtgtggtgagacgagtggaagagctcggggatctggctcaggcccacatacagcaacttagcgaagctgccggtgaagatgatcactttttaattcgggcctctgcagcattagaaaaattgaaactcctgtgtggagaagagaaagaatgttcaaatccatcaaatcttctagaactttacacacaggctattttggacatgacatattttgaggagaacaagctagtagatgaagattttcctgaagactcttcttcacagaaagtaaaagagctgattagttttctttcagaaccagaaattttagtaaaggaaaataatatgcatccaaaacactgcaatttgcttggggatgagctactggaatgtctctcttggagacgaggagccctgctgtatatgtattgtcattctcttaccaaaagaagagagtggctcttaagaaaatccagtttgcttaaaaagtaccttcttgatggaatcagttacttgctacagatgctaaattatcgatgtcctatccagttaaatgaaggagtttctttccaagatctagacacagctaaattactgagtgcaggaatatttagtgacattcatctgctggctatgatgtacagtggagaaatgtgttactggggatcgaagtattgtgctgatcagcaaccagaaaatcatgaagtggatactagtgtgtctggagcgggctgcactacatacaaggaacccttggatttccgagaagtaggagaaaaaatcttgaaaaagtatgtatctgtgtgtgaaggacccctgaaagaacaagaatggaatacaacgaatgcaaaacaaattttaaacttctttcatcatcgctgtaactagtaagttcatctagtccttttcaaatagaaaaacaacaaaacccatgaaatggaaaagagagttccaaaaaagaagacctgttgatactgaatatgagaacattacactgcataaagatatccagcttgggtaccctactaaaacaacatcaccatctttttcattatatattagtaaacctatgaagggatgattctttaatttctaaagtgttgttcaaactcaccttaaaatacagatgttatgtcactaataatgagtagtaacccaatttagctttacaaagattttttctattactttttttttttattgtggtatatgtaacacaagtttaccatttttatcatctttagattatttttaaatctcactaccttgaagtttgccatgcttcagaaattaaagtcaagttacttcactgctttgaatacatactatggatataaatgtaggcaaaatgaaagattatgactaatattcagattccattttcaataaggtaaataatgaaagatctcacaaaggaatcattgtgtttaattattttgccatgtattactaattgtatttaaaatttctacttcccttaggcattttataaaaatttaaaaattatttttctattttgtttaaaagacaatgcatggcttttcaagtgagtaatgaagataaaaaccaagctaggttagtctaccattagttcatatgtttttgtagcacatcttttcataacatactgaaattttaatgttttttgcctttaataataggggtgagtgttaaaggccagagagcctaacttgatatcttgctcatggtctttctgtctacctcaactcctgttgtcatctttggatgatctttctgataccttgctgataccttggacttctgcccagtgactttattacattccagcagcttactcccgtggccgcactttgaatgtcaccaccttgagtttctctttctggtaaaatttcagtaactgataactgccctcttttcagttttttcacttccttattttattgacttttctctcctttatgctcattccacattcttcagttccttcttacccccttttcttgactgctccccttcctcctaaactgtcagcccctttcaggctttcttccctatccaccctcagctttatgggatactatatgaactaatctcaccagttattcttctttccctggtcttttagtctagtcctttggcaagccctcaacctcagattaatcctatttattatctaccttttcggggatgctgagttctttgtgatgggtagtccttcaaagtagaatcactacaagtgtctcacttcagccttagaaaagccctcaatgtaaaccttatgtttgttactagggtggcctctctcccatttcccgctgtggctgagccaaacttcattactttccttaggccctctgcccctcccctagcatatggctctttctcctattgaacagaaaattgagactatgaagaggtcaacttgtatttaccaactttactcattttcccattttagaggaaaagaggttgcctgcttcctatcaaaggcgactctgtgctacatgttggtttcatcttcgctgtctctctcatttccccacaaagtgttgtctcactttctgcctaccttttaggtattgatcttcactatatttttttctctctctctcttttttttttttactttacatattttatacaatgtcattcataactatggcttcttttaccaccagtaataacagactgagtctcaaacctgtaacttgtatcctgacttatctcttgctttctaaaccttgtttctaactgtctatcaaatatcttcattagacatcccacagtaattttaagctcagtgtttccaaacgtcaagtcctcatctgttatataaaatcctttctgctttgtaagttttctctttttgggattttccgcagatcagggcaacacagaatgactaccttcccagccatgtctctgcagtcatcctgtgtaatcatgttctagtccagtgttgctcaaacagttaaaatccaggctgcttttggtaaacatacaaattctgatatagagcctctgtggcaaagggaatttctcagttcctgccccagcccccttgtttatcattacacagctaagatttttatttaacttagcattttagcaagttttcttatgaaaatacctttgtgctttctaagtataaagatttaaattatttttaatacggtttttagaaccacagactatccctctttttagagcatcctgatcaattgcaagtacttccacttcttccctaaatgcgctttgtgtgttttccacctcagtagccttgcacacatcattacttctgcatccttctttgtgaccaagtgaatacctacctacctcttaggactcagcttcagtgattctgttttcataggctttttaaagcccttttcagtcaaattagatgctcctttgttctggtcctttactcttcccctcccatgttgtcgcactgatcacactgctttgtaattattttctttattgttggtaaactccatattttaaaaatttacctgtatacatagtgcttaatgcatggtaggcccttagtaatgtttttgaattaatgaggcatgattctaaatgccaaactttgcacaaaaagttgttgctattggattccaaactgctatgccctctataccagtggctgacaaggcatatagggatatatgccatcctgagaggagtaaagtgtttagattctgaacctgagaaaagagaactttctcttaagaagttggaaacttcattttaccttcgtgaccctggtagaccacttggtctcactggttggtacaattatgagggtagtactgggtgctttttatacaactttccatcccccacacagttggagaataatttgtagaccatggcagttaaaatgctttttactctggtgtattatagaataatgaacacatttttatatatgttaaagcctgctaaatcattcacttagaatgaagtaacctcaaggtaccaaataccccacataaggaaagtactacactaaattcactcaactattgtatgcctaccatatgccagattttatcctagaccctgaggatatagctttttaaaaccccctcctgtttcagagcttatattctagtggaggaagttagacaagcattttaagtaataaatgtatagagagtgtcaagtgatgagtaccatgaagaagaataaatgagggtaaggggctagtgtgatagggagaggggtgggatgccatcatatttaggggtggttgggaactgtctactgctttagcatttgtgtcttcaaatttctctcctttggttatataccttgcgtattccgcacattgataaagtttctttcttacagaagttctgatattgaattaaggaatgggtcactacttaagactttatcatttcagctacacataaaaggtttctctcccctatggattttgctaatggttgagtgatacctaaaggccttgttgcattttttacacttggggtttctcttcggtttgaattctctcatggttaccaaaactctgttaaaggacttttcacagtcgttaaatgtgtatggctctttcccaatatgaatttttttgatgttaactaggcttttagacttagttaaagacctgtgtgctctgctgcatttatagggttttgggctgctgagaataattgatgctgattaaggtgcaaatcatgactaaagacttttctttcttcttttgcatatagtagagtgaggtgagggtcgtggctaaaaccccacaataactttacattcctagctttacagtcttgctgtgaattctctggtgttcattaaagtgtgagctgtgttaaaaggcattcttagattcattttaaccacatttttaaaaactcacagttggttaacatgatggtttcagattgcttgcctcttttctctttctaccttacagggctccttttctagcttaaataagggtactccatctgccacagaatccaggattctatagttttttagtttcacttccctatgttctttttttttttttaatttttaacaatgagatgataccatgttacagcggtattacattaagatacatttaatatagccacaattaaagtatgtattatgtatttatgctggtgttctttcatgttatttcttctagtgaaaatttccaagtaaactgttattgagcatatacatttttaaaaaaataaaaccatacacccctaaaaaaaaaaaaaaaaaaaaaaaaaaaaa

SEQ ID NO: 1082 - DNA, 2704 bp, Homo sapiens
gcgggaggcggttcctgcagggtccagtcccgggagcacccccaggaggaggggagggtgggagcgcctctctttgagtccccgggtttggtcgctgggatgtgaggaagccggagaggccgcggctggacgcaggtgggtgtggaggggccgcccggactgcggggacccgctccgcgcacagtggctgagcgcccgcctctctttccaggggctgaggatccggcggctcggctgcactatgcccttcccgcccatgccgccgccgcccgcccccgccccgggggcccaagccgcgcgccagttaccccggaggccctgcgccgcgggggacaagaagaagaggcccccacagcggcccgaggggctcctctccagctcctggccctccgccacgctcaagaggccgccggcccggcgcggccccggcctggacaggacgcagccgccggcccctccgggcgtctccccccaggccttgcccagccgcgcgcgggccccagccacgtgcgccccgccccggccggcaggctccggccacagcccagcgaggaccacctatgcggcgacctcggcggggacggggaccaccgccgcgggcacctcctcgggggcggggccttgtccagactccgctgcgcgcttctgcctgaatctcacccccgaggccgtcctggtcatccagaagcgtcatctggagaagcagctgctggcgcggccccgcaggcccttcccctcaccctcggccgaacccaggcgcctactcgccccgtgtctcccggctagggccgcgggcccgcggaggggcggccccgccagcgaccccgacgcaccccccaccgccggccagggccgccgcgcgcctccgcccggcgcccagctgctgcacggcggcctgcaggttccccagctcagcccgcggcccggggccctgcggccgatgctcaaggtgtcgctgctcaacgagcggcacaggtacgacgacgtggagtacgaggaggagccagaggcggtggacgagggcctggtacgcaagtgcacggagtggctgcgcggcgtggagtccgcggctgccgcgcggggccgggcgggggccctggactcacggcggcacctgagcacgctgtgagcccagcgggcctgcggggacaggccaggcctgatcccacctcacttcctgcacgcgccactccgcctaggggccctcgggggagaccgcaggctcctctggccgccagcgcccactttcgggacaccagtgcgcaagctggcccacgtggggcgcagccagactcgcccgacggccacggcccccctcctgccctcgccagccggcagcccgggcctttctcgttcacaccggtggtatctaccccagatgcctgcctctgcccccactctggcctcctcttggcatcgccgagcatccatgcagttcgtggggaattaagcaactgagaaaatgcctcttggtgccccgacccccagggttcgtctaggtcccagagaccctctgcctggaggcgggccttccccagggctacatctgcacgccccgtggtgtcaccctcagccggcgccgggcaccctggacagtgcggtgggcgatggcccaggtgggtggccgcgacggtggcctcctgcagagctgggacccggtcctacattcgtgattttgttttctcccaagtcagaaaaatgttgagggtattagacatccctgaaactcagttaaccgaatttccagtctccaaagcggaagggtaggcatcgccaggcgctggtgagccctggtcaatgagcgcttccatggaaaccgctcggctgattacattttttctgtgtattatttgaatagagagtaaagctcctccgctgtttcgtaaccatatcctttcccccgctaactggaggctgatttctacatatttcttccatgtatctgagaatatctaactagaaggatgagaaggaaataaaatgttataatcagataaggctggttataaaagagtaatgtattacctcaatttttgactgactttgtaaaagccaataactggtttaatgtttatcttgatagactttaaatgtatcaagtcttaattgtattttaaattgaagccttacatttttaaaacagattttgtatttttcttgtggaggtctttgctctaataacacacacacactgtctctctctctctctctctctaattctaggcacacatttagttagatgtgaagcatttaattcattgggagctaggtcagctgccagatgagttgcaaaaacagaaaaaaacctacccattgaataacttctttgaatttggagataagttttcttttacttaaaatgaatatattaattctagaggggcaaaactagcaatgcttatgcaagtgacggtgctgctcttgttccacccccacccagatggtctctgagtgcgccgtcctgggcagggcacacggtctggagctgagagggtggagcaagagtgcactgactccgagccgagggcaggagtggctcaacttggtctcgtcttgcacttagtgcaaataccaataattaagatgcctagacttctgcccttggtcacagtaacaacaacattttgaagacttttccctggtggcatcctagagggaccgactttctgcagcctctgtcttccaagctgagcttctgctgcag

SEQ ID NO: 1083 - DNA, 4735 bp, Homo sapiens
ctctttggccaagccctgcctctgtacagcctcgagtggacagccagaggctgcagctggagcccagagcccaagatggagccccagctggggcctgaggctgccgccctccgccctggctggctggccctgctgctgtgggtctcagccctgagctgttctttctccttgccagcttcttccctttcttctctggtgccccaagtcagaaccagctacaattttggaaggactttcctcggtcttgataaatgcaatgcctgcatcgggacatctatttgcaagaagttctttaaagaagaaataagatctgacaactggctggcttcccaccttggactgcctcccgattccttgctttcttatcctgcaaattactcagatgattccaaaatctggcgccctgtggagatctttagactggtcagcaaatatcaaaacgagatctcagacaggagaatctgtgcctctgcatcagccccaaagacctgcagcattgagcgtgtcctgcggaaaacagagaggttccagaaatggctgcaggccaagcgcctcacgccggacctggtgcagggcctggccagcccgctcctgcgctgcccttcgcagcgactcctggatcgcgtggtcaggcgctatgcagaggtggccgacgccggcagcatcttcatggaccacttcaccgaccgtgacaagctgcgcctgctctacacgctggctgtcaactcgcaccccatcctcctacagatcttccctggggctgagggatggccgctgcccaagtacctgggctcctgtggcagattcctcgtcagcaccagcaccagaccgctgcaggaattctatgatgcacccccagatcaggcagccgaccttgcctaccagctcctgggtgtcctggagtctttgaggagcaacgatttgaactatttcttctacttcacccacattgatgcaggcatgttcggcgtctttaacaacgggcatctgttcatccgggatgccagtgcagtgggcgtcatcgacaagcaggaaggcagccaagaagccaacagggcaggagagaataaagacatttttagctgcctggtttccggctgccaggcccagctgccctcctgcgaaagcatctctgagaagcagagcctggtgctggtgtgtcagaagttgctgcctcgacttctccaggggaggttcccctccccagtgcaagacgacatagactccatccttgttcagtgtggggacagcatccgcccagacccagaagtccttggggccgccagccagctgaaagacatcttgaggcccctgagaacgtgtgactccagatttgcctatcgttacccagattgcaaatataacgataagttctgaagggctggtgtctagctggccttggggacaacacgcttggctctccattctcccagtcgggttgctgcaaggtagaaagaagcagctcttttttaaagatgagaagaaaggcacactcatttcttagggactgagaggggagttgtgagataccacgtggctgtctctgctggctgggacgtcctggcaaagcccgcggtgggcatcagaagacctgggtgtggacgctcactcaatgtctttgagcctcagtttcctctgttctccaccagactctcctgagggtgaaagaagacacagatggagccaccactgagcatatatcccaagcatgggtcttgggacacatgctcaccacctccatcccaggtggttacaaagtgtgttctggaaaagcacagaggcggggagcatgagaaagagctgctcaggtcaggaggctggagtggagggaaggcaggggaaggacaggctccctgccactaccactttagactcggacaagaggggcccccttcctgctccctatggccctgcgtcactccccacaccatcgcgggatgaggagactgcaggccaaggggacatgcctgccaccacctagagcctggtacctgaggctccatacacctgcgcatggggcttctcgtggtgtgggaagaagccaggggtaagaagataaaggggggccggcgggggaccaatgtgttagcccaagtcttccaagaatatgtgtcaagatagagtgaatggaacaaagatttgttaggggaaatgattgtgtgtaaggaaagaaggagggagccggagaagattgggaggaccagtaagtcgagctgcaagctgagccccggtgaaggagagaatgtctggcaggagcttgctaagctcaaaatcaaagaaaggttcagcaaggctgtcagggtgtcctcaagacaaaggcagccatcagaagagccccgtgtctcccacaaatagaccccgttagcatccctgctgcactcagtggttggcggaaacagcaaagatagatttcagagcacagcagcaggggtccctggtcagccccgctccctagagcaggagatcttgagtgggagaacattcttgttgtagccacagctgaggccctggaccagctctctccacaccgcatgctccgagttgggactctaaggagtctaggaattttcattcaaacttggccttacaggtcactcatcagaaaaatacttttttcaaggtcaaccaatagaacatactttattcaacagtttgttagtttgctttttaaatatttagccacatggtatgtaggcttccatgtacactcttgccctggcccctgaaacataagcagggggctcttctgtacatttgcccagcttccctgccagcctttaaccccaggaacctctcagtctacctcctcttttctgcctctgaatccctacctttaaagtcagaacaggccaggcccggtggctcacgcctgtaatcccagcactttgggaggctgaggtgggtggatcacttgacatcagtagttcaagaccagcctggccaacatggtgaaaccccatccttactaaaaatacaaaaattagccaggtgtggtggcgggcacctgtaatcccagctactcaggaggctgaggcaggagaatcacttgaacccaggaggcagagtttgcagtcagccaagatcacgccactgtactccagcctggatgacacagcgagactccgtctcaaaataaataaataaaaataaagtcagaacacctggcttaataggcctcactgtgcagatgaggaaactgaggcccagggaggaagagcgatctgtggagatatttctagaacccctgcaagctgagccccagtgaaggagagaaggtccagtaggagcttgctaagctcaaaatcgaagaaaggttcagcaagactgtcagggtgacctcaaagcaatggcagccatcagaggagccccattgctattaggaggctcctattgccctccccttcagcctctgactttcacctgtgctacccaattctggttccttcactcccattcaaaaatggaccccagaaaagccttattttgtggagtacctagttcccttttgggtttgtctcttgactgctacgggcattgccccagggcaaccatgacagtgaagatgactggccaagcttgtggactggccagcaagcttgggctgcctgagacgctttgaaatggctgccttctgagttggtcttgagggtgaagactgaccacccttctcacctgcacagtcacagtccctctcctgctggcctgactgcagctgtcctcccagctggccacctgaccagagaccaggagagaggccacagcctccagaccctccagagtcccacggaggaagaaggcttaccagagagaccctctgatgcatgagccaggccccagcccttctccctgcatccaggtgtgtttccaccgcaaaatgcctccacacaatgagcgactttggccctgcgtgggtcagcatgtggtctgaggtaaccctcaaatgcctccaccacacatctgtccacctgcacgggttcaaggtaagcacttgcccccttctctcctccagaccagtcgcctgaaattctgagcaacattccttcaagactatcatgtaacccttggtgatgctgagtccagacaggaaatgcagacttgggacccacctgtatcagcagaaagaggccttgtgccccgtttgtccgagtcccagaacggagcaaatgagaaaaccggcgagctgtcccccgaggagctgtagggagattggtttttagtataaattacaataaaattttgtgtatgtgtacagctgtgttcacatccacagtgtaagctgtgatatggtttggatgtttgtcccctccaaatctcatgttgaaatgtgatccccagcattggaggtggggcctgatgggaggtgattgggtgatgggggaagttgcctcatgaatgacttggtgccctcctggaagtgatgagtgagttctcgctgagctcactcaagatgtggttgtttaaaagagtgtggcacgtccctcccccaactctccctctcactcccgctctcaccatgtgacacacctgctcccccttcgccttccaccatgattggaagcttcctgaagcccttaccagaagcagatgccagccccacacttcctgtaccacctgcagaaccataaaccaaaataaagctcttttctttatcaattaaaaaaaaaaaaaaaaaaaaaaaaaaaaaaaaaaaaaaaaaaaaaaaaaaaaaaaaaaaaaaaaaaaaaaaaaaaaaaaa

SEQ ID NO: 1084 - DNA, 3993 bp, Homo sapiens
ctcttcgctagccggaagtcgcgagatctgaatgagtcaaagccggcggcctcggctcctcagctccacctgacagtaggccgctgatcggccgcgggtcttgtcgaccgctaggccaccaggttcatgtggaggctcccaggcgcccgcgccgcgcttcgggtgatccggacggcggtggagaagctgagccgggctgaagcggggagccagacagcggcgggagcgatggagcgcgctgtagtgcgctgcgtaccttcggaacccaagctgagcctgtcattcgctttggctgatggtagccacaagaacatgcagcgcgaccagagcgagccgctgggtcgagtcctcagccgcatcgctaccaatgccctaaagggtcacgctaaggcggccgccgccaagaagagcaggaagagccggccgaatgctagcggcggtgcggcctgttcagggccggggcctgagccggctgtgttctgcgagcccgtggtgaagctgtactaccgggaagaggcagtggctgaggacgtgctcaacgtggatgcctggcaagacggcgcggtgctgcagatcggcgatgttaagtacaaggtggagcgcaacccgcccgccttcaccgaactgcagttgccgcgctacatcatggccgggttccctgtgtgccccaaactcagcctcgaatttggggatcccgccagctcccttttccgctggtataaggaagccaagcccggagcggcggagcccgaggtcggtgtcccctcgtcattgtctccctcctcaccttcttcttcttggactgagactgatgtggaggagcgtgtctacaccccgtccaatgccgacatcgggctaaggctcaagcttcactgcaccccaggcgatgggcagcgctttgggcacagccgggagttggaaagtgtgtgtgtggtagaggctgggcctggcacctgcacttttgaccaccggcatctctacacgaagaaggtgactgaggacgctctcatccgcactgtctcttacaacatcctggcagacacgtacgcgcagactgagttctcgcgaacggttctgtacccatactgtgccccctacgccctggagctcgactaccgccagaaccttatccagaaggaactcaccggctacaacgccgatgtcatctgtttgcaggaggttgaccgcgcagtgttttctgacagcttggtacccgccctagaggccttcgggctcgagggggtgtttcgaatcaagcagcacgaaggcctggccactttctaccgaaagtctaagttcagccttcttagccagcatgacatttcattctacgaagccctcgagtccgacccacttcacaaagaactgctggagaaactagttttgtacccatcagcgcaggagaaggtgctccagagatcttctgttcttcaggtttcagttcttcagtctacaaaggactcttctaaaaggatatgtgttgctaatacccatctttactggcatcctaaaggtgggtatattcgcctcattcaaatggcagtagccttggctcacataagacatgtttcatgtgatctgtatcctggcataccagttatattttgtggggactttaatagtacaccatcaacaggaatgtatcattttgtcatcaatggcagcattccagaggatcatgaagactgggcttccaatggggaggaggaaagatgcaatatgtctcttacacatttcttcaagctgaaaagtgcttgtggtgaacctgcttacacaaattatgttggtggctttcatggatgtctagattacattttcattgacttaaatgctttagaggttgaacaggtgattccattacctagtcatgaagaagttaccacccaccaggccttacctagtgtttcccatccctctgatcacatagcacttgtatgtgatttaaaatggaaatagatgtgtgtttaatggaattgaagtctgaaaaggaagtagttattttagcagaaaatttaatatgaatcaaagcttatatgtaaacttcaaggaggaatggtaaaatgttcagccctcctagttatgttcctgatgtcttcgttatgaaactgttgatgtttgcatcatacatcttctctttccttgttttcctctacaattggaggagaaacaaatatatttcttactagcaaaatagaaaattgaattatttttctccaaattgagactctcagaaaaggaagattgaattagcgtgttttttgtttgtttgtttttgtttttgtttttgtttttttgagatggagtttcactcttgttgcccaggctggagtgcaatggcacaatctcggctcactgcaacctccgccccctgggtttaagcgattctcctgcctcagcttcccgagtagctgggattacaggcgtgcgccaacatgtctggctaatttttgtatttttagtagaaatggggtttcgccacgttggccaggctggtcttgaactcctgacctcaggtgatccacccacctcggcctcccaaagtgttgggattacaggcgtgagccaccgcacccggcccttgtgtacatttttataagagaatttttttagctaggagttcagaatttttaaagtaccatttgaatgatcttaatttttctttcatgacaacacattccaaaatgaatcatgcttatgtactaagagggaaaatgtatttaagttaagggtgagagacttaagttataggtgaccttagagacctaaggtgagagacttgacacatggaaggagtaacattagggtctacctctacctcaatttagttagcgatttactacaatttcagagctttaacaaaagataaaaataaatcgtcaccaattgttattgcttctcatctttcatttttcaatgaacaagtaaggtattttcattcttatttttaggattttagtttttagtgtatggtacaaatgaacacagtttatattctaattcttactgcagctcattttaatttttaggatgcaagcacaatttagtattcaaagtgagtagcaacatattcaacttgatcccattgtcttcagttactcttgcccatgaaaaatgttcataaatgaacagggtatttgaccatatgatattagaaaatacagcacattactttatgagaaactacctactgatatgggcttgaaattttggatgaatcattgagcatttctacactagaagtaatttcaaaattgttggtttttataaacaggaaaaaggttgagtagtgggacttttaagcatctctgaaataaaaaacttctttttacagacaagcattatagtttgagttacagacaacagtgtgtatatatgtaatatatatatagtaaaatgaaatttaaatatgaagccaaactttttaaaattagaaactacaaatggttatactgattagtgtctagcctagagtggtaaccatgctttactaattcagttatgaaatacattatttataatgcattagctgtattagctgttgcttttttgatgttcaggataactatgttatctcatttctgcatttaattaatagctcgagtattaaaagcccactcccttcaagaaaagctttgattttccccagtcatgaaagcccttgtttcaaattctttaatctctgaacctagtatcataagaatttcctcttttgataacatctgtactttcatattctgctcactatcaaatgtattgttaacacttagtaagtttgaaaatgaaggggttttatctgcatttgacattgaaccttgaagtactttaagtactccaaggggaaaattaaagtggaagtttcttcggatcttgtttagaaaaaactataaataaaaaattgatgctaccaaattgtgccttcctaaataacatttttgagagcattttaacagcagtttacaaatatgtaaataatagattaaaaccaaatcttga

SEQ ID NO: 1085 - DNA, 10448 bp, Homo sapiens
gcccgctccgcccccagcccgccttcctcccgccgcgccctccgcctccgcccgcacctcgctagcgttcccctgtcttccccaacgccccggagccgccggccgctagcgtcagcgccagccagaattaaggaagttcactggagtaaaatggaggcctcagtaatattacccattctgaagaaaaaactagccttcctttcaggaggaaaagacagacggagtggcctcattttgacaattccattatgcctcgaacagacaaatatggatgagctgagtgtcaccttagactacctactcagcattccaagtgagaagtgtaaggctagaggatttaccgtgattgtggatggcagaaaatcacagtggaatgtggtgaaaacagtagtcgtaatgctacagaatgttgttccagctgaggtgtcccttgtttgtgtggtaaagccagatgaattctgggataagaaagtaacgcatttttgtttttggaaggagaaggatagacttggctttgaggttattttagtgtccgccaacaaattgactcgttatatagaaccatgccaattaacagaagattttggtgggagtctcacctatgatcacatggactggttaaataagaggctggtttttgagaagtttacaaaggaatctacatcattattagatgaacttgctttgattaacaatggaagtgataaaggaaatcagcaagagaaagaaaggtctgtggatttaaactttcttccatcggttgatcctgaaacagttcttcagacagggcatgaattgttgtccgaattacagcagcgtcgatttaatggctcagacggaggggtttcatggtctcctatggatgatgaacttcttgcacagccacaggttatgaaattattagattcactccgagagcaatatacccgctaccaggaagtttgtaggcaacgtagcaagcgcacacagttagaagagattcaacagaaggtaatgcaggtggtgaactggctagaagggcctggatcagaacaactaagagcccagtggggcattggagactccattagggcctcccaggccctacagcagaaacacgaagagattgagagccagcacagtgaatggtttgcagtgtatgtggaacttaatcagcaaattgcagcactcttgaatgctggcgatgaggaagatcttgtggaactaaagtcactgcagcaacaacttagtgatgtttgttatcgacaggccagtcagctggaatttaggcaaaatctcttacaagcagctcttgaatttcatggtgttgcccaagatttgtctcagcagttggatggcttattagggatgttgtgcgtagatgtagcaccagctgatggagcatcgattcagcaaactttaaaactgcttgaagagaagctgaaaagtgttgatgtgggattgcaaggtttgcgtgaaaaaggtcaaggtctcctggatcagatctccaatcaggcatcctgggcctatggaaaggatgtaaccattgaaaataaagaaaatgtggaccacatacaaggagtgatggaagatatgcagcttagaaaacaaagatgtgaagacatggtagatgtgcgaaggttaaagatgcttcagatggtgcagttgtttaaatgtgaagaagatgctgcccaggcagtagaatggctaagtgaacttctggatgctctgcttaagactcacatcagattgggcgatgatgctcaagaaacgaaagttttgctggaaaagcatagaaaatttgttgatgttgcacagagcacttatgactatggcaggcagttgctacaggccacagttgtgttatgccaatctttgcgctgcacttctcggtcatctggggatacacttcctcgactgaacagagtatggaaacaatttacaatagcatctgaagagagagtacatagattggaaatggctattgcatttcactcaaatgctgaaaagattttgcaggactgtccagaagagcctgaagctattaatgatgaggagcaatttgatgaaattgaagcagttgggaaatcacttttggatagattaactgttccagtagtttatcctgatggaaccgaacaatattttgggagtccaagtgacatggcttctactgcagaaaacatcagagacaggatgaaactagttaatctcaaaaggcagcagctgagacatcctgaaatggtgaccacagagagctaatagctaccagctacctacagatttgcagttcataatcccgcatgttgtcaacatactacagcattagccaccacaccttaagatgcatttcacagccaaaataagtctcatttcttttcatgacacatttctctttacatgttaacaccttgctactaccaaggcataattacttaacatgcttcgaggctgtagattccaagtatcttaaaagaaggaactataaacattgcactgaaaacttgctttaaagctttacctgacctgtcagtttgtagacaaacaactgataataagctttgaatggtgctaataagagtaggaattctctctattaaaaagaaaaaaaaaagttgcccttcctccacaggtgatttagtaaatttagacagtagttaaactcttgttagtagacagtggtgtcctcaaaattttactttgtaattcttcagaattgattatttttattgtgtcaatacagagaaagcctttcagatctttgatatatcatagtcattaaaagaccttttcctatttgtattgataatgtattaaaagttgtttgtgcttaataaaagacttctttaaacatcttatttaatttagtagttacatcctatttccaaacatgagtgccttatttaaaagggcattcttaggactgtgaggatggtttaatatttgttttttcatggtggttgcatgtattttagacaggaaatacatatgtaagcatgtgtatataataaataagcatgttttatcatgaaaaattattgtgaacaatttagatctttaagaacttattaataatggaatactatttctaatttttctctttttcaacttgaaaaatattctcaaaattattaactaccctgaagatactttgtctttaggggaggagggctgaggaagaaggcatacataattacttcagtgtaatcctttatatcagagtaatctttcaggaactaaaatagcaattgttaataaaatttagtttctcattatagtctaaaagcaaaataaattctgaagtagtccaataacagaactgtatgacccctttagaaataaaatttatcatgaaatgctagttcttttaagtttgtattaagtttaaatggtaaaatgcatataatttaaattttatgtatttttatttcagaacattttttaaaatattaaaaattattttttagtcttgtagtcattacaaaattataaacgagttgtatactggttcctttttgaggtctacaaacatgctcgtgtatcttccaatgcaaaaaaaaaacccctcccttttaacctgctagtttttccagccttcttcactgactgacagacttcttggagaaatccacatccagtgcccctacatcctcatcactcactactcagcaccttgcagtctggttttacacagcactctactgaaactgttcttttgaaagtcagcaatggcctcccagttaccaaactgaatggtttttttctccgtctgaatcccttacccttttctctgcaacatttacaccattgagcaacctttcctagacagtgtctccttccttgaagatgctatcctctgaaataactgtgagtacagtcgcataaccctaatttaagatgtgcctgctgaacatgtgctctctcagatcctgtcctcagaatgcttttggctcttttctcggtatctcatccttagagtttttattttataccaatgttctggattacatacctggtccagaaatctagacttgtacttctttttaattgcctagttgacatttcaaccttgattaaagattgacaatatttatcaccttttcctcctggaacaatttaggttaatggtgcagccttttttcctagtcaaacatgccaggaagttcagggcaaagttcaactgctccctcttgtcttatgtggtcactgcttctgagaacatccaggaagttctttctatacttgaatcatcttctcagtcctttggggctttactgctatgagtatgaacttttgtgattatttatttcagtcttcatgatggtgctatcacattctacagttgtttatgtctgtacccagtaagctcttttgagggaaggaatcttgtcttctcctattcccagtcttgctcatgcataacagatgcccattcctcctaaatatgaatgctgtattataggcattagtaataatccctgttacattgcagtctgaagtatgttttaaacatacttttttaaagttagaactgacttacaagtgaatctattcttagattcttagatactaactactttagatatttagttatactcaataactaaatatcaatactcaatatctgtttcttctgaatttcagagtagttagaatgtttttcttaagactttgctagaaaggaactggtttgttagtaattctgccatcaactcatggagttataattgccaaatgagttaatttttatataccttaagctatcttgcctacaaaaagtaaaataaggcaggattcataaatgttacttgtaaattgagtgtttcacatgaggccaagtatgattttaacataatgaatatcattgctcctcatctgtaaatttgctgctgctttcatatgtgtatctgtacatagagttatgaatgaaaatccagtaatgccctaaagcaactttcttccatagggtcaaagctcacttaaggtaaacgtgtgaaaaaagtgactgcagtgtgtttgaaaccacaagctgtttctatgtcataaattaacatcagcttgcaagtctctgaaagaaccactcatttgtaattggtatatatgtcacaacctcccacattcctttagcccatctcagggaattattgaaacgctggcagggttagtttcattttgttttggtttttttgggtttttttgtttgtttgaggattttttttttcttttatcatttgtttgctcctgtgtaagcttaatatataatggcagtttggcatctgttcttcgcacatgtctaacccagcagagttatgcaaaaatgatgacttcattttaggtcaaattggctttgttcccagtcctcattgttggtcactttgttcagttctggtgactcattggtgatgttgatgaaactgctcagcctgccagctgggatattgatggcaggtctaggcttcattgttaggtagaagattgaatacttctcactttatacaaatttacattggctattgctcccatgtgttagctagtcttaacatgtttgttatttcgttatcttattagctgacatacggagtggtattattagtgtcgtactccttagcgtgagcatgacaattaagttaccttactaacagtgatgagtaaaccatactctgatctaaacccattgttaccaatgatgtgattatgaagttagctgaatctatggtctacatttgaagaaatagttcagaattctctactacattgtaagttacttgctaatagagattgggcattattatgtactactccccttctcacatcctacccaaagtacacaaggccgtagtaaaatactgttgctactaaaaactaaacatactgtggttgctaatgtcctttacatcttcagcctatagggaatggtacaggcagaaacaagcaccattaagtatattatcatcagtagtgagatctgtatgattaggatatctttgcttaagcccccaaaggaaaaattctctagcattaaaaacatggctggaacatagctaagcagttaacctaattagtagacttattgttaacgttcagtcctaaaaatgaaaagcttcagttgggagtagaaaatatactatgctggtatatagagcaacaaataccctgatgagataaaatgaagtagaaacttaccatttgacattatttgactttcatacatgctactgaaaagtctaggtttagctaagaagcataaataatggcagtacttgtagaggaaagaacataccagctaaaacaagaactgtaatgaatataatggaaagtgtttggagcttgaatacttggcttcaaaaatctggctttgccatttactgttaaaaaaatatctgagaatttatctcaggctgtaaaacagagaagtcataccaatttcaagaataaaatatgatataaagaattgttgaagccaaaatatccagaaataaacagaatggaaggtatcattgctataattatcttttcagaataaaaaatagagtattctttatcctttctgttgtctcacatgacaagcatgggatggtgaggaaatggcatattgcctatgttcgccgccccacccccttagttccaccaccccttcaccgtcacccccagttcactagtgtatcagaatgcatcttcagaattacacactgaagatacaaaaggtccagttggtaagctcatcagtaaataacaaggctttgaaatctgacaaattagctatttttgtaggaagataatagaacagcaagatggaagacaagtgatgagtatcatctgttttgaggttgacaaggtgtgacataaccctgttaatagacacaagtaaaagaaaatcatactaggattggatattagtgagcgagcaccgaccagtagaaacaacaacagcataaatctgttatttaagtatcccaataatgaggttaaaaaaaaaaaaaaaacagaacaaagcatgaaaagaccacaattagtgctggctatgcttagagaggagcagtctcttggtaaactcaggcagtgatgatgaacagaaaatggccgactgatactgtaatagaggcatagaactaaggacactccgtgagctggcataaatacaggggagtctttaagactgaaaaaagttcatgggtatgacacttaatatgactcaacattactgcagaattttaaagcaaacatgaaagcttgagaataaacactagtccctctacttcaagaaaaagcagaacctgtactagaacatgaagaacttagagatcaaaagacagccagaactatgatgaaatattttgaaagcagtgggcacatttttaaagattttttttggagaactttatgaggctgtatgtataattcctatatgtaattttataggaattcttaactgaaagtagttatcaactgctacttatcaggagcagtgttattagggattttaagttaggcatgtagaaaactttctgacaaaagggctattgaactccagccagttcccagtgaatctccaggaggcaccttagaagtcttcacaagctgaataccatgtctttagggtgtccaaatgcttctgtcttgggggagagatgagagatgactgggtgcctttccactcagaacacagtagaccactcactatttatgaccaagcctcacttcttttctattacagttacagattcttttttagtctggaagttagggtaaataaaatttgtatgtttgatttttctcttaggaatgttttctcatcttaactcttatgttatctttatggccaacagatttgctcagaatatatcatcaaaatatatgtattgtattttgtaaaggtgaaaggatcgaaataccactttgacagttataaaccagagtagatttgagaactgattgctcacatcacacttacgaatagtctcagaagcctttaagagaaacttacttctcaatggacacttagaagaatttgatgatcttactgtcataaaatcagtaatgaaattctcagcaaaactatttggtaaacattgcaccctgtatttttacccaacatcttgttatgaaaattatcaaatacattaaaaagttaaaataattttatagtgtactcactacctagatgctaattagcattacctatgcttgctttgtcacatatccattcatcatttcatattattatttgatgcattttaaattgcatatcattaactagagttcattgttggcttttttacataaaattagcatgcaatgaagtgcatagaaatatgtgttcactgaggtttggcaaatgcatatagtgctatggaaataggaaacgttatcaccaccctagaaagtttccacactgccctttccagtcaattcctgtccctacttgaccctcaaaggcaaccactgttcctttttctaccataagatttttctgttctaaaactttatataaatagagtcacgcaacatgtacgcttttctacaaggcttcatttttttattgctgttcttttttattgctgagtagtattccactgtatgacaatattacagtttgttttcttaatttcctattattgatagatacctgggctgtttccaggattggccattataaataaagctgctatgaccattcttacgtaagtctttgtgaacataggttttcatttctttgcagtaaattccttggattagaattgctgggtcacagggtagttttaaaagaaactgccatacctttttccagttcagttttattgtgccctgtattttgtattttgatgtgcataaaggtgtaaactatttttatgatccatattgaagtattagaagaagtgagtttggaataacaatggcattgttcatggtcaaggatgacaattggaactatctgaggaaagcaaagacctgtctgccccagacagctcctcaaggggttcctatgcctgaaactttagcaatatttcactccttgaaaggttaaagcccaaccatggtgatatgttagctagaagaaacagcactggtttgtttatgttactaactttcaccacccgttttcagtaggtaaagtaagactgatcattgaacagaaaaggttatttctgtgatgaggttgagggggtagtggaaagcatgtattgctagtaagccccaggtacagctatgtgagagagagtcacctggacagggaagtcccccaaatggtggccagaagagcagaaaacggggtgggaaaaattctacctcacagttttgcataggggatagctatgcttttacgggacattttagcgtttaaaaatattttcaatattgtctctttattcaataccacccagctgtagttttttcacactctgatgactctcttatccactcttttacctctcccagctgttctattacatacagcattcacctgtattagtctatagaattataatcatctgtgtgtttctaatgctcattttcaaaaatatgtatggtttattcgatttttcctattaaaattttaagggctgggaaatttggcttctactgtaaatccttataatgttccacacattgtaaatatgcaataaaaatgttaacaactataatggcagcaggttttggtatgtatttctttgatatattgtcactttggacaataagtttgatttctgttaataaaagttgttcataaaatctagggagaattaagtcacactggtctctataagataatctgatgaattctgcatctttgaatcaatttgagttattttttgtaaaggtttaaattgtttctaacagtgttacctaaaacctttcattaaatcaaaaatgtaacttgtatattctgaaataacctggagtcttagaagacagaggcttctgcttccctctcccgtgaccccaacaatcccttcccacaggcttggcacagaagttcagtgctttctctacgtctcatgttgtcagaaataggttctcaccataatagacagtggtgaaatttccattgttcctactgagaagtccatttttaaggcatcaaaggtgaatgtgtatttagggatggaggaggcatattacaacaaagctgtatttaaaataacacaatcatatcatgctataaacaatagcagttccagaatggctactaaggattttggactgccagactttggaaattggcaagccttataccttgtccaatgaagttaagtacatttgagtgacagttcaacatacaagcaaaaaaatatatagaagacattgtacatttgttattaatggacatgtttactttacatgttagagtatccatccatctctaggttttccattagatgcttcattgtatccacaaacctgtttcaaaccattgaagtgatcttaccattgtgtttgttcaaaataaaattgggagaaaatgtgaa

SEQ ID NO: 1086 - DNA, 1713 bp, Homo sapiens
cagcagtccggacccaggcgcgcccctcccgccccagcccaccccggcctgccgcccgggaggggaacatgccgcgctccttcctggtgaaaacgcactccagccacagggtccccaactaccggcggctggagacgcagagagaaatcaatggtgcctgctctgcctgtggggggctggtggtgcccctcctcccccgagacaaggaggccccttctgtgcccggtgaccttccccagccctgggaccgctcctcggccgtcgcctgcatctccctgcccctcctgccacggatcgaggaagctctgggggcctctgggctggacgccttggaagtcagcgaggtcgaccctcgggccagccgggccgccattgtacccctcaaagacagcctgaaccacctcaacctgcccccactgctggtgctgcccacacggtggtccccgaccttgggcccagaccggcacggggctccggaaaaactgcttggggctgagcggatgccccgagccccgggcggctttgagtgcttccactgccacaaaccctaccacacgctggccgggctggccaggcaccggcagctgcactgccacctgcaggtggggcgtgtcttcacctgcaagtactgcgacaaggagtacaccagcctgggtgccctcaagatgcacatccgcactcacacgctgccctgcacctgcaagatctgtggcaaggccttctccaggccctggttactgcagggccatgtccgcacccacacaggggagaagccctatgcctgctcgcactgcagcagggcctttgccgaccgctccaaccttcgggcccatctgcaaacgcactcagacgccaagaagtaccggtgccggcgctgcaccaagaccttctcccgcatgtccctcctggcgcggcatgaggagtctggctgctgcccgggcccctgagaggcacgtggtcggcgcaggtaggagggatggtcctcaccgggagagctggcgtccctcctgcccccagaggagccaggagtctgggagggcggggcctggcctcacacttggtgcgtcctccacatctgcgtccaatcagaaccaaagaagtccagcgggggccactgggccggaggacactcccccaggcatcccaccgcgcggagcccactcagaggagactcctctcccggggaaggctttcatcagaacaagagccatggttccatttcgacacggccaggtctccggggctacccttccaagagtcagagcctcggggaggtggccgccagcatgggccggcactgccgccggatggctggcaaggctgcctagttccattgcagcagaaatgaacagttctgacttatagtgagcaccgccctgtggcccttcctcagtaggcacaactacctctcagccagcccccgccagcctttggtttggggtctgggacgagctgccccatgtcacacgtctatgtgcatgtgcacacacactcaaacatgtacacacacgtgccctccccacctcactagactctccgggagatggggcaggactgggagagcccacgattggtgatttgggtgtgttgggatgaggcggagtgcctgtgggatttgtcccggtcagagcctcagggggctggggtctcagggcactcagcttcccaggcaataacagccgtggggtaataaatggtctctgcacacctgca

SEQ ID NO: 1087 - DNA, 5155 bp, Homo sapiens
acagaggcccgggggcggggataccggacagggatggagactggccccgagattgggagggggatgggcagcgctggagaataacgccctggagacagggcagcgcagccccagactccctggaaaacccagcagtctggaaaagctgggtttggactcacccctctttgaagagttctcaggaagtttgggggaggggcgagccgcgcaccagttctaccggcatcgggcgctgagggtgagaagggaccacaagcagcagcaggtctcagtgcttgtcatattcctgctcaccggtgggctccgggcacgcccggcagggtcctgggggcgcaggcaaggggacgtaggcagagtgctccggccagcatggagggactggtcttccttaacgccctggccactcggttgctgttcctgctgcactcgctggtcggggtctggcgagtgaccgaggtgaagaaggagccgcggtactggctgcttgcgctgctcaacctcttgctcttcctggagactgcgctcaccctcaagttcaagcgcggcagaggctacaaatggttttcaccagccatatttttatatctgattagcatcgttccatcattatggcttcttgaattgcaccatgagacccagtattgcagtatccaggctgaaggaacatcacagaataccagcagaaaagaagacttcaatcaaacattgacatccaatgaacaaaccagtagagctgatgatctcattgagacggccaaagtttttgtgaataacttatctacagtatgtgagaaagtttggacattgggactccatcagacattcctgttaatgctaataattggaagatggcttctacccattggaggcgggatcactcgagatcaactctctcaacttcttcttatgtttgtggggacagcggctgacatactggaattcacaagtgagaccctagaagaacaaaatgtgaggaatagtcctgcactagtctatgccatccttgttatatggacttggagcatgctgcagtttccacttgacctggcagtacagaacgttgtgtgccctgtgtctgtgacagagaggggattccccagcctgttcttttgccagtacagtgccgatctgtggaacatcggaatcagcgtcttcatacaagatggccccttccttgtcgtgcgtctcatactgatgacctatttcaaagtgatcaatcagatgctggtgttctttgccgcgaagaacttcctcgtggtggtgttgcaactctaccgcttggtggtgctggcattggcagtccgtgcttcgttgagaagtcagtcagaaggcctgaaaggagaacatggttgccgggcacagacctctgagagtgggccctctcagcgggactggcagaacgagtctaaggagggcctggctattcctttgcggggctccccagtcacctccgacgactcccaccacaccccttagttattgattgacagtggtctgcggctagaacctgactccctggttcttcttacagggaggatcctttttctcctccaaccttggcgtataataattttcaaaagaacaacataaaaaggtgatcttaaaccaaagctgaggaattttcttttttcaactgaatagaaggaactttgattagtgactattgctacaacttctgtgtgatggtatcagatgttatagttgttcaacgactaagtgatttgtttgtcttgaactgtttgaaaagctatggaagaggttacagtgacatgccctcgaaagatttggtgcagaccaactgtcgcggctgttacctggaaatagagaagctttgaactttgcctccattgtcagactatttcgtctgatcttttctgcaatgttcctctgacatcaaaaaatgtacattcagtgaatgcagaacaaatgaagggaaaagtgcctttaaaattacctcactgtgggctggaagaagcgaaaatctctgcccagcttccgtatcatagagagccctattcatcgctgcccaggccttcccaggaaaatcattttttctgggctgatgttgtattctgccatggcgcatatgttcttacagaaattttattgcttttgtcttgggtgctacaaaattcacagcaagccattttggttacatatctactggttgcaaggcaggaaatattggtgaaatgctagcaaagtcacaatttctactctgaacatgatttgcagtgttcatcagtatttttctgaaccctgctttaccattttctatattgccaagttgaatcatgtgggctgatgcagggaagctctgaagcagtgaataaaggtgtttcgggccctgtaagtgtttccatggtttctggtgtctgccagcagtagtgaacaaagctgcagcttctttgaaccgcgactactggaagtggcctttgctctcagggaacatggtgatggagggttgcatcagctccacccatggccaacagcccttgttgagtgacgggagtcggaatgtgctaccccgttgtgggaatcaggcaattcgctttattttcttgcattaagacttcattttcccagtattgaaatagccatacttttcctttacatacctctatactttccagatggaggtgattcagaaccttttaaagtgatttttgcctttaaagatacagtgtgaaaatttgctcgggtgtgtagcagtaattacacgaggcaaacagttccaaaactgttcttttaggttcaaaacctaattcccccagattagtatactcgagaattcaaagggacatttaaggtggggtatgcccttaatttggtatgacttattgacaaccagttgggacaattttatctgtaactctctgggtgacatgatacctattcgaaacattttatacaaacttttatagacaaattgtgtttttatacagagtcatgcatattttctcataaatggcttcttcagtgccattgttatatgttttttatttctttcttccttgtgcttctaattttaacaatataatgactataaaatgacacatggaactaatggaatacatttatgattttccataataattttatgaaagttaagatcaagaaattatatttatatgaagtaaatcacttgacaacttttaagggcatgttatttgaagtgctcagcagttgaaagcaaaataataactgctatttataaaaatgcctcagcagaatctgtttttatgttgactgctttatgttgaatattttcttccacaacatgtatgtgctgcttattattgcagatttgctcatggcatacttttcatgttttaatttttttcttccagcaaaataaacactgaggccctaaaaatagataaagtataaagtagtacggctgttgcaaggatatttttaaatgctttcaaatctgagacttggcttggcttcgtgaatgagtttctagtgtttaaattaaagtattttgtaattagactcctcgtgggcttgagaaataaaaagcctgtccaaagtctagctttatttagagggtcaggaagtcaaagagcacccaggaccatcttggcaattaatagcggcaaaaatagacccagcttctgcaaggttttccaggaaaatctgcttggggcagcatttgttaacctagctgccagtactcctactctcttatactggctgcttttataataggaaaaaaaaatatgcatttgcttagtttatttgaataaaagctctaaacctaggttatatattagccattcctaagactcctgattaaatattacaaatttgttcagttcatagcgtagactgctaaatactgtaatgtttcaaaacatccaactgtttgttataaagtggctagaacatcaattacctcccatgtgtggacatcctgggacttgtttacattttatctgtaataagataactgactcacaacacctgtataatgtgatgcaagtcatcctctctatcataacccctccccccaacacacagtaggtcactccccaacccctgaagaaagtggcttatttgaggttgttggtgctgttggtattattgccatagttgttatttaattgcttgattaaactcagtcaaatatccttcctaaaaacatgtcattccacttgtgaaagaaaacacaatgtgcatgtttcaatgatactgtgcggaaacacacctcatgatcatcttgtgggtttcttttgcccttactggatgactctcagaggacatgacttgacatagtaacattagtaaactgtctttatctttgattattcttttaatttttatttgagctgtttcaatagcataatgaaataaaattttgaattggccaataacatgctttataatcttccagtgaagagtctgatacaaatttactcttggcactgttgtagttccactaacaaatagcacttcagaccttatagaaccatatagatatggccaaggaatagcaggattcactattataatactaattgttaactcattatttaattgaacatttccaaagctctggaaaggcatgcatttgtaggtgcacatgctttaagatttctatccatctttcagagttgaatgtaataatgtttggtatttaattcttgataattcttaaccaacttttcctgttacaggagagaaagaattgcaaatgccaggcatctgtccactttagccctcctccaatgctaagaaagagggatggtgacgtatactacagagacgcaaatgaaacaccaaacagtcttgaattacaagaaaaaaaggggattttttttttttctaatttcagacttggctttttacttagaggacattctgatttgctctcagaaacatctgatttggggttaaactaggcggctggaggatgtttacagctttgaggcttcaaataagtttccatatgcagggagtaactttaaacaatgtttgaataattaactgctaagtcttatattttatgtgtatctatttcatcctctgtctctttcttactagaataccatataagaatattttctctgcagtatttatatttatactattttgctatgagtggcctttgtattttattatatgcattaaatagtgtgtgcacaacttt

SEQ ID NO: 1088 - DNA, 5894 bp, Homo sapiens
atgcattgtgggcctcccgacatggtctgcgagacgaagatcgtggccgccgaggaccatgaggcgctgccgggggccaagaaggacgcgctgctcgccgccgccggcgccatgtggcccccgctgcccgccgcgcccgggccggccgccgcgccccccgcgcccccacctgccccggtggctcagcctcacggcggggcggggggcgcggggccgccgggggggcgcggcgtgtgcatccgcgagttccgtgcggccgagcaggaggcggcgcgccgcatcttctacgacggcatcatggagcgcatccctaacacggccttccgcggcctgcggcagcacccgcgcgcgcagctgctctacgccctgctggcggcgctgtgcttcgccgtgagccgctcgctgctgctgacgtgcctggtgccggccgcgctgctgggcctgcgctactactacagccgcaaggtgatccgcgcctacctggagtgcgcgctgcacacggacatggcggacatcgagcagtactacatgaagccgcccggctcctgcttctgggtggccgtgctggatggcaacgtggtgggcattgtggctgcacgggcccacgaggaggacaacacggtggagctgctgcggatgtctgtggactcacgtttccgaggcaagggcatcgccaaggcgctgggccggaaggtgctggagttcgccgtggtgcacaactactccgcggtggtgctgggcacgacggccgtcaaggtggccgcccacaagctctacgagtcgctgggcttcagacacatgggcgccagtgaccactacgtgctgccgggcatgaccctctcgctggctgagcgcctcttcttccaggtccgctaccaccgctaccgcctgcagctgcgcgaggagtgaccgccgccgctcgcccgcccgcccccccggccgccctgtccgcctttgcccgcctgcccgccgcccggcgcggcctgctttcagacgctcaattggcgtttgtgttgggtttccccttttcaacatcctgcggttgtctggctggttccggggggtgcggggctgttgttcttcggcgacactttggtgggggtgggttgtttgtcgccatagcccctcgcccttccccacctgcctgggcggcttgccacctgaagagtggcatcttggaccaccgcggctgtccatgacgctgccctgcccgccgccactggggaaggcccagccttgctcaccaagcacagaacctctgcagcagatcccggggccaggctccggccccgcctgcggccccagcgccactgcctgtggaggccccagctggccacggcgctgctttgctccgcgcatgccgagggtgtggcccggctgagcatgccgcatgcacacagccccgccctgccgccctgcccagactggacccggagacccgggctggtgagcgcccctgtccccagcccccagctggctgtgggagggcctgcccctgcccccacctcctggagggcctggtctgccccgcgccgcccggctctgtccacacctgctttgctctgacgccctccatttctctggctccggcccctcccctgcctgggctgtgctgactggtgtcatcacccaggtgactcccatggcgtccgtggcacagccagggtgggggtccatgggacccctctccccagtgcccactggatcgtgctggcctctcccagatgtccccggggacctcctgcctctggctgacggtccaccctgtgaatcttatcagcccaggctgctgccaacagcgcccagcccacagcttctcccagcctgaaaccaacacattttctaataagttatttagacagaatagcactctgcatgactttaattcttgggacaaaacggtagtttgtaccctaagacacagtttctggcccagtgtgatgggggtgggtggccgggtgggtggagcgttttgctgttggaaacctggagggaaaccctgattggatgtcatttcctgccatggagcacgcctcccagccctggcctgcagtgtgggcagggtggggggcaagggagtccgcagcctccgggaggaggggcagggcgctgccttgggctgggtgggaagaggggtggccgcctcggcttccgctggccatgctcctggtctctccttcctgaggtcacaggcaggggctgccctggacggggggcggggggggtggcctggaaggggagacagaggtggagggtggcacaggctgcacattcagcttagaagtggacctggctttggtggcaggagaagaataaacacttgcccagacccctttgtgtgggggaattggggaggggtcgtggcaggcagggtgggccacggaactgggtcccaggcatcaaggccacgtgcagggccatggagggatgcttctcacgaggcgcttcagaagcgagcgaagggacagagaagccctgcgtccaagggccttttgtcctgttagcaattgaggtgtgcagagcactgtacagaccccactcccctgtacattcctccctggaggtgcccggtccccgcttggggatgggagttttgtagactgtacagaaatcggcaccctattttcttgcagctcagattttgttaatctggaatatacagacagacgtaaagtgttttagcaaaatggaaacaaacagttgtgcctttttcctcttttggtttggtttgggtttggcctggggctggtcccagttggtgcggggcatgctgggggcaggaggggcagggcgggccaggtggagtcaggtcttgggggtgtcatgtcggggtgctgccagcgtcccttggtcctgtgcctttggagcctcgggctcctggggtgcagggtgcttgggggtggctgttggagcccaccgacgccagggcagggcctggaggcccagggactgccagtgtctccttgatattgatcctagcagatccccctcctgggggttctgagagtcctgggcagtgtggccttctctcattctggtggcatctgcgcccgtgagtgacctcttccttggctgcactgccctgtgggtggtgagacgcttggccttttttgttgctgccaggacttggtagagatggcaggaagggtgtgcggggtggttgtgtgcagaaccctgccgcccctgaggtgagcagaggcactggtgtgcctgccaggctggggcggagctgcccggaacccttgccaggccaatgtgtagcttggtggcgcccttgaaggccactggggggtaggtgtgtcctcccccggggctggaggccgggtgcctggtgggtgggcctgacctggcccacctcatccctccagcctgggatctcactgctctgcacatgtgcactgacgtgaattttatacgtttgtagaaactctgatgtaacttcttctacctctgaagcgccctcctgggccctgctgtcacgtggctggtgcggcttccccgagtgctggccccctgcccgctccccatgggcacccaccactcaaactctgcgtggtgaggcccggggaaagccaggccgggccctagcactgctcaggggcctggggctcctgggatttctgtgtgtttggaagcctctgtttttggagtggggggcgtggaaggcgggaggggctgacagtgcctggggccagagctgggcgaaggaggacatcctcactggacgagcactgcaggcctgacgagaggctccgggcagctgagggctgaagcgcctcgggatgccccacactgcccagagccacgggtcttgctgtgctgggggtggggtggccccaggcagctgccactgcccaggtgtgagtcgctgcagacctggtccctgagggtgggaggcctgcttgtgctgaagctgccatgtggtctggcccccagaagggctcctgagcgtagggagttgagccccgcagccgtggcggcatctcctcctccttcctccgccccatgcccagccttgcttccggctggtggcatgccttggggccgggcagcaggtgagaagctgcccccggagggaggggccaagggctgggtcagtctggcctgaggggtggatggctggccctgggggaaggctgggcctgggaggccctgtggacagcaggcctgaggccacgaggtcctggggccacccctctcctgctctgggtgtccttctcagagaagatggcagaaggctgcaggccctagaggggacgacgggctggggacgccctgagcttcctggctgtgtggcaggtgctggggaagctctctgggccatagggacctggctcccctctgagaggcccgcctgccctggggcacccagggctgtgctggtggcctgaggctgggaacttgggttcctgggctctgctggcgcctgggctttgtgggggccgaaggtggttgccccgccgggcagggggctgtgtgggccctcgtggggccaccttcctgtcagtgcccgagggacggtgggacagttgcccctgcgccaagggagcccactgccatcccccgtgggctggcgctgcagtcgcgcaccctgtgttgcctgctgacttgcttatgtctgtttggaagctgcttctgtttggccacaggcctgtgttcctgggctgatggccacagagctgacacttggggtttgagttccagacttgcagaccctgggatccgcttactcctccgcgccacggctgctgtgcttccagaggtggcgtgatgcctcccggggccatggtggggtgaaggatggcgagccggacataccattgttggatgtattttttttaaaacagcaataattagccattttaaaggagggatgtacctgtgtgtgtgcatgtgcacgtgtttgagcgtgtgtgtgtgtgcaagtgggttcttggatatgtgtagtgtgagcatgtgtgcatgtgtgagcctgtgcacgtgcatgttgtaggtgcataagcatgtacacgcgtgagcatgcatgtgtgtgtacacgtgtataggtgtacatgtgcatgagttgtgtacatgcgtgagcacgtgtatagatgtacgtgtgtgtgcgcatgtgtgcgtgtacatgtgtttgtgtcttgggtatgcataagcatgcacgtgtgtatgaatgtgcgtgtgtatgcatgagcacgtatgcatgtgtgatgcgcatgttcttgtgtacttctctgagggggcacatatgtatgagtgtatgagtgcatacatatgcatatggtgtacgtgtgtgtactttgtgtgtgggcatgtatgcgtatgagtacttgtgtgtggctggtgtatgggtgagcatgcacatgtgtatggatgcatatgtgagctgtacatgtagagtgtacatgtgtgttgcatgagcatgcatgcgtgcgagtgcctgtgtgtgtacttgcatatatgtggctgtgcaggtacccggcggtggtgggctggcagtgcccggggaagcaggtcctgctcacggcttccctgctgggccccaggccccgggctgagcctccctggcccctcttgcccctcagtggagcagggcctgggtggagggcctgggcagctccagggcaggtccggggaggccaggcttggggagcacagggggtggggttcacctgctgctgtttgttcccgaaactgtactgtgagcccacggcgggggcagattgttctgaggccccagatgtgccaaaacagcccccagggtgggggcgagcgagttctgaggagaggggctgcgggggccgggggtgggtgtgtgcccctcccctgaatggcccccaatgctgctgtttttcaataaaaccagagttgaaggcaaaaaaaaaaaaaaaaaaaaaaaa

SEQ ID NO: 1089 - DNA, 3149 bp, Homo sapiens
agcctagacttagatgccttggaccacagcaccacctacttatagaagcatcccaagcctcagccggtctgcatctccatcggaaagtgcgcttgccacatcccttcggatcacttcgtcctcccgagagcgttctgccttctacagctcggaaagaaagaaatcttagctgtgaagtgaccgtggagaaagcgcaggaagcgacacaattggttagggaggcagagagtgtgagcgggcgcaccccttgcctggggaccgcgctcgcgggcggggacggagcatcccagtggctgcacccgccgctccgcgctcctgcctggcgtcgccaaccccgcggcggccgctggaattccagagctgccaggcgctcccagccggtctcggcaaacttttccccagcccacgtgctaaccaagcggctcgcttcccgagcccgggatggagcaccgcgcctagggaggccgcgccgcccgagacgtgcgcacggttcgtggcggagagatgctgatcgcgctgaactgaccggtgcggcccgggggtgagtggcgagtctccctctgagtcctccccagcagcgcggccggcgccggctctttgggcgaaccctccagttcctagactttgagaggcgtctctcccccgcccgaccgcccagatgcagtttcgccttttctcctttgccctcatcattctgaactgcatggattacagccactgccaaggcaaccgatggagacgcagtaagcgagctagttatgtatcaaatcccatttgcaagggttgtttgtcttgttcaaaggacaatgggtgtagccgatgtcaacagaagttgttcttcttccttcgaagagaagggatgcgccagtatggagagtgcctgcattcctgcccatccgggtactatggacaccgagccccagatatgaacagatgtgcaagatgcagaatagaaaactgtgattcttgctttagcaaagacttttgtaccaagtgcaaagtaggcttttatttgcatagaggccgttgctttgatgaatgtccagatggttttgcaccattagaagaaaccatggaatgtgtggaaggatgtgaagttggtcattggagcgaatggggaacttgtagcagaaataatcgcacatgtggatttaaatggggtctggaaaccagaacacggcaaattgttaaaaagccagtgaaagacacaatactgtgtccaaccattgctgaatccaggagatgcaagatgacaatgaggcattgtccaggagggaagagaacaccaaaggcgaaggagaagaggaacaagaaaaagaaaaggaagctgatagaaagggcccaggagcaacacagcgtcttcctagctacagacagagctaaccaataaaacaagagatccggtagatttttaggggtttttgtttttgcaaatgtgcacaaagctactctccactcctgcacactggtgtgcagcctttgtgctgctctgcccagtatctgttcccagtaacatggtgaaaggaagcaccaccagcatggcccctgtgttatttatgctttgatttgaatctggagactgtgaaggcaggagtaagtgcacagcccgtgacttggctcagtgtgtgctgagagaatccgtccccggcaccatggacatgctagaggtgtgaggctgcagaacaccgctggaggacggacttgtgcctatttatgtgaaagaagatgcttggcaggcaatgcgctactcactcgtgacctttatttctcacattgtgcattttcaaggatatgtttgtgtggatatctgcttagtgttaccacatggtattctcagcatgttaccttcacactgttgtgcgatgaaactgcttttagctgaggatatgctctggaaattcctgctcagtttcactgcagccctaatatgtacatatactgcaggagctacatataaagctcttatttactgtatatttatgctttcttgtgggtaacaagtcatacctgattaatatgatgccactttgtttctagtggttcctaacccattgtctgataaatgacttttctagtttggggaattgacacttgttttgttgcctcttgaaactttttttttttcccctcattgtgggcttatttctcattgtaagggtaggataaactagtttttgtatatagagtcaaatgaccagtgtcaaagagtttgcatattgggtagaccttctccactccacatgtcccacacatatagataaagcagcaggcggcatctggcaatcagaagcccaaactgcctttgagtctaagatgtgatgactttgatgaaacacaactgaaaacatgagggactatatccagtcacttgtagccagtttcacaggccagctacagaattgtccaaacaaacattatttctgactgcaatttttttcccccaaatttaaagcaatccctggctttaaatgacaaggcacctaccaatgttcttgggtcactgaagaagctactaccatgagcctgggcatagaattttaggagataaaaggatgaatttctgtgactgccagtcagatcttaacaggtttctgttgagccagaatctgtttcagatccaagatggagaggaacactatggaaacttcccaggtgactttcagagcagttgtttcaaacacatcattgtccttttaggggaaccagtttttagaaggttgtgaattggctttttcacaaagcatgattatcttcctggctgatccaggagaaaattagaacagaaaaataatggttgtggattttgaaacaaagcaaggtaaagccttttttttttcaccttgcattggcaaaactacctcttcagtgtttttaacttttgattcaaaagcatcttaccaataaggataaatatcatatacatcgttatgaaaatattgctatgagataataagccacatatgaatgttgtatacaactttagggtttacatttaatcctgaagtgttacctcctttcatgtctatttacactattttcccatttactaagtggggagggggtctccttatatagtgcttcatcgttaataagtcaatacctgttgttcctgggatgttcttttttgtgcattaaaaacttcaaaatta

SEQ ID NO: 1090 - DNA, 7667 bp, Homo sapiens
ggcccaagccgccattgttccgccgagggaggacagcggggcctggcgctggcgccgagacgccgcttagcggccgccactggagacactccctcccgcctcccgggtctcctggcggcggcggagtgaggctgacagcggggaacctgggagacccctccgccctccccgcggtggcagcggccgatccccggctccggcgcgagggacggccgcgatgcgctcggcctgaggttacccggcccggcccttcctcgcttccctcgactattccactgcgtctccgcgccccggcgtcatcctgcgagtccctctgacgggagggaagatggctgcacggagctggcaggacgagctggcccagcaggccgaggagggctcggcccggctgcgggaaatgctctcggtcggcctaggctttctgcgcaccgagctgggcctcgacctggggctggagccgaaacggtaccccggctgggtgatcctggtgggcactggcgcgctcgggctgctgctgctgtttctgctgggctacggctgggccgcggcttgcgccggcgcccgcaaaaagcggaggagcccgccccgcaagcgggaggaggcggcggccgtgccggccgcggcccccgacgacctggccttgctgaagaatctccggagcgaggaacagaagaagaagaaccggaagaaactgtccgagaagcccaaaccaaatgggcggactgttgaagtggctgagggtgaagctgttcgaacacctcaaagtgtaacagcaaagcagccaccagagattgacaagaaaaatgaaaagtcaaagaaaaataagaagaaatcaaagtcagatgctaaagcagtgcaaaacagttcacgccatgatggaaaggaagttgatgaaggagcctgggaaactaaaattagtcacagagagaaacgacagcagcgtaaacgtgataaggtgctgactgattctggttcattggattcaactatccctgggatagaaaataccatcacagttaccaccgagcaacttacaaccgcatcatttcctgttggttccaagaagaataaaggtgattctcatctaaatgttcaagttagcaactttaaatctggaaaaggagattctacacttcaggtttcttcaggattgaatgaaaacctcactgtcaatggaggaggctggaatgaaaagtctgtaaaactctcctcacagatcagtgcaggtgaggagaagtggaactccgtttcacctgcttctgcaggaaagaggaaaactgagccatctgcctggagtcaagacactggagatgctaatacaaatggaaaagactggggaaggagttggagtgaccgttcaatattttctggcattgggtctactgctgagccagtttctcagtctaccacttctgattatcagtgggatgttagccgtaatcaaccctatatcgatgatgaatggtctgggttaaatggtctgtcttctgctgatcccaactctgattggaatgcaccagcagaagagtggggcaattgggtagacgaagaaagagcttcacttctaaagtcccaggaaccaattcctgatgatcaaaaggtctcagatgatgataaagaaaagggagagggagctcttccaactgggaaatccaaaaagaaaaaaaagaaaaagaagaagcaaggtgaagataactctactgcacaggacacagaagaattagaaaaagagattagagaagaccttccagtgaatacctctaaaacccgtccaaaacaggaaaaagctttttccttgaagaccataagcactagtgatccagccgaagtactcgtcaaaaatagccagcctatcaagactcttccacctgctacttctaccgagccatctgtaatcttatcaaaaagtgattctgacaagagctcttcccaagtgccgccaatactacaagagacagataaatccaagtcaaataccaagcaaaatagtgtgcctccttcacagaccaagtctgaaactagctgggaatctcccaaacaaataaaaaagaagaaaaaagccagacgagaaacgtgaaattttttttcctgaattggacatgtgtttgcaaacacttgtcttgaagattatgctgtttatgcaataatttgtgaacatgtacagagttttatataaatttaaaccaatttttaaaacaaaactgcggacaccaccataaaaatggaatcaaaagaaagttaatttatgaaattaagaggtcagcagaatatactcagtgatggaagacacttgggaaagtctttttaatagaacaagaacgatcttaatttaagaatattatcctggtttaacaacagtgccctgtttacaacagattgtgccctatctcatctgcagccgaggaataaaggattctgattagaaagagggttgcctacagattagtaagcaattccttggatcttatgcacagaacttgtaccatttgaatctgttttatgcttaaatcaaagtgctttgatcaaatgcataacctgccatatctttacatatttgttggtagcaatttgtattaaagaaatcacaagtgcaaataaaaagtcatttatcatttgtttaactaaactgtcatggtttagtttacaatttttaaaaagttcttaaaatactgaaaatgcagttgacacttgtgtatggcttatgaagttatttttgatagtcttacattacttgaattgttcaaagtacagtatattttaaattaagaaaagtgaactatatgtatttgttttatacatttaaggcttagactcataaataatgctattgtttatgatttgaaaactttcaggcaaaatccaatttacatttttcccttccctagcaattacttttttccagcttcaactcttcttagttactaatactttgttgactttaaaaatgaaatcattcacaaacttttggtatatgatggagaatgaaaaactagagtcagacagctttaattgacattgtcaacacctccagttatcaggaatacatttttttactgccttaacctgtagtgcgtagaatatgcatcaatttcttgaaggagattcatgtttttataagaattttcatgtaattattgcaattgtggtcaaataaggaacgtttcctgcttgaaattatattgatttaaatgatgtgtgagatgtttcaccattttcaggcactgtgtaattctattgtaataaactggcaggtatctttgtaactataaatagtgcatgctcagccatgtacactgtaaatagcctttaccaaacgtgtttgacaaggaccataattaacatcacttagtgaattgtgataaagaaaaaaaagccatgatttattcgatgtgattggcttgtttttatgtggcgccaagaacgaacctgtttaacagctgtaaccaatggtactgatctatccatccaatgttgtcattatatttgactgtggttcaacagtattgcgttgtcagactaggaaagctaaacgaacaaaatggttttagttttgctgaagactggccttattaatggacagctttcctaacaagagattattaacttttatcaggtgttaacatctgtttcaggaacatggcagtatgtttacatgtcagaagttttgtttaattctatggtatttctaaattgacttgtttaaataaattcagcaaatggatagcattgttttttatttgcttcaatatgggggtagataatagctaaagagccaaggatgaatttcttcaaatgactttattctgttagctttacataggtgttggaggattcctaaggtgtcagcattttgtaaaggtaccacaaaggagaagttgatagggaatctaattttagaatgtgccaaatggtctgtgctcaacaatataattgaactctctcaactctacctcaccatttctttatctcaaaattctgttggctttgtcaaacgttggattttatttctgcagcctagtatctccccattctaccacctatgccagatgttaaagacagcagatgttttgaggagaatggcattgtggagatgcagagatgcgttgctaagttgaggtggatccagtatagagatacctctatttcttctttatggctcaagagctaggacttggattttgttttaagagatggcagctggccgggtgcagtggctcacgtctgtaatcccagcactttgggaggccgaggcaggtggatcacgaggtcaggagttcaagaccagcctggccaagagggtgaaaccccatctttactaaaaatacaaaaaaaaaaattagctgggtgtggtggtgggctcctgtaatcccagctactcaggaggctaaggcagagaatcatttgaacccaggagacggagtttgcaaagccaagatcgtgccactgcactccagcctgggcaacagaaggagactccgtctcaaaaaaaaaaaaaagatggcagctatataaatgataaaattaattacattctctttcacatgcatgaggtgcaaactctgtcacaaagtattttaattaccttttaccttgtttcatagatctttatgtgacataaaaacagtttctggcacggtggctcacgcctgtaatcctagcactttgggaggctgaggcaggtggatcacctgaggtcaggagtttgagaccagcctggccaatatggtgaaaccccatctctacaaaatttgcaaaaagtagatgggtgtggtagtgggcgcctgtaatcccagctactcaggaggttgaggcagagaatcgcttgaacccggggggtggaggttgcagtgagctgagatcgcaccactgcactccagcatgaaagagcgagactcaatctcaaaaaaaaaaaagtttctggcacctgaacaggaactggtttccatcatcaactcagaaagcactaaaatctaggtggtgattcagggaggagcaggggaagacagcctcctatggtggcatgaataagatgcttccagaactagtagggaaataactaacctcttcaggctttatcaggcctggaggggaaccttgctcatgttagcaagaaaggtatcctagagaagccactcaaaaggctccctaatccagcctgtctccacatacatactgaaaattcttccctactctgaggcagggtgtagtggtttaggggtttctccagactggaatcctacctatctgtaccgacaattgagcaaacaacagttgagagagtccaaaaaaaaaagtattaaaatgtgattgatgtaatttaccatgtttactttatgcatgcattttattggggaggggaggtcagaataattcacccaaatctagtggtcttatttcataggctaatctggtttatatttgcattaaagatactggagggcaatatttacagagtttagtttttcttaattaaaaacagtcctctattaatatagtgtgaaatatctttcaaaatttagagtttaggtttaagatgtctactagatatctttaagattttcctgtaaactcactgcacaaactggaattactttccaaaagacttagggaatgcaaatatgttactcataagatgcattgagtattgtaaataaaacaaaccatttttgatttgtttaaattgctcgttacagttctcttgtggggagggactttgtcagtcattttgcatcttaagctagactaaactttttgttgttgttttcctaaaaccataggtgcaagctttgccgctgggaagtcatattgaattaagcacttttgaaaatgtcactgtttgtgacacacaatgttctctacagaaaacttcttctatcttatgtcattttagcagtagatgtagctgcctgccaccaggtgcaatatgtcatttgcatcagccttttcagttaaggaaattaaaacttggcatgcattagttcatatgtatgaggttggctgtgtccccaaacagcaattgcttgtacaagatagaagtttgcttctcagctgggcatggtggctcatgcctgtaatccaagctctttgggaggccaacgcgggaggattgtttgagcccaggagtttgaaaccatcctgagcaatagagagacccccatctcgacaaaaaaaaaaaaaaaaaattagaaacaaaaaaaagattgtttctctttcatattaaagtttgggaaggcaatccagagcccatatgacattatgcagggtcagggatccgggttctttctatattgttcctccccattctcaacctgtagctttttttttttttcttttaatgagatagggtctcactctgttgcccaggctggagtgcagtggcacacttctggctcacttcagcctggaactcccgggctcgagctatattctcccactttagcctcagcctccagagtacctgggactacaggtacacaccaccatgcctggctaaattttttttttttttttttggtagagatgaggtcattgctatgttgcccaggctggccttgaagtccagggcttaagtgatcctcctgccttggcctcccaaagtgctggtgttacaggtgtgagccaccacacctggccaacatgtggctttcagttcttacttgaagacagctgctctagctagaaacttcctatcggcatctgagccagctggtagagggcattacctcccccacccccaagaacacttcttggaagttacacacaatacataaacttcaatttcaaacagttgcttggtcccactagccatgaagctggatgggacgtaatattctatctgggttgtcatgggccaaattaacattttgagattctgttaggaagatgagaattggataatgggcacctctaacagtgtctgtcagagttgacatacattgtgtatctcctgcaccaaagcatttttgagatcaagtgttcttccagctgagcagaaatttggaaggctattcagtgctgcttagtgtagcagctaataatgttccaacttctatatgatagtttgctttttgttttttgtttttttctagagacagagtctcgttgcccaggctggtctccaattcctgggttcaagcaatcctcctgactcagcctcctaaatgctgggattacaggcatgaaccactgtgcccagtctatatataatagattttagaagaaatttctgccactcagtgactgctttaaattctagagacagaggctgagagaaacttagtagcctgcctgcgcatactgcaagtacagactatataacaagttgaaagagaatcaccctggtatataatattttaaaacatgaaaaaggcattactattgttctggtctaagtactctaacaggacgatgatttctaaccctagcatcatgacatgtatatagtgtgttgtaagacatttgccagctaatagttacagtactgaagcttgtgaatacgttaattgagaaaactttaagcaggttcaaagttatcccatgatagtggcattcttatttgtatatatgtgctttccttttttatttgtatcaaggcatttaaaatgaatatatgtaacatgtacctaagttttaaaagcataataaaatgaacacatctgaaaccacca

SEQ ID NO: 1091 - DNA, 6328 bp, Homo sapiens
gcacgtcctgacgcagcttgggcccgcggcggcggcaagggcgggagggagcggtcgccgcgggatttggagctgcctagcctcgcggtcgctttggcagcatgtaagcagctgtttgccaagaacccaggtcactgctaagaaagggtgccttcgggagaagagtgtccagaggataccaatgccagatgcatctggagttacactcagcactcgcagtatgagacattgtgtgccagcatctctttccttctggcaaagactgtagctctccaggtaggaggatcctggaagctgtgagcaccaggagccttgccagaggaggatggggccagatatgaactctctaccatgaacatggttctcggcttatgaaggaattttaagtaaaacagttatttaatttccacatattcaagtcaaaagccttctgtgtgaagtgccagtgattacccctccacaggagttatcaggatttttctggcaccaagtttaattcttcttcgtacttctggtagtgacagatctgcaggacagatttatctgttgaatgctcttgggcaggaaaaccatgtaaaacctctggaagcagcatcaggacagcagagcagagcccccgtcctcactgctcacttgcacagaaactccatctggactcggatgcttttactgaagacccatctagcttcaatcatctttagagtccatccattctggagagacctggcgtttgcagttgcctcctgtggccgtgtttttctgtcattctgttcccaggccttctattcaggcggttgaagggtgtggactttggaatggggtttgctgttcttcgggaacttgcttcctttccctggctggtgctgtcaggaaggaccatctgaaggctgcaatttgttcttagggaggcaggtgctggcctggcctggatcttccaccatgttcctgttgctgccttttgatagcctgattgtcaaccttctgggcatctccctgactgtcctcttcaccctccttctcgttttcatcatagtgccagccatttttggagtctcctttggtatccgcaaactctacatgaaaagtctgttaaaaatctttgcgtgggctaccttgagaatggagcgaggagccaaggagaagaaccaccagctttacaagccctacaccaacggaatcattgcaaaggatcccacttcactagaagaagagatcaaagagattcgtcgaagtggtagtagtaaggctctggacaacactccagagttcgagctctctgacattttctacttttgccggaaaggaatggagaccattatggatgatgaggtgacaaagagattctcagcagaagaactggagtcctggaacctgctgagcagaaccaattataacttccagtacatcagccttcggctcacggtcctgtgggggttaggagtgctgattcggtactgctttctgctgccgctcaggatagcactggctttcacagggattagccttctggtggtgggcacaactgtggtgggatacttgccaaatgggaggtttaaggagttcatgagtaaacatgttcacttaatgtgttaccggatctgcgtgcgagcgctgacagccatcatcacctaccatgacagggaaaacagaccaagaaatggtggcatctgtgtggccaatcatacctcaccgatcgatgtgatcatcttggccagcgatggctattatgccatggtgggtcaagtgcacgggggactcatgggtgtgattcagagagccatggtgaaggcctgcccacacgtctggtttgagcgctcggaagtgaaggatcgccacctggtggctaagagactgactgaacatgtgcaagataaaagcaagctgcctatcctcatcttcccagaaggaacctgcatcaataatacatcggtgatgatgttcaaaaagggaagttttgaaattggagccacagtttaccctgttgctatcaagtatgaccctcaatttggcgatgccttctggaacagcagcaaatacgggatggtgacgtacctgctgcgaatgatgaccagctgggccattgtctgcagcgtgtggtacctgcctcccatgactagagaggcagatgaagatgctgtccagtttgcgaatagggtgaaatctgccattgccaggcagggaggacttgtggacctgctgtgggatgggggcctgaagagggagaaggtgaaggacacgttcaaggaggagcagcagaagctgtacagcaagatgatcgtggggaaccacaaggacaggagccgctcctgagcctgcctccagctggctggggccaccgtgcggggtgccaacgggctcagagctggagttgccgccgccgcccccactgctgtgtcctttccagactccagggctccccgggctgctctggatcccaggactccggctttcgccgagccgcagcgggatccctgtgcacccggcgcagcctacccttggtggtctaaacggatgctgctgggtgttgcgacccaggacgagatgccttgtttcttttacaataagtcgttggaggaatgccattaaagtgaactccccacctttgcacgctgtgcgggctgagtggttggggagatgtggccatggtcttgtgctagagatggcggtacaagagtctgttatgcaagcccgtgtgccagggatgtgctgggggcggccacccgctctccaggaaaggcacagctgaggcactgtggctggcttcggcctcaacatcgcccccagccttggagctctgcagacatgataggaaggaaactgtcatctgcaggggctttcagcaaaatgaagggttagatttttatgctgctgctgatggggttactaaagggaggggaagaggccaggtgggccgctgactgggccatggggagaacgtgtgttcgtactccaggctaaccctgaactccccatgtgatgcgcgctttgttgaatgtgtgtctcggtttccccatctgtaatatgagtcggggggaatggtggtgattcctacctcacagggctgttgtggggattaaagtgctgcgggtgagtgaaggacacatcacgttcagtgtttcaagtacaggcccacaaaacggggcacggcaggcctgagctcagagctgctgcactgggctttggatttgttcttgtgagtaaataaaactggctggtgaatgaactgggggacttctccctttactttctcccctggctgtggccctgagtagcaggcttctcgtgaggattcccgttctcttctgggagcatggccctggggctgcggagaagccaactgactgctggagcgaggaaccctgcagctcagaaggtgaacagctcgtctcagatgcttgcagatctttggttaatttagaatttccagcacagacgtggatttctccagagacggggtgtgtgcgggtcgctgatgtgaggcctaggggaagcaatgagtaaactccagggtgggggaggagcaagggcccggggagggctgcagaggggccggggcggggcagggcctgtgctgcatggtggcttctgcaggggagggacaggggagggctgcagaggggcagggtgggcagggcatgtgctgcatggcagcttctgcacagccagagcaggcaccacaggaaaagagtcggccactggtgcctgctgtacagtcacagtggaggcagagccaaggccaagcagcccctgtgggttctggggtttcaccagtttcatgctcctcagctccccattcatgccccaccagccctcacttgggacccatgctccctcgtggcacagtcatgatgcctctcaggattttgtgcctgtggtgctgagtgtcacgtccccaaggtcgccctctggcctgcagttcagggagtgggtgggagtgaagctgtgctcctggggctgcagacagatccactttgcatgtggtacctgctgggttggccctgcaatctccttttctctgcacctacctgtgacctccctgggagagcctcccatttcctcacctgccctgttgccagcccgggggaaatctttttgctctcaaatgaagactgaaaaaataaagtcagtgttatgactaataagtctcttaggaactgttttacaaaatgcttaagaataaaaagtgattttcagcttttataggtgatgtttacagtgtttgtaaaccaactggagggatcagtaattggtcttaaaagatcaggttctcttttaaaaagttcatctgaaactttatggtttgttactttcgtgatttgcataggtatttatatatacacacacacacaggttttgcttttgtctcacattcagcacagctgtctgcggcccctgccggcaggtgtggccgcacctggtgtgaagtcacgtggagtcagtgctgtggagggaagtcctgtgcgggccgggcagtgaggagagcactgattcacgcctgcagaaacgtaacctcccctttccgtgtatgccttttaccatcatccaggcgactgctccatccttttaaattaggggtcctgcaagccccaagtgacccatagtcagagtatctggtttggggtaaccgagttggtcttatggggcaaaaactcaagacacttagaaacatgcaaagtacaaaataatgtgttccctcctgttaccccagcaagggtggggctgagctgggaatgacacccagtggtgtaatgagtggaaagtgctggtcagctgctaacccccctccaagcctgctgcaccttcacttctctgcatccgtctcctgagtcataactagggacttggctagatgacctcagagacctcgtccacctctgaattctctgtttttaagcccatagttcaaactttggctttgatctctgaagtcttctgggtttggaaatacgggaagtcagctttgaatccattgcttctctaaaacatcagggctagtggaactaacccacttgagggtgacctcaagggctttaggcagccatggggctggggccatactgctctcaggctgggcagtatcttcattgtggttctcagacagccttttttactcaaacatgagactttccacccaccagttagggaactttttttttttttttaaacacggagtttcactcttgttgcccatgctggagtgcaatggcacaatctcagctccactgcaacctctacctcccgggttcaagtgattcttctgcctcagcctccaagtagctgagattacaggcatgcaccaccacacccagctaattttttgtatttagtagagactgggtttcaccatgttggtcaggctggtctccaactcctgacctcaggtgatccactctccttggcctcccaaagttctgggattacaggcgtgagccactgcgcccagccaagagggaactttttaataaagctagtgggattcccttgacagcagaaccagccttgggacttgatgcttcaccgtgtcagaatccgtccctggtgctgcctttcagagaagaggcttgatgtgtgaggggtcagggggagtgctccagatccctgaaatgcccttcccagaccagtgacaggcatttttgggtgccatcgtgtgaccttcacggcacagcaaacagtgggcactaaccctgttgtcctgtggaaatctgggtctctgaatcctgccatttccttcctggaattggccaggaacttgattttctgggctattgcttgctagtgtcccctgatgcatgaaggatccccccatgtcataggtcccacctgcctgctgtgcatcccgggtggccagactcggcttctccaggtgcacttgtcccaggtggcccggtccgtaggctggaagggcagctgcaggtgcactgcctcgcggacaggttaggatatggccacgcagccatccatcttctacagcacgcacaccccactctctcccccagtcaatatgtctctctccgatgggaaagttaataaattttgctctagattaaaagtattgatcatttcatttgtaaacgataaataaaaagggggaacttttcattgcgccaggggtggcacctggcgtgtgttgcgggggtgattgcgctggctgccggggggtgggcttctcatatgcattctggccggccagctgcattgatttcctattagtctcccagcaccacccagtaacacatcatttcagtacctgctattaatggtcttttgataaataatcacttgtaagtcaataaatttttattaaacagtgaaaaaaaaaaaaaaaaaa

SEQ ID NO: 1092 - DNA, 4114 bp, Homo sapiens
ctccccagcccggccggccctcccgcgggcggcactcgggcaccgggctcgccgggaccagatccgcgagcccgtcagcctgcgccatgggctgcgacggccgcgtgtcggggctgctccgccgcaacctgcagcccacgctcacctactggagcgtcttcttcagcttcggcctgtgcatcgccttcctggggcccacgctgctggacctgcgctgtcagacgcacagctcgctgccccagatctcctgggtcttcttctcgcagcagctctgcctcctgctgggcagcgccctcgggggcgtcttcaaaaggaccctggcccagtcactatgggccctgttcacctcctctctggccatctccctggtgtttgccgtcatccccttctgccgcgacgtgaaggtgctggcctcagtcatggcgctggcgggcttggccatgggctgcatcgacaccgtggccaacatgcagctggtaaggatgtaccagaaggactcggccgtcttcctccaggtgctccatttcttcgtgggctttggtgctctgctgagcccccttattgctgaccctttcctgtctgaggccaactgcttgcctgccaatagcacggccaacaccacctcccgaggccacctgttccatgtctccagggtgctgggccagcaccacgtagatgccaagccttggtccaaccagacgttcccagggctgactccaaaggacggggcagggacccgagtgtcctatgccttctggatcatggccctcatcaatcttccagtgcccatggctgtgctgatgctgctgtccaaggagcggctgctgacctgctgtccccagaggaggcccctgcttctgtctgctgatgagcttgccttggagacacagcctcctgagaaggaagatgcctcctcactgcccccaaagtttcagtcacacctagggcatgaggacctgttcagctgctgccaaaggaagaacctcagaggagccccttattccttctttgccatccacatcacgggcgccctggtactgttcatgacggatgggttgacgggtgcctattccgccttcgtgtacagctatgctgtggagaagcccctgtctgtgggacacaaggtggctggctacctccccagcctcttctggggcttcatcacactgggccggctcctctccattcccatatcctcaagaatgaagccggccaccatggttttcatcaacgtggttggcgtggtggtgacgttcctggtgctgcttattttctcctacaacgtcgtcttcctgttcgtggggacggcaagcctgggcctgtttctcagcagcaccttccccagcatgctggcctacacggaggactcgctgcagtacaaaggctgtgcaaccacagtgctggtgacaggggcaggagttggcgagatggtgctgcagatgctggttggttcgatattccaggctcagggcagctatagtttcctggtctgtggcgtgatctttggttgtctggcttttaccttctatatcttgctcctgtttttccacaggatgcaccctggactcccatcagttcctacccaagacagatcaattggaatggaaaactctgagtgctaccagaggtaaaactgggtgaagaaggcaagagaagactttcagcctcttgatcaccagcacgaccatactgtttcagaaagctgggtggtggtggaggcgctctctcaatggctattcaagtcttctccactaaaacttggttgggtagaggaaattaaattgagtcctggtacctggtcaaaatcattagaagtttacctggcttctcaagttatcttcttccctggttcagactgttggtaagagctgtccagatacccagatgggaaggaaggagacagccgcgcgcttcactccatttgtcacctcatgcatggaccatactctgggtttgagatcattcttcattgaagtttgtaaaaataggttgaaattgtaaagctccatgatcattgctatatgtagatatatttcaatttaagcaaaacaagctgcaagttattccctggcatgctcaaaggattttcgtgcttttcacttaatagtccaaagtctcttaaattcctgctgcagacatcaatagcttatctatattctcaaacaccaaaaggaaaagttgaatcttgctctctttggtatactaatgtagtggtatgctaagctggctcataccaacttagaaaagctgattgtaaaattttcattttgacagctggttattaaatgcagccattattaaaaatcaaatcatacaaacttataattaaatcaattacatttaaaacaaaggtaataaatattcaaagcatatcacttcctaatttgatcttgatgctcttgaggtaatttacgtccatggtacctgtgtggtggaattactatatatgatggtgtgctactgtgcaccttgtctcaactccactcttcgtgatagcatgttggtagcttgaaatcagcctggtgggagtattaccatggacactggcaaaagctacagatcccggagagccagtggttaaacatttaccagcataccactgctagtaatcaaggctaactggtccagaaatcgcccaggagaatgaaatggatgttccatttttttctactgacattgactagcatataaaaggtatagaaacagcactaagactttctgaaaatacctaatgaaaattttacatctttttttgtttttgtttttgtttttgagacagagtctcactctgttgccaggctggaatgcagtggcgtcatctcggctcactgcaacctccgcctcccagtttcaagcgattctcctgcctcagcctcccaagtagctgtgactacaggcgcatgccatcacgcacagctaattttttgtatttttagtagagacgggatttcaccgtgttagccaggatggtcttgatctcctgacctcatgatctgcccgtctcggcctcccaaagtgctgggattacaggcgtgagccactgcacccagccaaaaattttacatcttttatagagggaaaaaaactctttataccatggcaaggccttttctttcacaaaaagctgggcctactgaacaattcaagctgtgcagtagtagactgaaagcaggatttgttgaggagttacagctcctgtccagagcaaatcctgtagtgatacaaggagaatgtaaacttgccagcttagacagggatcagtcctgagactgctggcagtagcaaatggctattagagtaactgtataatggttttgcctgcactttctctatgtatatacaaatgtacatgtataaatataaaaattaagtgatcatggttcttggtaacctgtcccaagtgctgtgattcacacgcctgacactaaaaggttcttcctggtccagtcagccagctgtgaccaccagcagcacagctgagtgctgagaatctggctggaaagagaaacgtggctcaagtgctggctcaccttctagctgtgtggccctgggcaggttactgaggctcttccaacctcacttttcacatgtaaaatggcatttctaaaagtacctaccctacctcaaaggaattctgaaaaaagtaagtgaatttgtataaagcaaagcactcacaatatgcctgacacacaaactgcttaataaatgttagtaatttttaaaacctcctcataagcggcttagaaattattcatgtttggtacatatttattgcaagtcaagcagatccaacttttttgaaagctggtggtctaggagtatagttttaattatatttgtaaatactcaaaagtattagatgccagtctaatttaaatgcagtctgactgtagcgagtaactgacctgggcaatgaaaaagcagttgtatttttcttgtggtttttcaagaaaatatcctttttatacagatttagaaagaagaatcaatggctatatcgaagttgattgtgactaatttgttaatacagaaaacaacattaacacaaatctaagagtacctttcctaaaataaaatatttaaacttaaaaaaaaaaaaaaaaaaaaaaaaaaa

SEQ ID NO: 1093 - DNA, 7203 bp, Homo sapiens
atgcaacgcgtaagactgcgacggtaccggggcggcggggaaggaccgagaggcgggaggagcagcggctcaggcgcctgcaaactggtggcctgaacgaggtagaccatgactgtggtttcagtggcgtcactcgctgggctgctcttcctgaggttttcctaagccatcccctggcggaaccgcccccagtttttgtccagaagtgcttatagaaaagatggctaatattaacctaaaagaaataaccttaatagtaggtgtggttactgcctgctattggaacagcctcttttgtggttttgtttttgatgatgtttcagcaatactggataacaaagacttgcatccatctacacctttaaaaactttatttcaaaatgacttctggggaacccctatgtctgaggagagaagccacaagtcttaccgtcccttaacagtattgacatttcgcttaaattatttgttaagtgaactaaaaccaatgtcatatcatctcctgaatatgatttttcatgctgtggttagtgtgatatttctcaaagtatgcaaactttttctggacaacaagagtagtgtgattgcttctttactttttgcagtgcacccaatacacacagaagcagtaacaggagttgttggaagagcagaacttttgtcatctatcttttttctagcagcttttttgtcatataccagatcaaaaggaccagacaattccataatatggactccaattgccttgacagtgtttttagtggctgttgcaacattatgtaaagaacaaggaataacagttgtaggaatttgctgtgtgtatgaagtgtttattgcccaggggtatactttgccattactatgtactactgctggacagtttctccgtggaaagggtagcattccattttctatgctgcagacactagtaaaactcattgtcttgatgttcagtacattattacttgttgtgattagagtccaggttattcaatcccaacttccagtattcaccaggtttgataacccagctgctgtaagcccaactcctacaaggcaactaacttttaactacctccttcctgtgaatgcttggttgttattaaatccttcagagctctgctgtgattggaccatgggaacaataccacttatagagtcattactagatattcgaaatctggccacatttactttcttttgttttctggggatgttgggagtattcagtatcagatactctggtgattcctccaagactgttttaatggcgctttgtttaatggcattaccatttattcctgcatcgaaccttttttttccagttggatttgttgttgccgagcgagtattatatgttcccagcatggggttctgtattttggtagcccatggatggcagaaaatatcaacaaaaagtgtatttaaaaagctatcctggatttgtctgtctatggtgatactcactcattccttaaaaacattccacagaaattgggattgggagtctgaatatacattgtttatgtcagccttgaaggtaaataaaaataatgccaaactttggaataatgtgggtcatgctctggaaaatgaaaagaactttgagagagctttgaaatacttcttacaggctacccatgttcagccagatgatattggtgcccatatgaatgtaggaagaacttataaaaatttaaatagaaccaaagaagctgaagaatcttacatgatggctaaatcactgatgcctcaaattattcctggtaaaaaatatgcagccagaattgcccctaaccacctaaatgtttatatcaatctggctaacctgatccgagcaaatgagtcccgactggaagaagcagatcagctgtaccgtcaagcaataagcatgaggcccgacttcaagcaggcttacattagcagaggagaattgcttttaaaaatgaataaacctcttaaagcaaaggaagcatatcttaaagcactagagctggacagaaataatgcagatctttggtacaacttggcaattgtacatattgaacttaaagaaccaaatgaagccctaaaaaactttaatcgtgctctggaactaaatccaaagcataaactagcattattcaactctgctatagtaatgcaagaatcaggtgaggttaaactcagacctgaagctagaaaacgacttctaagttatataaatgaagagccactagatgctaatgggtatttcaatttgggaatgcttgccatggatgacaaaaaggacaatgaagcagagatttggatgaagaaagccataaagttacaagccgacttccgaagtgctttgtttaatctggctctcctgtattcccagactgcaaaggaattaaaggctttgccaattttggaggagttactcagatactaccctgatcatatcaagggcctcattttaaaaggagacattctgatgaatcaaaagaaagatatactaggagcaaaaaaatgttttgaaaggattttggagatggatccaagcaatgtgcaaggaaaacacaatctttgtgttgtttattttgaagaaaaagacttattaaaagctgaaagatgccttcttgaaacactggcattagcaccacatgaagaatatattcagcgccatttgaatatagtcagggataagatttcctcatctagttttatagagccaatattcccaaccagtaagatttcaagtgtggaaggaaagaaaattccaactgaaagtgtaaaagaaattagaggtgaatccagacaaacacaaatagtaaaaacaagtgataataaaagtcagtctaaatccaacaaacaattaggaaaaaatggagacgaagagacaccccacaaaacaacaaaagacatcaaagaaattgagaagaaaagagttgctgctttaaaaagactagaagagattgaacgtattttaaatggtgaataacattaatatttatcgtgacaatggtatcaaagaacatcaatccgtatcatgtgattgcttttactgggagctttgaaaaaaagttcaagggttcctaatggtcaatcatgagctgccttgaagtaggatcaaaataagattttcattaaagacctgtattatcccaggatgtatattatgtatcgctgttttcagagtgtgggtgaatatagcagaaatattacagcggaagtgacaaatttacaacttttattatagaaagaaggtgtttctggcaatgtaatctttactgctctcaattaaaaataattttgaggcctgaatgataatcccttgaggacaaatccaacatgtgctggtttattctgttaattcccatttatttgcctacttcatttttcttgcacctcttagaatctaactatgaattgaaaacacttaagtaattctgtttaatcaagggatttacactacaaaagaatgctggctttttttatgttgtattccttagttgagttttagaaggaatgcttgatgaaacattttaaaataagtcatgacatgttagcttgagaatgtattttcataattgtatacttgtttttaactttaaatgtaatttttaatcaggtaaagtttgacacatgtatagctacatacacacatttttaatggtgctcatatatactgtattttttgttgtttagttttacttattgagagtgtcacaacatgaatcacataatcatgattttttttttttacttttactccccaaattattcatgtttcttagatcgtagtcattgagaagtcccaataactctaaacttttgagttataacgtagtaaacttctctttcatctttgtgttagctctgtagtcttaacctggattttaatttttttgtttccaaagtcacaattgaattattcttagataccttaagccactgaattcagttctgtttgactgaaagcaaaacaacgtgacagtttattttcaaacactaacttcttgatattttgttatggtatatctttttattaaatatttattttgactaagctttcataaaatatttgaagctattttaatcatcaagtatggaaaacaaattactattgcattttcctatatatgcatatattatggattaaccagaattgtatcatttttggcctaatgtctggatataaaagataattagcctactatagtattaataaatttttcagttggtttgggcaaatttaaacctgaaaaataggttaaaaagtagttacaaattaaacttactaatttatacctgattttttttcttgaattaaagtacattttaaatgagctttataataccttaaaaagttggttctaatttaaaatatgaaagctctggctatcatcctgggatagtaatttctaattatatagtatttcaaaactatatattttttagttcctttgagataactaatttctaattatatatgtttcaaaaaccatatcctgtattttttttaagaattgttttataaataggtcataagatacaaggtctgcattagaagacccactcttactaggttccctaaggatctgccatagatttttttttttttttttttttttttaggtagtttaaagcaagcactgataccagtgggagttggtcttgatctaggagattctgttaagcatccaaaaacaatgcctaatttcagttcttaggttatggcttgtgactccagataaaagatggagaatacctcatgtactgtgacttgaaaatgaattcttaaaattcttaggctctctccatgtatctttcttaaggaaaagtttctgagtgtgatctctcttttgccatagtatcaagtggagggtagttcagaaaagttaataggaaatcttttgtgacagcagactataatagaagtttgagtaatattttaataaatttatataattcaaatgataaaaatgtatcaatgttatccaatgatttttattaaaaaattaccttattattagaactgtgcctattacataaaaagtgctcatgtatttgaattttaaataatttatttaaatcaagaccaccataagtcattaataatttaataattgttttaaatcagtggttttcaaccctcacttcatattagaatcatctgaggacttttaatatggaatccacctcataacaattaagtctaaatttctggaagatggagccatgcttgtttttccaaaagctctttgagtgattctaatttgtagtcagagttgaagaccactgctctaaattagtgcaggaaaatgcttttatttctcccatgttaacttttaaaactagtaatgtacccagttaagttttgatggtttaaattccactaaagaacatattcttctaataactagcatttattacatgaaatttaagagtttaagttccatcaaactagcccttgtgtaagattattatttcttctctataacttcaaaatagatatttcattcaaactgttcaggtgagaaaacataatggatttttttttttttcctctggagctgcctgttcagtgagatggaggaggtgggcacatttaaggtcagttcactaacctatggttcagagttctgatcatatggaagtttggaaaagagagcttatcacaggtttgtatgctggtgaatggatagttttaattctcactgtctcaaaagagaatcagctctccagcagttctagaaaagctttgacaatccccaaggggcagtgttaccttactccttcactgcttcttagaaggtagaattaagtttctggaattgcacctacatgttttcttattaacattcagaattgggaatattaatttttccagtgagtagttttctgaaattggtaacttggagagtaaaataacgtattttgcttttcaattttgtgtttgtttacttttatgtaaaaatttgatatgtgaattacacagttctaataaaacctcatgccttttcattacatctaatttgaactctcaacttcatgttacagaatgctttaaagatgctttaatgaaaagtattaagaaaatatatagatttgtatgtcagtttatacttcagaaatccatatatttgtcatatttatttttttagaaacctcctaattggataactagatggtatttaaaatgaatgcccaaaaatatcttgtacctttgtccaaaagtttatctgttggaagccgccagccattcatgtagagagtttataagaaaataatttaaaattgtatgcattttatattactatggtatctgtgtaccatatttctaagtattcattattaaattggtacttcttaaaaccataacctggcttgccttttagtgttaaaaaaatacaacattgtatatagagatttcttttatgaagaagagctgacgtaatttattagcagtgatctgagaaagacattaaataagtttctgagagtgatacattttcaaacatgaggagtgacaaccaccaaattaagaaaaggaaacaactcagacttggaattttatacgaatttcatttctatatgtgcctggtattgcctctggcataacttagaggaaattgttctacctatatgtcctcagtttcttcatctacaagttgggaaaaacattttcctcttaaaattgtgaagaggatttatatatttatatgatatattgtatatattaatatatttaaattgcttagagtttctagcacatagcaaataataaatattagttattagtataaacataaggcttaaagtcttggatttgatgcatatgacttaatttgtatttgtgctagtagctgtaatgtcagtgacaggataacaagcaaatgattagaaatctaatagtaatgcttgttcctttgctatctatgctaacaagtacatagatagcctaagataaattatacttaggatgaagctaaaatgcataactgagacaccttaaaattgtactaccttgtgctgttcactgccatcagggaggtagcataaaatgaaagataaagtctgaagactggatccaggcaaattcatgttctttctttgtaactcactttcttcgtcaacatttctgtgactcaatggatagcatatttccatcaagtagcacgtataacgtgatgctttcatgtttctgccttaaataaaataaccctcaaaaaacca

SEQ ID NO: 1094 - DNA, 3372 bp, Homo sapiens
agaacagtgacagcgccgcggcagccgaccccgcctcctcggcggacagcgatgctcagctggctgcggccgagtcatcgcctagcgctggcagggccgctgaccgaccgacggaggcgccgattggccgattgtccactgcgcagaaggagcagctgctccgcgccccgccgcgccgcgctgaggccgaggtccgcagggccgcggggaagccgagggctgccggagaaccctgcaggtgtcactcgggacgcggaagtgcgcttgccgaggtttgctttacaatacgcttgagactccccgacaagcgtaatttggtcgagttcgacgggaaagtactctccccaccccagcgccggccgcgtagtccgaggttactgtccccggcgcgtcctctgttgccccagtccagaggctgcccttgaacccgggcgcgcacgagcgcagggcatccgaggcgacagcccctggcacggcccgacctgtacccagcctggcaggaagactgtaatcgtgggaatacagctacctacccaggcaatatgaagattttatttgtagaacctgccattttccttagtgcatttgctatgactttgaccggtccactgacaacgcaatatgtttatcggagaatatgggaagaaactggcaactacactttttcatctgatagcaatatttctgagtgtgaaaaaaacaaaagcagcccaatttttgcattccaggaggaagttcagaaaaaagtgtcacgttttaatctgcagatggacataagtggattaattcctggtctagtgtctacattcatacttttgtctattagtgatcactacggacgaaaattccctatgattttgtcttccgttggtgctcttgcaaccagcgtttggctctgtttgctttgctattttgcctttccattccagcttttgattgcatctaccttcattggtgcattttgtggcaattataccacattttggggagcttgctttgcctatatagttgatcagtgtaaagaacacaaacaaaaaacaattcgaatagctatcattgactttctacttggacttgttactggactaacaggactgtcatctggctattttattagagagctaggttttgagtggtcgtttctaattattgctgtgtctcttgctgttaatttgatctatattttattttttctcggagatccagtgaaagagtgttcatctcagaatgttactatgtcatgtagtgaaggcttcaaaaacctattttaccgaacttacatgctttttaagaatgcttctggtaagagacgatttttgctctgtttgttactttttacagtaatcacttatttttttgtggtaattggcattgccccaatttttatcctttatgaattggattcaccactctgctggaatgaagtttttataggttatggatcagctttgggtagtgcctcttttttgactagtttcctaggaatatggcttttttcttattgtatggaagatattcatatggccttcattgggatttttaccacgatgacaggaatggctatgaccgcgtttgccagtacaacactgatgatgtttttagccagggtgccgttccttttcactattgtgccattctctgttctacggtccatgttgtcaaaagtggttcgttcgactgaacaaggtaccctgtttgcttgtattgctttcttagaaacacttggaggagtcactgcagtttctacttttaatggaatttactcagccactgttgcttggtaccctggcttcactttcctgctgtctgctggtctgttactacttccagccatcagtctatgtgttgtcaagtgtaccagctggaatgagggaagctatgaacttcttatacaagaagaatccagtgaagatgcttcagacaggtgactgtgatttaaacaaacaaaaaaaatctatgaatgcacatatcatataccatgacttctgaagactataaatgaattccacaatcagtgcttcactgagaaccaattttacctatcttttcttctaaactgaacagtcagagagacagctcctggctttagcttcttgtggtaccacgcactttgagcactttgtgcgtatcatgcaatatacttgcaatacacagaacaaatttcaaatacgcctcacttttagacttagaagagaaacattaaaacttaagggtgtaaggagggatcaagaaacttgataaggtcaaaagcaataatctctctgacatattccaggctcttacactgagaccaaagagaaatctttacctcagtttcttcatcagcagaatgggtttctggcctctctcagggataattttgaaggcataatgaaaattatgatgaatcactcattggtaggaaaataatgatataagtttcaaatatgtatgattttacctatacttggtaatgctttgttttatagagcctgttaagctgctattgatagtcggagcttatatactgtgacttctgaagactatacatgaattccacaatcagtgctttgttgatacaaaatccttaaaagggaggcactttaaagaatatgtatttttcacttttcttaatatgtttcatcggtgacaggcatgataatatttctatatgtaatgggtaattgggaaaaaatagatgataaataaaattgctctaaagaagttaaaaaactgaatgaacagctaatactggtataaagtaactaatgtttggagccaacatttgttccttgtgtcagcaaaaggatattcacattccatgatccctggctgagaattctgcctctagtctttcttacccagctgttgtctatccttgttcaattataaatactgctaagggcatttttaaaatacgatcttgtactccttaaatttgaatccgtcagcacggtcactcataggaaaatgatcaaacaagcaagccagtcatgatttgactccttcccatctcatttcttactgccttacgctcatcctgaggtccaccttggtctctaaaaacaccatgtgttctcatgcctccatgtcttttcacacactgttccatttgctcttcctcccacattacattgaaactttcaagcctcagtcgaaacattgcttcttctggatagcagccttcttgacatccctcctcactccccagtccctacagggcttccatagctctttgtgtgcacttcgatcccagcattttccatcgacttgtaattgtttctgctacctgacaatcatcgccttgagtactgggacaacctttgattactcattatatcctcaataaatatttgttgaactaaaaaaaaaaaaaaaaaaaaaaaaaaaaaa

SEQ ID NO: 1095 - DNA, 4503 bp, Homo sapiens
cggaggcagcggctgcgccctgcgccggggcggagccgggggcgggccggcggccggcaggcgggggctggggcccgaggccgggagtgcctgagcgccggcggcgacgacggcagcggcggcccagcgggctcggtggttgggtccgcggcggctcggggtccgcccgcgggctgcggtgcgagcgggcggcccggctcccctcctcccccgcccgccgccgccgctgtgattgggtggaagatggcgctggccggatggaaatcctaatgacagtctccaaattcgcctccatctgtaccatgggcgccaatgcttcggcattagagaaagagattggtccagaacagtttccggtcaatgagcactattttggattagtcaattttgggaatacctgctactgcaattcagttcttcaagcactttatttttgtcgtccatttcgggaaaaagttcttgcgtataagagtcaacctaggaaaaaggagagccttcttacatgcttagcagatctcttccatagcatagccactcagaagaaaaaggttggagtaataccccctaagaagttcatcacaagattacggaaagaaaatgagctttttgacaactacatgcaacaagatgcccatgaattcttaaattacctactaaatacaattgctgatattttacaagaagagagaaagcaggaaaaacaaaatggtcgtttacctaatggtaatattgataatgaaaataataacagcacaccagacccaacgtgggttcatgagatttttcagggaacattaactaatgaaaccagatgtcttacttgtgaaactataagcagcaaagatgaagattttttagacctttctgttgacgtggaacaaaatacatcaattactcactgcttaaggggtttcagcaacacagaaactctgtgcagtgaatacaagtattactgtgaagagtgtcgcagcaaacaggaagcacacaaacggatgaaagttaaaaaactgcccatgattctagctctacacctgaagagatttaaatatatggatcaacttcatcgatatacaaaactctcttaccgggtagtttttcctttagaacttcgtctgtttaacacttcaggtgatgccaccaatccagacagaatgtacgaccttgttgctgttgtggttcactgtggaagtggtcccaatcgaggccattatattgcaatagttaagagtcatgatttttggttgttgtttgatgacgacattgtagaaaaaatagatgcacaagctattgaagaattctacgggttgacatcagatatctcaaagaactctgagtctggttacatccttttctatcagtctcgggactgagagggaaccgtgatgaagagacactttctgcctcatttcttctctggttattttggaaaggatcaagcactgatttttcaagaaaagagaaatgcaggaagctcagggggcagtagcacactttgcacacgataaagcaaagacgatggattgacaagcccttccgatcatggtagttgatttatttgctcaggtatcatgctgtctgtacagttccatacaacaaggaggtgaaatcagagataccagctcctcttttaaaacagccttccagtcattggcacgcattttctctttattaattgcaccaataatgctttgaattccttgggggtgcagtagaaagaatcggaatctgtgccgtattgataaggagatgatgttgaacacactgcataaatttgcctggttcagtatgtatagaagcatattcagtggtcttttcaagagtaaaccagaaatacttttgggcccaacacttgcagttgccttcctgatgtaaaaactaacatgctagataatccagtgtcgggaagacaaagatgttttgcttctctgaagaagcttataataatatacagtatatgtatatgtagggagcaattggtcaaaagtggctttttgtttccccaaggggaaagactggctttgtaattataattttttccttatttattttacttaaaactggtagagtctaagtattatatgaagtgcccatgattctgtcagtaaatttgaacatatttttattagttaatgtcagtttaagttgtccttttgtttgtttctatttttaaggtgaattttaatttctatctgaaatcagttaagataccttgagaaaaactgcagtgagaggagataaatatcctttttcaggaggaactgatatctctggctaaatatttgtccttttattatggtttctaaatcagttattttcttcagctttaatttcataaaattaaaaaactattttaaaaattcctgtagttgttggaataattaaaaattctggtgcagtggtggtataccaatctttagaattcttaagtattctaatgtttcaagttgagatcatgcttgggaaaatcatgtcatagcatttatgttattttcagatgccattttttaccctggaaagaagtcataatgttcatcataaccctagcagcctggatagtgagctaaacaaacccttcaaagattaaattttaatcaagtagaccgggaatacaaaagacaagtccttccttcccttccccccacctttacaaatcttactggaagggtgttcagaaattaaaatctgtgtttgctaagacttcattctgttgggggttttaagaagtaatatatgtaacataaaatatatgtaaacgattgcagtttttttggacgtttttccatgcatcagtaagttgtctgacagtagccaaatgtaacttgcagaaaattattgaaaattatattcagaataatagcaatcaggccttggatgttctttattaaactcttttcaggcagtaaatttaaaaaaaattgtcattttctaaagtccttttgctaaaactgttgactatggaaaacaacaaaaaggaattttttagtctgctgctattattaacatttattatctgtatcttttggctcaggaaatgacttcacctattttttccataagcagacctttaacagagtcacttaattgggctgcttaaacagatgttctgggagaaaattataatatttagtatttgtacaaaatatcaaaaagtattttgacaagtttctttttaagatagttcctaaagccttaccctggctagaggtgttttgtacaaattatatataagccagcctgatctaccaacatgccacagagaatcacaatcaacagtgtggggaaagtcagggcagtggaagtggatgcactctttttattttgaaggcttaaaccaaattgtcttggaattaaagctgtatttctgcagctttcggtacagagaaaaagaggaaagtgaagctgtgtcagttttaacattagctatatcaacatgtttaagaaagatagatgaagtcatttgcataaaggtacagcattgaaatactatgttgtgtttgtttttacatttttgcattaaaaaaaaacatgccgtaaaagccaagttaaatttcatattaaagcaagttctagtgtatgtgttgagttcctggtaatcacatacttgttcacatctacaccgtacttcatagtatgatttgtcaggggagggattgtggggtgacagttttacatttactttttcttcttaatgcagctggatctaagtaaaatgttttgaagtttatcagaaactaaatgtacttttaaaacgtatagggtcagggttgggggaaaaatacaggtatagtaagtaagaaaagtgacccatgaagaaagcatcgtgaggttgtatgttggttgactgtgattaaaatgcggggctggtgtaagttgtaagtggtggctgattgccgtgtaactatgtacatgattgttgggatggctgtcccatattttgtatattggaataaaaatttctataaattattgtaactaaaagtaaatattctaaattaagtcccacttcttaagtcacatggcttctgtcttggaaattttacctttaaaagattatttaagacaggaaccaggaggcttgggaacagggaaagagggaaatgttgtattatgtgggtcttggggcctctaaccatcagtatagggttttttctttccttgatggcagtagaaagacctcattttcataacataactactcttgatactttctttaaaaacactttttattaaagattctatcatgaggtatttggctgggagctgggaggctaaagcgctcatgtcctggctcttcagtgaatttaactgtgtgaccttgggcaagtcacttaacctctctgtgcttcagtctccctgtcttgtaaaatgggagtaatacctacctcacagggttgttgtggggattaattagagataatgtctgtaaagcatttaaggttcttgaagaaggcactatataaatacaaaataatatctattaaagttggtttatttgtgcctgtg

SEQ ID NO: 1096 - DNA, 3852 bp, Homo sapiens
agaagttgtcagtgaacagagacggcgctcagtctggggcgagcgctctagtgagcgcggacggatgcttaggcagtagtcctggcagcggcagtagtggtggcagcagaagagaggaagggggagggccccgagggctacacacgctcacactttcaagttcccttggagggagaggaggtggggctgcagaaagaggaggccaggagcggtcccatccgtcccgtcccgtcccgtctccccctcttcctcttgctccttgccccccggctctgcgagagttgagggttcaggtggccgtacgcggcagtgagggcaagagggccgggagagtggggagcggaggcaggagtgcgggggaagatgcccatcctgctgttcctcatagacacgtccgcctctatgaaccagcgcactgacctgggcacctcttatttggacattgccaaaggcgctgtggagttattcttgaagctgcgcgcccgggacccggccagccgtggagacaggtacatgctggtcacctacgacgaacccccgtactgcatcaaggctggttggaaggaaaatcatgcaacattcatgagcgaactaaaaaatcttcaggcttctggactgactactctcggtcaggctctaagatcctcatttgatttgttaaatctcaatagattaatatctggaatagacaattatggacaggggagaaatccattttttttagaaccatctattttaattaccatcacagatggaaacaagttaacaagtactgctggtgttcaagaagagctccatcttcctttgaattcccctctgcctggaagtgaactaaccaaagaaccttttcgttgggatcaaaggttatttgccctggtgttgcgtttgcctggagtggcttctaccgaaccagagcaactagggagcgtaccaactgatgaatctgccatcacacagatgtgtgaagtcacaggaggtcgctcctactgtgtgagaacacaaagaatgttgaatcaatgtttagaatctctagttcaaaaagttcagagtggtgtagttattaattttgaaaaaacaggaccagatccacttcctattggagaagatggacttatggattcatccaggccaagcaattcatttgctgctcagccatggcatagttgtcataaactcatttatgtacgacctaactctaaaactggtgttcctgttggacattggccaattccagaatctttttggccagatcagaatttaccttcactacctccacgaacatctcatcctgttgtgaggttctcctgtgtagattgtgagccaatggtaatagacaaacttccttttgacaaatatgaacttgaaccttcgcccttaactcagtatatcttggaacgaaagtctccccatacctgctggcaggtatttgttactagcagtggaaagtacaatgaacttggatatccatttggttatttaaaagccagtacaactttaacttgtgtaaacctctttgtgatgccttacaactacccagttttacttcctcttttagatgacttgtttaaagttcacaagcttaagccaaatctgaagtggcgacaggcttttgacagctacttaaaaactctgcctccatactacctattaaccaaactagagtcagaacgaatactagcatcagtggggaagaaacctccccaggaaattggaattaaagtgaaaaatcattctggaggtggcatgtccttgactcacaataaaaattttagaaaactattgaaagaaatcacaggggaaactgcacttagactgacagaattgaacaccaaagaatttgctggcttccaaattgggctcttaaacaaggatttgaaacctcagacatacagaaatgcttatgatattccccgtagaggtcttttagaccagctgaccagaatgagatccaatctgctgaaaacgcacaagtttattgttggacaagatgaagattcccttcatagtgttccagttgcacaaatgggtaactatcaggaatatctgaagacattggcttctccactgcgagagattgatccagaccaacccaaaagactgcatacttttggcaatccgtttaaacaagataagaagggaatgatgattgatgaagcagatgagtttgtagcagggccacaaaacaaagtgaaacgtccaggggaacccaacagtcctatgtcatctaagagaaggcggagtatgtccctgctgttgaggaaaccacaaacaccacctactgtaactaaccatgtgggcggaaagggaccaccctcagcctcgtggttcccatcttatccaaacctcataaaacccacccttgtacatacagatgctactatcattcacgatggccatgaggagaagatggaaaatggtcagatcacacctgatggcttcctgtcaaaatctgctccatcagagcttataaatatgacaggagatcttatgccacccaaccaagtggattctctgtctgacgacttcacaagtctcagcaaagatgggctgattcaaaaacctggtagtaacgcatttgtaggaggagccaaaaactgcagtctctccgtagatgaccaaaaagacccagtagcatctactttgggagctatgccaaatacattacaaatcactcctgctatggcacaaggaatcaatgctgatataaaacatcaattaatgaaggaagttcgaaagtttggtcgaaaatatgaaagaattttcattttgcttgaagaagtgcaaggacctctggagatgaagaaacagtttgttgaatttaccatcaaggaagccgcaaggtttaaaagacgagtcctaattcagtaccttgagaaggtactagaaaaaataaattcccaccaccttcacaacaacattagtcacatcaacagcagatcatcatgttagtgcaaagaccagtgagaaaaaaatgacaagttttctgtgctgtaggatggaacaggatattgttgaagcctcctggaatgtttgagtcaagggaattgctttccagatgctaagaagcagcagtggggcttttgaattttatgattatctggcagtgaaagctgggcttttgccttaataattttttaaagtatgaattgttttgttttgttttcctcaattgaggaagctgatgttattaattcacaggctaaattcggtaaacaccactgcccctaccacgggtaatgagaggtcactcacttgaactttgccattccaggcattctcagagtggcgaggggccacctgcaagtggagcacaacttggtgctcttactgtgtccttcagaaagaataggtgtacagaaaggaaatggcaatcttatgtgtgctgaacaaagttttcaacaattcctagttgtgccttttaaaccatgcaatattcaggatagtttgaatcaaagaagtaagaagctgctatttgggtaacttatttctctgtgggaaggggcagggagagtcaccaaacaatctacctccaactctcttctcttttgtctagagacattacaaagtgcacttgaggctgcccccaacctctgacatttgttcttgcatgtgatgatagaaagtcttcagatggacttatacattctgtgctttggaagcacaagaagaacaaaatatgtgtatatttcctttaatgtttatacaaaagtttatatggagcagtattgttatgtttgtatgaatttgcaaaaattaaagtgtacaaagagattttgattttgcatatataaaataaatcattttattgattttcacaagttcattaatgctggataaatttctacttaaaaa

SEQ ID NO: 1097 - DNA, 3296 bp, Homo sapiens
ccggcaccgacaagtgcgctgcaccagtggcaccggctgggggcgagccgacctcgagcagccgccgccgccgccgtcgttgctactgccgcagcggagttcagagggcccggaggtgggagacttcccacacggtgactgagatgtcgtccactgcggctttttaccttctctctacgctaggaggatacttggtgacctcattcttgttgcttaaatacccgaccttgctgcaccagagaaagaagcagcgattcctcagtaaacacatctctcaccgcggaggtgctggagaaaatttggagaatacaatggcagcctttcagcatgcggttaaaatcggaactgatatgctagaattggactgccatatcacaaaagatgaacaagttgtagtgtcacatgatgagaatctaaagagagcaactggggtcaatgtaaacatctctgatctcaaatactgtgagctcccaccttaccttggcaaactggatgtctcatttcaaagagcatgccagtgtgaaggaaaagataaccgaattccattactgaaggaagtttttgaggcctttcctaacactcccattaacatcgatatcaaagtcaacaacaatgtgctgattaagaaggtttcagagttggtgaagcggtataatcgagaacacttaacagtgtggggtaatgccaattatgaaattgtagaaaagtgctacaaagagaattcagatattcctatactcttcagtctacaacgtgtcctgctcattcttggccttttcttcactggcctcttgccctttgtgcccattcgagaacagttttttgaaatcccaatgccttctattatactgaagctaaaagaaccacacaccatgtccagaagtcaaaagtttctcatctggctttctgatctcttactaatgaggaaagctttgtttgaccacctaactgctcgaggcattcaagtgtatatttgggtattaaatgaagaacaagaatacaaaagagcttttgatttgggagcaactggggtgatgacagactatccaacaaagcttagggattttttacataacttttcagcatagaaaaagaggtacttagaagtattgaaggaaaaaatgaagacctaagaaaaaaatatttcatgatcatttccctaagccatttccagaatggtaaaaggtttaatcagtttttattacctcatttttaagcctgtatgagaatgtagaaactatatattatatgtatatttattttaaataatattgtatattttatgtttgtaaattgtttagaaagataattggttatgagatgtaagttttaatttcttaatgtgcatttttgtttctagatcttatacagaaatcttgattaataacatacacagaaatgtacatactacatcatctacagaaatcttgatcaataacctagaaactaggttatctaggttattgatcaagatttctgtagatgatgcagtgttctatcataagtaattctggaatcaaagactattggatacatttggcattgggctgagtgtggtggctcatgcctgtaatcccagcactttgggaggctgagacaggcggatcatctgaagtcaggagttaaagaccagcctggccaacatggcaaaaccccatctctaccaaaaatacaaaaattaaccatgcgtggtggtacacgtctgtcatcccagcagctcttaaggctgaggcacaagaattgcttgaacccgggaggcagaggctgtagtgagccaagatagcaccactgcactccagcctgggagacagagtgagactccgtctcaaaaaaaaaaaaaaaaaaaaaaaatgggaggccgaggcgggcggatcacgaggtcaggagatcgagaccatcctggctaacatggtgaaaccccgtctctactaaaaatacaaaaaattagctgggcgtggtggtgggcaccttagtcccagctactcgggaggctgagtcaggagaatggcgtgaacccgggaggcggagcttgcagtgagccgagatcgcgccactgcactccagcctgggctacagagcaagactccgtctcaaaaaaagaaaaaaagaaaaaaaattggcaatagtcttcactggaatacaatcaattagtaaaagattttttttttttttttgacatgtagtcttgctctgtcgccgaggccggagtgcagtggtgcgatcttggctcactgcaacctctgcctcccaggttccagcaattctcctgcctctgcctcccgagtacctgggattacaggtgcctgctaccatgcccagctaatttttgtatttttagtagagacagggttttgccacgttggccagactggtctcgaactcctgacctcaggtgatccacccacctcggcctctcaaagtgctgggattacaggtttgaaccactgcacccggccagtaaaagaaattttgaaggccattgcagctatttggtagtgtcttgttatttctaggtgtaccttagttaaagaggaaaaataaaacggaaaaaagcttggaaatcagtgatgtgtagttatttggcaagttatacataatcagcagcagccaggctcaagaaaataaaagttgattagttgatcagaaataaaatctgtagagtgaattagatttctgagttgttgttgttaatggaacattctatttgagacctttttcaggtgtgtagcaattctaccatgtccatttttttaagcattaaaaaggaacttaccagttgtaaattaagacaagatccaaatagtcatatttttgtgtttcctctaaaaaaatgtaagatttccatttttggcactgactaactgagcctacatctagattttaaataccatcttgaatcctaataattaaactgatgaaagtgcatatcattgttcctaacatttatgaacccccataaagatgttcctgatctttaaaactcattaatctgagtattaagtagaaacagaattttccaaagcattagacatcactttctcagtttatctgaggtgacttcgtgtacatctgtttctaatatatttgactaattttcatgatctcagattgtgaggtaaatgtaatctggaataataagtgtcttttacctagattacatctctcatttggagtttggcaatgaaactgctatgaagaatgactgtactctcctatctgtccctggatgacataaatatcatttgctttgttgtttaaactgaaataaagttttccaagaacaaaaaaaaaaaaaa

SEQ ID NO: 1098 - DNA, 3642 bp, Homo sapiens
atcattgtattgcacacctctaaaaaaaacactgcctctgatttatcaatataaaaaagatcctctgagaggaggagggcacttttgtgtgatggcaacttcacttctaggggaagaaccgaggttgggatcgactcctctggccatgcttgccgctacctgtaataagataggcagccccagcccgtctccctcctccctctcggacagctcttcttccttcggcaaaggcttccacccctggaaacgctcctcgtcctcttcttccgccagctgcaacgtagtgggttccagtctctcaagcttcggcgtgtccggggcctccaggaacggcggctcgtcctcggcggctgcggcggccgcggcagcagccgcggctgccgcggccctggtgtccgactcgttcagctgcggcggctcgcctggctccagcgccttctccctcacctccagcagcgccgcagccgccgccgccgccgccgcagccgccgcctccagctcgcccttcgccaacgactactctgttttccaggcccccggagtttccgggggcagcggcggcggcggcgggggcggcggcggcggctcctccgcgcactcgcaggacggctcccaccagccggtgttcatctccaaggtgcacacctctgtggacgggctgcagggcatctacccgcgggtgggcatggcgcacccgtacgagtcgtggtttaagccctcgcacccgggcctgggtgctgcgggcgaggtgggctcggccggcgcctccagctggtgggacgtgggggccggctggatcgacgtgcagaacccgaacagcgcggctgcgctgcccggctcgctgcaccctgccgccggggggctccaaacctcgctgcactcgccgctcggaggctacaactcggattactcgggcctgagtcactcggccttcagcagcggcgcctcctcgcacctgctcagccccgccgggcagcacctcatggacggcttcaagccagtgctacccggctcctacccggactcggccccgtcgccgctggccggcgcggggggctccatgttgagcgctgggccttcggcgccgctggggggctccccgcgctcctcagctcgccgctactccggccgcgccacctgcgactgccccaactgccaggaggcagagcggctgggccctgccggggcgagcttgcggcgcaagggcctgcacagctgccacatcccgggctgcggcaaggtgtacggcaagacttcgcacctcaaggcgcacctgcgctggcacacgggcgagcggcccttcgtgtgcaactggcttttctgcggcaagcgcttcacgcgctccgacgagctgcagcggcacctgcggacccacaccggcgagaagcgcttcgcctgtccagtttgcaacaagcgcttcatgcgcagcgaccacctcagcaagcacgtgaagacgcacagtggcggcggcggcggcggcggctcggcgggctcgggcagcggcggcaagaagggcagcgacaccgacagcgagcacagcgccgcgggcagcccgccctgccactccccagagctgctgcagccccccgagcccgggcaccgcaacggcctagagtgacgcccaccctgcgcccgcccctctccccgacctcctcccaccaagtcctcttgggccctgtctgtccggacttcaactccagcctttccctattgcatccgactcgctctctgtctctttctgtttctgcccctcttccttcttccttctgtgacttaactttgtaaaggggatatggacaagtaagtaacacgcatcgctgtcccgggccctggctttccctttccacgggtaacgctgcctgaacccgttgcagccggaacccgcgcctcgtcgggcctttatttctcgttctctcttccttgtcctcccctcctccaccccccaggttgtgaagggcgtaacttttagagggaacggccactggaggtagagctggactaatccagtgcctggtagacagcgggcctcgcgcgggcaggagcggctcggctgacaagcctgagcggagcggtggagagggagaggctggaggcctgggcagaacagcgccgcccgggcagacggctgcttggttccagagccgctgtactgagcacctcggcttcggagcaccctgccaggcccctgggcatcgccggacgtcctactcaggctgtcggggcttggtgggggtgacttttggcagcccgagacccagagtttgtagagtttagatctcccaatgtcagtctgcctctttttctttgttccctgaggtggaaccgatgcaagtttcagcaaagggcagtcttgtcgaatcgctgcagcagctttctttcatctttatagcatatattttatttttaaaaaaactagggggaaaatagcaaccttccatttggtttcccttctataatagttttttcctctaacggggagcaatctttctctcgaaactgctaatattgatcccaaagttactttgactgcattaacttaacttacggggtgggggcgggggtgagggtaggtgcttttttcttatgcaaaaatactcctttccggtgagaccagattaactatctccatgtttgtccttttctacctcgttttttcaccactcccaaacataacctcccaatcttttttgttagtccggccgtcaattgtatagtaccaatttcgtaaattctctcaattcatgaagatcgtagggttaaacttttttgtgtgtgatttaaacttacaaacaagtgaagaagctatcgtttatttcagacgaggctgtagtttaaataccaaaagagggaaaataaaaaagaacctttgtaaaatatatctgaacctaatggtttgtacaactggagaatcgttctagattagttaccaattaaatataactccgccagtgtaagggtgtgaggtgcagttgtccaggagacgattttgtatagtatttttcttgtacattacttccagtaaatatttgaaaatatattgaagtaaacttgattttttttttttgtcacaagaaaatattaagagttattgttgcagttctgatgagctgcaggttttttgaactcacttctggaggtgcagagccacaaacgcactttcggggcctagttttgctcgaatatgaatttagataggtatcaagctgtaactaagacaatattgataaatgttggatgacatttaatttaatggagcatgtacttatttgcatttgctggcagttcaggcatagttaaagtgagagttctcctatatttcataataagtggtctgccaaaacccatgtattaaataaattgtccaagtgaaactcgactaactttggcctttgtgtatttcctgaaggtaatattgttaactgttaataaatacttctgacactacatttaaatgtttgcagattctgcaaactaattgctcattgtaatgttgaaataatttggatatttcacattgaaatgaaaagcctttctctggagcattttagatttgcattttaaatgcatgaaatgtaattgatttatttgtaatattttaaatggtataataaactcagataaaagactaggccaaaaaaaaaa

SEQ ID NO: 1099 - DNA, 4074 bp, Homo sapiens
gacaggcctctcggcgagccggtgccccatcgggtaccgcacggctgccgcggcggccttaccctgccgcgagcgcctgtgacagcggcgccgctgtgctcgcgaccccggctccgggcctctgccgacctcaggggcaggaaagagtcgcccggcgggatgggcggggaggctgggtgcgcggcggccgtgggtgccgagggccgcgtgaagagcctgggtctggtgttcgaggacgagcgcaagggctgctattccagcggcgagacagtggccgggcacgtgctgctggaggcgtccgagccggtggccctgcgcgcgctgcgcctggaggcccaggggcgcgccaccgccgcctggggcccgagcacctgcccccgcgcctcggccagcaccgcggccctggctgtcttctcggaggtggagtacctgaacgtgcgcctcagcctgcgggagcccccggccggtgaaggcatcattttattacagcctggaaaacatgaatttccatttcgctttcaacttccatctgaacctttggtcacctcgtttactgggaaatatggaagcattcagtactgtgtgcgggcagtgttggaacgacccaaggtacctgatcagagtgtaaagcgggaactccaggttgttagtcatgtcgatgtcaacacaccagcattattaacccctgtattgaaaactcaagagaaaatggttggctgttggtttttcacttctggtccagtctcgctgagtgccaaaattgaaagaaagggatactgtaatggagaagctattccaatctatgcagaaatagaaaattgttcctctcgtctgattgttccaaaggctgctattttccaaacgcagacatatttggctagtggaaaaacaaagaccattcgacacatggtcgccaatgtgcgaggaaaccacatcgcttctgggagcacagacacatggaatgggaaaacgctaaaaatcccacctgttactccatccatcctggattgctgcattatcagagtggactattccttagctgtatacattcacattcctggtgctaaaaaattgatgctcgaactgccattagtgatcggtacaattccatataatggttttggcagcagaaactccagcattgccagccagttcagtatggatatgagctggttgacactgaccctgccagagcagcctgaagcaccaccaaattatgcagatgtggtatcagaggaagaattctctagacacattcctccttaccctcaaccccctaactgtgagggagaagtgtgctgtcctgtgtttgcctgtatacaagaattccggtttcaacccccacctctttattcagaggttgacccacatcctagcgacgtagaagagagccagcctgtttccttcattctctgaacgtatttcagaaatcactgtgttcatcatcaaattagaatgttggttcttttccttctgcctttttgggaaagagacaggaaagattcacttgaaaacataaatgaacgtcaagactgaaggcaatagaaattaaagaatgtgagaaagttctggtgggccggcaggattgccgcacaagtttatatgatggtcgtatatatatccctgttaaaaactgggatgaagatgtgcaaagtcacagaatgtaatggaagtcctgatggttacagagtaagtgaaagggtgcctgcgctgacgtgagagaaaggaatctgtaaacagtggaaacactgtgggagtttcccatggtgaagagtggaacgaaggcgatatgaactgaaggggtgaagacttgattttggagagggcaacaaaacaagggtgtgtgtgcataggagaatggcccactccaaatacgaagtgagatcctgagtctttgggtgcttcatgatttcctaccatattcaggcctaaagacattgaaaaagcatcttttcttgagatcatggtcatatgaggtcctaatgaagtactacagttttcattctttcaagggtagactaaaatatagtttataaatcggcagtacggtattatgaaaccaagaaagggtttcttgaaaagcttgtcggttcaaagaggaaagatgaatttcaatgtgaaaacacgttttgttgagggctgtactttttaccccctttaagtgctttaacaggatatacgtttgattttcctcatatcttatttacctaggagcatgtaagagaaagaagggagagaaaaggttgcatctgcaggatgccttgataactacacagtcccaaataaaaggcctttttctaacctacctctaatggggttatcagatatgtttttaaatctctcgccctgagtactcttcttgggagttgctgctgtttacagccacagtctcatctatcactaaatatgaaactgggccaaggggaaaattcagtaagttagcgttaaatggaagtaaatatatgtatacctaagagaatgtcaaaataaacaccaaaccaaaagaaggtaggagtgccatttttagaaaagacacaactttaattcctgtcaagagacctaggtctactgatggcagtcactgcattgtacattattccagttcttcagtaattctgtttaaactgtgattttctttattgtgttggtgcaatattttattatcatttaacctcaggatattcagaccaacaggattgtgttgctgctgaaagtctgagcagtgttttaccgtccccagcccccctcccacatggtcacatgttcacttgcttttccttccatctgttggttttgtgagctgagagcatctctggacacatggaagggagccagggattcctgtgatacagattttgaaccagcagagtactttggttttcttcatgtcctaagggtttgatccagaaaccctggtgcttcccctgcagaatactgtacttcatttaacagaatgattgatttttctttcaatcagcatgttcaccaaaaatagaaaagttcttctaaggttaaattttgtatttaaaagttagttggccatttgatcagggaattttctacacacattaggcaaatgtatgcttttcatcctctgggcttacctctctcctctgcaatcctggaagcatcgtgcatagttctttcattgtaagccgctatttaaattcccacaatgcaaaactgttagaccagtaattgtgctactgaaattgtcacaaaacgttattccttgatttggtttttaaattttgctttcgtgtgtgtgtctttaaacaggtaatgtgtatttaagtgttgtctaaacagttgatttttactttagaaaagatcatcttcaactgtttattgacttctgagttatatagttcatgccctgccaaggcattgttcgactccatgatactaaaacataatgaaagaaacaaactccagtatggagaagagaaagtttaattatttggttccatctagaaaagcaacaacttaaaggaatccttcactaggattgtcttatcacctttattagataaatcatgaagtgtccctgtgaaattgaagtgaaactatctctgtaggacttaagagaatagctaaaaggtgtgacttgccttattgaaatgatactggcatatctgactgtaagcagtaggttgaagatatcattttatgaatgtggagaattctacattgaaacagaaaatacctgggaatgaagattaaaaatgtagctgctgttatttgcttggttattcccctcttgctcttctttagtttgaaaaaacaaaaacgtggccttggaattttcattttgatgcagaaattttgaaattgaaaatgtgcatgttttggtgcacaaaatccttctgtgggcaaaactttgtttttgttttgcacagtaagaaacaataggcaagcgttatgtttttggtaagttaactatgaaagctttcttatttttattattaaaaatgtaacaatttaacccacaggaaaaaaaattactttgtatgcttgtttgaaccctatgggttcgttttattaataaaattattacactaatgctaaaaaaaa

SEQ ID NO: 1100 - DNA, 7680 bp, Homo sapiens
ctcccacctcgatgcggtgccgggctgctgcgtgatggggctgcggagcggcgccctgcggctcgcggcggccgctgctcgcgctgaggtgcgtcggtgcccggccccccgcgcccccgcgcgccgcggctcctgttgacccggtccgcccgtcggtctgcagcgcggctgaggaaacttggctgtaacttcaaaagaagatttgattctttatttctggactgcatatatatatataacaaggccattaaaatgtcgggagcctcagtgaaggtggctgtccgggtaaggcccttcaattctcgagagaccagcaaggaatccaaatgcatcattcagatgcaaggcaactcgaccagtattattaacccaaagaatccaaaggaagctccaaagtccttcagcttcgactattcctactggtctcatacctcacccgaagatccctgttttgcatctcaaaaccgtgtgtacaatgacattggcaaggaaatgctcttacacgcctttgagggatataatgtctgtatttttgcctatgggcagactggtgctggaaaatcttatacaatgatgggtaaacaagaagaaagccaggctggcatcattccacagttatgtgaagaactttttgagaaaatcaatgacaactgtaatgaagaaatgtcttactctgtagaggtgagctacatggaaatttactgtgaaagagtacgagatttgctgaatccaaaaaacaagggtaatttgcgtgtgcgtgaacacccacttcttggaccctatgtggaggatctgtccaagttggcagttacttcctacacagacattgctgacctcatggatgctgggaacaaagccaggacagtggcagctacaaacatgaatgaaacaagtagccgttcccacgctgtgtttacgattgttttcacccagaagaaacacgataatgagaccaacctttccactgagaaggtcagtaaaatcagcttggtggatctagcaggaagtgaacgagctgattcaactggtgccaaagggactcgattaaaggaaggagcaaatattaataagtctcttacaactttgggcaaagtcatttcagccttggccgaggtgagtaaaaagaagaagaaaacagattttattccctacagggattctgtacttacttggctccttcgagaaaatttaggtggcaattctcggactgcaatggttgctgctctgagccccgcggatatcaactacgatgagactttgagcactctgagatatgcagatcgtgcaaaacaaattaaatgcaatgctgttatcaatgaggaccccaatgccaaactggttcgtgaattaaaggaggaggtgacacggctgaaggaccttcttcgtgctcagggcctgggagatattattgatacatccatggggtccctcacttcatccccatcttcctgctcactcagtagtcaggtgggcttgacgtctgtgaccagtattcaagagaggatcatgtctacacctggaggagaggaagctattgaacgtttaaaggaatcagagaagatcattgctgagttgaatgaaacttgggaagagaagcttcgtaaaacagaggccatcagaatggagagagaggctttgttggctgagatgggagttgccattcgggaagatggaggaaccctaggggttttctcacctaaaaagaccccacatcttgttaacctcaatgaagacccactaatgtctgagtgcctactttattacatcaaagatggaattacaagggttggccaagcagatgctgagcggcgccaggacatagtgctgagcggggctcacattaaagaagagcattgtatcttccggagtgagagaagcaacagcggggaagttatcgtgaccttagagccctgtgagcgctcagaaacctacgtaaatggcaagagggtgtcccagcctgttcagctgcgctcaggaaaccgtatcatcatgggtaaaaaccatgttttccgctttaaccacccggaacaagcacgagctgagcgagagaagactccttctgctgagaccccctctgagcctgtggactggacatttgcccagagggagcttctggaaaaacaaggaattgatatgaaacaagagatggagaaaaggctacaggaaatggagatcttatacaaaaaggagaaggaagaagcagatcttcttttggagcagcagagactggacgcggattctgatagcggggacgattctgacaagaggtcgtgtgaagagagctggaaactgattacttctctgagagaaaagctacctcccagcaagttgcaaaccattgttaaaaaatgtggcctcccaagcagtgggaagaaacgtgaaccaattaaaatgtatcagataccccaaagaaggcgcttgagtaaagattccaagtgggtcacaatctcagatcttaaaattcaggctgtcaaagagatttgctatgaggttgctctcaatgacttcaggcacagtcggcaggagattgaagccctggccattgtcaagatgaaggagctttgtgccatgtatggcaagaaagaccccaatgagcgggactcctggagggcagtggccagggacgtctgggataccgtcggtgttggggatgagaagatcgaagacgtcatggccactgggaaaggcagcactgatgtagatgacctcaaggttcatatagacaagctggaagatattttgcaagaagtcaaaaagcaaaataacatgaaagacgaggagataaaagtcttaagaaataaaatgctcaaaatggaaaaagtcttgccactgatcggatctcaggaacagaaaagcccaggaagccacaaagcaaaggagcctgttggtgctggtgttagtagcacctctgagaataatgtaagtaaaggagacaatggagaacttgcaaaagaagaacgtgtttcccagctgatgaatggggatccagcttttagacgtggacgtctgcgctggatgaggcaagagcaaattcggtttaagaacttgcaacagcaggagataacaaagcagcttcgtcggcagaatgtacctcataggttcatccctcctgagaaccggaagccccgcttcccctttaagagcaaccctaaacacagaaactcttggagtcctgggacacatatcatcataacagaagatgaggttatagagcttaggattccaaaagacgatgaagcaaggaaagggaataaagaagagagccaagaaaaagggggtaaaggagcttttaaggatccccagtttccatggggctctcaaggaatgagaagtcaagatcacatccaagttagcaagcagcacattaataatcagcaacagccacctcaactacgttggagaagcaattctctcaataatggccagccgaaaagtacgcgctgccaggcatctgcctccgcggagtcattaaactcccacagtggtcaccccactgctgatgtacagactttccaggcaaagcgccatattcatcaacaccgtcagtcttactgtaattataacactggaggtcagttagagggcaatgcagccacttcctatcagaagcagactgacaaacccagccactgtagccagtttgtgacacctccgcggatgaggagacagttctcagcacccaatctcaaagctggtcgagaaaccacagtataaatcagttactggacaaacttgaaatcatggtggaagaaacagacagtgttagctcatgatttgatttggttctacctttggccttgagttcttattatttacattataaatattaactggttttatattgttaagacaaaacactggtaaaagtttcaacacctcccttttgcttgtataccataaatgggcagtttctgaaattttggataaagcatcaagaactcctttttctgaaacgttcctccttttttagtgcctaattaatatacttacttacacagacttgtcccatcttgatgtaagtttgttatgtttttataatgcctataaattaatctgacatccagaaagacctgcctcttagtttatgcagacattcaaaaggagaatttgataagcagaattaaatgtctgttattcataaatgttagaaattggtttaaaaataataacatgcaactgggtgggcacagctttggatttctcatccacgtctgttcccttctttaaatatgattagaattttcgtaagccaaaactaaaggtcttcaaacatatcttgcaatacatagctttgcatcttccacacaacttccacgtcttcttttattctgtattttacaaaaaactcatataatggttttttcttttgaatgtatcagaatatgtatgaaatttgtcatatcagaatctataaattggcactgtgtctgggattctgtttgtggtttgcattttgaagttcaatgtatcatttgacacacatgcacacaaagtgaactattcaccaaaatcatgccaacagaaataccaacaaaaaacttgtgtagcttgtaaggaggttatttggcttgagagggaagaggtgggacagacatgggggacaaagctacagcatatggctctgtggtgctgcttttttccaatagttgatgaaatagtgaaataaaagttaactttggttgggcttggaataaaggagatgatacataataaactattctttggttagcattagtaatgcttgtagacactcaaacaaggaaggcgaagtcctgatgatgatttattgtatcaatacctcattttatttggttgtggtctcagtttgcctcactggagaatccactaagaaagatggattttaatgggaagaaaagaattattttctacatcgttcctcatctcttgagtttgtcaaaaagttttctaagaggcagtgtgaagagccagagatgtccgaaattgcctgacttcatgttttggaagattcctaagtcacatgaaatcatctatcaaacacttgtcttccaaacggtgtgaaaaactacagccaagatagcagttagcattcaaggaagccttaaagattgtgattatgtttttttttcctttgcgtgtgggcactatgctttattagaacacattatttttaatcatagtattttttctttgcctctaagaaaatactttcttaatgctcagaaagttgcttccaattaatgtttttttccccttaaaaagagaagctttgagagatatttttgctttcatagctagaacagttgaagtcttcaactgaggttttatagcagattagacatgggtaaatgatgtctgtaatgggttgagttactgagatgacaatctcctgtgccatttggtttgaatgtacttgataggctgcttcaaatcagtcacttcaatgcattttgtgtaaacccagttgtccttttttattcctctttagacataaatgtgctaactattcctttctatacacaatttattttctaagattaaaaataataattgctaggtttggtggcacatgcgtacagccccagctacttaggaggctgaagcaggaggatccctagagcccaggagttctgggctgtggtacactatgccagttgggtgtaagtttggcatcaatatggtgatgtccctgaagcaggaaaccacaaacttgcatcaggacgggtgaacccagcccaggttggaaatggagcaggccaaaactcccaggctgatcagtaatgggatcttgcctatgaatagccagtgcactgcagccaggacaacagagtgagaacctgtctttaaaaaaaaaaaaaaaaaaaaaaaaaaaggtaatatttattatattattcaggtttcaactctgtagcaaaaatgggctctcatttccctaacttgagataacatagggtaggtccatatattttcattcttacagtggtcttttcatgggagtgaatgagttactctccactggtgattaggtaatactgtagaatgaagagttgtataatatattcatttacagctgtggattgtggtaaggactatgtccacagtgatattccaaagaattgggtttatatttgtgcttcatctgttaatcccaggtgtcctcatgttgctgaaatatttagatagctaaaatatcccttaatttcacagatgaccaggaagaaattaaccaaggttttattgactgccatgtatgtcccatgatgcatttctgagcaaatgcttatcctagagaataactctgtatgaataaaattgcttaattgagtctcttactaaataagtaactagtgccatgcttttgtgagctcttggtatggcccatattactttgttttttgtttttgttattgttgttttgtgatagtcttgctctgtcgcccaggctgcagtgcagtggcacaatctcagctcactgcaacctctgcctcctgggttcaagcaattctcctgtctcagcctcctgggtagctgggactacaggtgcatgccaccatgcctggctaacttttgtatttttagtagagacagggtttcaccacgttggtcaggctggtctcgaattcctaacctcaggtgatccacctgccttggcctcccaaagtgctgagattacaggcgtgagccaccgcgcctggcctgtttgtttttttaacatgatttttctctaagcttaaataccacaaggccaaagagaaatggtcataatttaaaccattattatattgttgaggtatccctagctattattatagcaaagtgggaaaaaagtgtttattctattgaagttatgtaatgatccgacattaatgggaatatagaggagtcctaattaattggtataatttcacaaagcggaatggtattccttggagagttaaagacattctctttagtaagtgtaaaccaaagggcattttctttattcctgcttctaattccttctagcccagtgaattatttctcttttcactggtaatgtgatgaatgggaattgtttattacattgaagtgacttgaagtgaccttttgtgctttaggtgcaggttgacactgaaaaaaaaacaaaacactgaatttttcacacctatgtctgcattaaaggctgttttactaccggaagttacatagacttcctgcagtcagctgctgtgccccagtgccttactggtcctttgtagatttgccttaatgatttgtacaaatgactgggaggcggggatgctgcctgtgtcctggtgaaccttaatgaaggggccgtcttaggcacagtgcaaaacaagcatttgtcctgtactgttagagccaaaattgtgatgagcaatactgataattgtccagtttatgtcatctttcccagattttaaaatctgttctagatattcttagcttgaaccacttttgattgtgaaatgtattaggtgttgtcccattattactgtaaaatgaagttttgaatcttcttgttaataaactgtggatttcccctctcaatttcttaaacaacaacaaaaaaatgcttgaagattgtctttgagtgtaagatctgccttttcagaaagggagtgttagtttgtaatgttaaaaaataaagacctcattcaataaaagttgaagtcatcttttaaaaaaaaaaaaaaaaaa

SEQ ID NO: 1101 - DNA, 4318 bp, Homo sapiens
ttctgctgccgctaggggtagcggcggcggcggcggctgcggctcgggagcgcggctgctttgagggctcgggaaccttacagagtggggacgtggggaggctagagggtgagaaagctggcgggagagtagggcggcgctggaggagggcggtgcgtggctgactcatcctctggaagatcagactgacagagacacacactagcccgccccgcccgcccgcgccgctcctcctcagccgggaggcgcccgcccgcaccgaccgcccgccctctccgggcgctgtccgggcccggccgtctcagagaaagtttttcccatcggaggggcgggagccgccgcgggccttttggaaaggaagtggggacggaacaggaggcgagagccgcgcgggcccgcggagtgcatggtgcccggcgcctcggctgcctggcaggaggacctcggggcggggtcgagctgagcccagctccttctcgcctcagccgcgccagaaaccgccttgccggacggccgcgggggtcccagctcctcagctcgccatgtcccggctgctgccgctgctgaggagccggaccgcgcgcagcctgaggccgggcccggccgccgccgccgcgccccgcccgccgtcctggtgctgctgcgggcgggggctgctggcgctcgcgccccccggcggcttgccgggcggccccaggcggctgggcacgcaccccaagaaggagcccatggaggcgctgaacacggcgcagggcgcgcgcgacttcatctacagcctgcactccacggagaggagctgcctgctcaaagagctgcaccgcttcgagtctattgccattgcccaagaaaaattggaagctccaccacccaccccaggacagctgagatatgtattcatccacaatgcgatacctttcatagggtttggctttttggataatgcaattatgattgttgctggaacccatattgaaatgtctattggaattattttgggaatttcaactatggcagctgctgctttgggaaatcttgtgtcagatctagctggacttggacttgcaggctacgttgaagcattggcttccaggttaggcctgtcaattcctgatctcacaccaaagcaagttgacatgtggcaaacacgtcttagtacacatttgggcaaagctgttggggtgactattggctgcattctaggaatgtttcctttaattttctttggaggaggtgaagaagatgaaaaactggaaacgaaaagttaatcctcttagaatacctataaaaagatgtaaactaatgtacctcagtaattaaatatgctgtcacaacatttaggaattaagacagtaacagtatagatatgggatcaaataatttagcatgtattatggaaaacactaacttattgtggcttgatcttcttaggacatcttttttaaaaagctgtttagtatcattttgtgtatattgttgaaatgctttttcatcaatagcagtcaacattttatcctttctttttatattcataatgttatttaagtgtcattgatgtactgtattgacttggggtttgcttatttgttacttaacatgtgtacatgcatgaaagcatttttcgttgttccctgatagttacatttcaaccttgggatttttccaaattacttaagatgtttaatgtcagttaaagatttttttaccctctttttgggaacatcaattttgtactgttatgcagtaaacatttataataatataatttcagtcatttcttaactgtcacatctattgaaaatggatatagatacaggttttaagtattttaagtatatattacttattttaattttctgactttactattttaagggccagagggttaatcacaaagagcaattatgtggtctccctgctacatgaaaccgtgtatactaacaagcgtacaatttttagttgattttttttaaccttttagtttcccagttttgaataattacatggtggattctgacttttgaggggaagcaaatgattattttagagtctttgaaatggggattgtggaattagattgaactaagggatttaacatgatgcttggaaattaagagactaaagctttttttaaaaaaaggtggaaaataggaactgtcaagaaggtttatggtataaatgatgaagttgaagtgatgtttgaaagattaatgagatacaatttatattatttggtaaggtttttttttttccctccaaagatgtcatcttctcatctgaatggaataagtctgaataccccatattcatactcctaatctcattatatcttatttagtgaattttatttatgaataatttctgttgaagtgaaaactagatatttaatattttgcttttttgctacatagtctactcaaaaattacatgaggagaaatcctttttccctttgtttttcttttttcttcttttgtggtatttaaagcatattttaggttgaagttacttatttctagtcttgtacttctggcttaagtataaccatgtaagaattataaattttagttttctgaacccttaaacttttttagcatgtggtctgttacacatgctaaaaaattagtcttacttgtaacagcgtaattaaacacatcatggaggagagaaacttaaaattaaaatagtattttggcttttgaagttatttgtgttgctaaatagatgcagaggttttacagcagtttattttaaggttttatttatacataattactttgaactcttcagagtagatattttttcacaaggcagtttgtcataaattctctcatgcgcttcagaatgcataagtgccatcctttaatcatagactttgaggagagaaagcataaaaatatagcatataatctaaaaataaatatataacatgcacaaataatgtgacattcttactgaatcaaatcatgattctagaacttgagatcttaaatagaatttcggtttgtatcttccatataataaccacacacagataaccacacaaaaaatcctttgtaaaatttctgattgataggattagagtgcttaaatttttggggggggaagggtggggtaaagtgtaagtgctttcttttgtccctaacttgtgtattgatggcagtccactctgttttctaaaaatgtattttactgtggtgcttaacttcttattaattaaatcccgtatcagaaaccttgcctgtgactttagaaagggcttttgattattgttttttcttcttgctcttgaaagtaatctggtcccagggaattactggtttaactgaacatctccagaattatttaaggtgtcaaaatatataaccttcacattgaaagataattttaatttatgggcataataaaaatttgaatcattcaggtaattttcaaaaaatggagaccatttgtctttaactgaaggtatatgtttaagatcatagtctaccctagtatggtgctttgccacaaagtgatttctgaagaatggttctttttaagataatgacttcatatgatcattgtttcatgttacttgccacaaataactttaatttaggttgaaactggaactgtttgtttctcatattagctacttctctattaggagcacaagaaccatagttaaatgcaacatgagctactttagtcctgtttgtttaaatttgtgttgtccatgtattatgatttattaacttgttgatgcatgtaaattgggtgcattttgttgccatgtatgttaaatggtgaccaatgtttttacaaaggaattgaacaaaaaaagtatcttttaagaaatttggaatgtggttttgattttgaaatttgatttcttactaatctcagagggccttggtatattctgttactaaagcaaacaggattaatgaatacggatttgttacaaggtggcagcaatgtcactgagatagtgaatggaacaatttaccacctccctggaatctgcacctgagatacaacatcagcgtatgagtgaagagtgagcccatagaaaagctttagatagactcacataagtcacactgatgggtatttacagcagatatatccaagctgtttatgtaatagtctcatttactttattctttttctctagaacataaattttgaaggtaatggaagtttatcttttataccaaaagtttgtatgagccattttgaagtaaatctttctaattttagaattatattttctcgccatcttaagacagtatattaaatataatataacctttttcttagtggctaaaaaaaaaaaaa

SEQ ID NO: 1102 - DNA, 4001 bp, Homo sapiens
ctcctccttcccccaaccacccgcgcagtcacaaccggttcagactggccggggtgccccgcaaagagagacaagggagaaaaagacagcagggaaaaccccggggaggagaaggcgaaagagaaggtggagctcagagaagggggccggctccccagctccatgtggccgccgccgctgcgggtctgtgggggcagagggcggcggctcccggggcagcgcgtagcgggaccgattgcctaatactccggcaggggccggggccgcagctggctcggataaatagccgcccggctggcccggagctgcaggggagagcggcggccgcgatccccaccacaccaccagcccggccgcacggggcactgagccgggtgctgagcaccggaggccccgccgaggccgggactcaggacctgcagagaaacgcctcctgattttgtcttacaatggaacttaaaaagtcgcctgacggtggatggggctgggtgattgtgtttgtctccttccttactcagtttttgtgttacggatccccactagctgttggagtcctgtacatagaatggctggatgcctttggtgaaggaaaaggaaaaacagcctgggttggatccctggcaagtggagttggcttgcttgcaagtcctgtctgcagtctctgtgtctcatcttttggagcaagacctgtcacaatcttcagtggcttcatggtggctggaggcctgatgttgagcagttttgctcccaatatctactttctgtttttttcctatggcattgttgtaggtcttggatgtggtttattatacactgcaacagtgaccattacgtgccagtattttgacgatcgccgaggcctagcgcttggcctgatttcaacaggttcaagcgttggccttttcatatatgctgctctgcagaggatgctggttgagttctatggactggatggatgcttgctgattgtgggtgctttagctttaaatatattagcctgtggcagtctgatgagacccctccaatcttctgattgtcctttgcctaaaaaaatagctccagaagatctaccagataaatactccatttacaatgaaaaaggaaagaatctggaagaaaacataaacattcttgacaagagctacagtagtgaggaaaaatgcaggatcacgttagccaatggtgactggaaacaagacagcctacttcataaaaaccccacagtgacacacacaaaagagcctgaaacgtacaaaaagaaagttgcagaacagacatatttttgcaaacagcttgccaagaggaagtggcagttatataaaaactactgtggtgaaactgtggctctttttaaaaacaaagtattttcagcccttttcattgctatcttactctttgacatcggagggtttccaccttcattacttatggaagatgtagcaagaagttcaaacgtgaaagaagaagagtttattatgccacttatttccattataggcattatgacagcagttggtaaactgcttttagggatactggctgacttcaagtggattaataccttgtatctttatgttgctaccttaatcatcatgggcctagccttgtgtgcaattccatttgccaaaagctatgtcacattggcgttgctttctgggatcctagggtttcttactggtaattggtccatctttccatatgtgaccacgaagactgtgggaattgaaaaattagcccatgcctatgggatattaatgttctttgctggacttggaaatagcctaggaccacccatcgttggttggttttatgactggacccagacctatgatattgcattttattttagtggcttctgcgtcctgctgggaggttttattctgctgctggcagccttgccctcttgggatacatgcaacaagcaactccccaagccagctccaacaactttcttgtacaaagttgcctctaatgtttagaagaatattggaagacactatttttgctattttataccatatagcaacgatattttaacagattctcaagcaaattttctagagtcaagactattttctcatagcaaaatttcacaatgactgactctgaatgaattatttttttttatatatcctattttttatgtagtgtatgcgtagcctctatctcgtatttttttctatttctcctccccacaccatcaatgggactattctgttttgctgttattcactagttcttaacattgtaaaaagtttgaccagcctcagaaggctttctctgtgtaaagaagtataatttctctgccgactccatttaatccactgcaaggcacctagagagactgctcctattttaaaagtgatgcaagcatcatgataagatatgtgtgaagcccactaggaaataaatcattctcttctctatgtttgacttgctagtaaacagaagacttcaagccagccaggaaattaaagtggcgactaaaacagccttaagaattgcagtggagcaaattggtcattttttaaaaaaatatattttaacctacagtcaccagttttcattattctatttacctcactgaagtactcgcatgttgtttggtacccactgagcaactgtttcagttcctaaggtatttgctgagatgtgggtgaactccaaatggagaagtagtcactgtagactttcttcatggttgaccactccaaccttgctcacttttgcttcttggccatccactcagctgatgtttcctgggaagtgctaattttacctgtttccaaattggaaacacatttctcaatcattccgttctggcaaatgggaaacatccatttgctttgggcacagtggggatgggctgcaagttcttgcatatcctcccagtgaagcatttatttgctactatcagattttaccactatcaaatataattcaagggcagaattaaacgtgagtgtgtgtgtgtgtgtgtgtgtgtgctatgcatgctctaagtctgcatgggatatgggaatggaaaagggcaataagaaattaatacccttatgcagttgcatttaaccttaagaaaaatgtccttgggataaactccaatgtttaatacattgattttttttctaaagaaatgggttttaaactttggtatgcatcagaattccctatagatctttttgaaaatataggtacctgggtatcacacatagaacttttaattctgctggtgtaggctgttgcccaaacatctataattttactgagctcttcaagtgattctgataacacagcctggattgagaatttttataagattggcaatggaaaaacatttattcttttaaataataatttttttaaaacccaagaggtcaggggattttataaaccaatagccaagtgttctttaaataggaggcacccttcccattgtgccaaaatcatcttttcatttattttgaaatttgtatgattattttatacttgtatgttgcctttcttcgaaggcgcctgaagcactttataaacacaaatcctcacaatacctctgtgaggtaggtaaatagtacttttctatgtagtaaacctggaatatggagaatttcataacagttcattctacttaataatgcaataatggagctccaagttgtcttggacttctacaccacactcagacttctggaaagttttctgtacctcattctttagtccctgtcaaggttagtaaataaaataagtgacataaaaaaaaaaaaaactaaactacttgttgtgttgaaagttcctttttgccagttatgttcaggaaacccaataacctgaaaaagtttgactttgatgtgacatcttcatattcatcaatgctgataattgtccaaaggcatcttcactatgtctgctaaataacatccaatgtgggcgttatctgttgtctaggggatgaattttaagttacaataaaatatttttctttgttttgcaaaaaaaaaaaaaaa

SEQ ID NO: 1103 - DNA, 3246 bp, Homo sapiens
atgcgcagaggggggcggtgtactgcgcatgcgggaagatggcgggccgggcgacttgagatccgcgggtctccctcctctttttccgtctgcgtcgggagctcccgggcacgtgaggccgtgccgcgtttactggcgggcgggacggcctagccgggcggcgcctcggaggaagccgcggaccccttaggtgctgggcccttggaaatcggcgcgtggggggcggtgctcgagctgagcgcgagagggcgggagagctcgtggggtgcgaggggagcaggacgcccggccgggcagcatgagtcagcagcggccggcgaggaagttacccagtctcctcctggacccgacggaggagacggttcgccgtcggtgccgagaccccatcaacgtggagggcctgctgccatcaaaaataaggattaatttagaagataatgtacaatatgtgtccatgagaaaagctctaaaagtgaagagacctcgttttgatgtatcgctggtttatttaactcgaaaatttatggatcttgtcagatctgctcccgggggtattcttgacttaaacaaggttgcaacgaaactgggagtccgaaagcggagagtgtatgacatcaccaatgtcttagatggaatcgacctcgttgaaaagaaatccaagaaccatattagatggataggatctgatcttagcaattttggagcagttccccaacaaaagaagctacaggaggaactttctgacttatcagcaatggaagatgctttggatgagttaattaaggattgtgctcagcagctgtttgagttaacagatgacaaagaaaatgaaagactagcatatgtgacctatcaagacattcatagcattcaggccttccatgaacagatcgtcattgcagttaaagctccagcagaaaccagattggatgttccagctcccagagaagactctatcacagtgcacataaggagcaccaacggacctatcgatgtctatttgtgtgaagtggagcagggtcagaccagtaacaaaaggtctgaaggtgtcgggacctcttcatctgagagcactcatccagaaggccctgaggaagaagaaaatcctcagcaaagtgaagaattgcttgaagtaagcaactgatggcatttgagaatttatgtatcactgagttttttgggaatatcttcgtggagaattacgcatcaaatttgattctcagagcaataaattatccatgaagtgctctcgttctcagtagcggcatcatggccagtagtgtctttgaggagttcaccacttagattactgagtaattgtggtttccacatttgaaaacaactccttttataattattcactgctttttgtcagtgaaatagacatcttgcctcctgaagtagcttcatcacagagtgtcatgaagacagacagtcaggctgaaatggacagttctttgtggactctacccttcccttcaaggagtatgtcatatatcacaaaagaaattgccttacactggttcatgtttgcagttactgttgtacattgcatagatgtacacacgaatttaaatgtgatgtctttgtatatatctgtataatgttgagattacttacgaaatatgtctgagtgacacttttcacccttgtacagccaaaataatgtatatatggaaagtgacagacaaattctctaatctctttggtacctataacttattagaatcctctggatgagggttagaagagactttttccaaacttctacatgtagaagtatcataaatgtgctacacatttatgtttgtggatttaattaaagtattttaatatggttttcagtgctaaaattggagtcagatacttcttggttttaagctgtctacctaattgctgtctcccagcagactggtggcatgcccagtggctttgggggcaaggatagaaatgccatcaggaaatagctgaattcattgtgaaacatgaattcagtcatggtgataattggaaactcctttcaggtttttgcaagtagattttgtaatgtttgtgtatgcagccttgctgttgagtcagtccaaggggttttacttaggacaagttgtaccttgccctctctccagctctgctcccacattttcacatacctagctgtttctacctcattgggtaagtcatttaccactctgtgcctcagtttactctgtagtttaccattagactgtgagctccttgagggactttgtcataatcactgttacatcccagtgcctcacaccatgcctggcccttaagaagtgctcaataaatgtctgaacaaataagtgagtggagtgagtgaattgtaagatcagaataataatatttggtttgtctatcgtacaagattcctgtatcgtttgaatattgcttttaaagaaatatttgaagcgacttcaaattcagactgtgtttaaaaagatttaaaatcggaatccaaaatcaaagtattaaaaaataatgctgagtgtttaggattcacatacctctgagctctggtggcttttgccagtcctgtccctctgctgagcaccagcccttcctgcagcagtcctgccggtgtgtttctgtgcacctggggatgaagtgtgctcctcccccagcggttagcctcaatgcttttcctccctctgttttattatttgaaattagccaaagaaaagctgcagggggcactgctgatcatcactggactggtgggtcgtactgtttgacagaatagggaatacaggaggaggagcaagcctagggtaaaacttaggtttgggacatgcttgatgaaagcaagagttgagcaggttgttgtgtgtatgtaggtcaggtgctcagcggaaaagtctgagctgtgtagtacgtcaggcagatgtcagtttagatgcgatagtttaagccacaagagtaggagaggtcatctaaagagtacagcaggcctaagggcatctatatttaaggagaaatacagaagaagtctcctgagaaggaataatggggcgggtggggagggagaaggcagtgtcccaaaaaccaacaaaggttttaccaaaggtaataccatcatttctgagcagcagttccttaacttgtgaatgtggcaaatgttctcctttacaaattgttctgaaggtaaaatgagatcatgtaaacgaaaatcctttgtaaattacagatgtgtgttataaatgaagtatctctcgagtcactcca

SEQ ID NO: 1104 - DNA, 2802 bp, Homo sapiens
ctgtctggcccctcccctccgcccgtcaccgcctccttgaagctgccgctgtcgctgctgctcgttcgagtcgcagatccttgccagcacattacagaatatttttgttgaaccttcttgagaattcagagaaactgctgagtgaccactgaacgaaaagatctaatcttaaggcttacgcctcactttgatgcccaggctggagtgctgtggctcaatcacagctcatcgcaacctcgacctcccgggctcaagtgatcctctcacctcagcgtcccgaacaggcgtgttccatccaccacatcagaacaatgtcgtatgtttttgtaaatgattcttctcagactaacgtgcccttgctgcaagcctgtattgatggggactttaattattccaagcggcttttggaaagtggctttgacccaaatattcgtgacagcaggggcagaacaggccttcaccttgcagcagctcgagggaatgtagacatctgccagttactgcataaattcggtgccgatcttctggccacagattatcaaggaaacacagctcttcacctctgtggccatgtggatactatccaatttttggtttccaatggactcaaaattgatatttgcaatcatcaaggtgctacccctttagttctggcaaagcgcagaggagtaaataaagatgtcatccgattgctggaatctttggaagaacaggaggtgaaaggatttaacagaggaacccactcgaaactggagaccatgcaaacagctgagagtgaaagtgccatggaaagccattcactcctcaatcccaacctgcagcaaggtgaaggagtcctctccagcttccgaaccacgtggcaggagtttgtggaggatctgggcttctggagagtattgctgttgatcttcgtcattgctttgctgtctcttggcattgcttattatgtgagtggggtgctacccttcgtggaaaaccagcctgaactggtgcattaaaggagctcatggaagatgaggcaattaattgcctgtttcctggcttccaatgtttgttctcagtttctcagaatttttcttagcgcaaagcagtgagggcagtacatgttctttttgcatttttaattattgtaatccttttagataatgatgtgttcatttgaactaactacatactatgatcaagtatattgcatcctaacgctacctctgactcaacctgactttgtaggaaagcctacacgtagccttgtttgataaaaacacggaagtgactagagaatggaagataaaggaagaagctaggaagtccttgctatcaaaaccttatcctaatataggaccaattgaagtattcaaaaagaaaaacagtatcttatatgattagtttttgttggtggttttgttttcatttatttttgcaagagccactttttatttactttctctagggataagagataaaacttgaagtacttttttcaaatcttgtgtgcaaattagtattgttagcatctatttggcttattttagtatttttaagtctagtcacaaaccaaacaaaacttttgaaaatgagctatattttgttcaaagataattgatttgatcttatatttatttgtttttaggataatttttgatctttttgtaaactgctttgcttgttaatatctgtgaaaaataaatgagttcattttgttcactttccaattttcccgagtatcctagtcatcaaagataacagttcatcagaattacagtcagaaaatcctttttctactgaatagttagcagggaaaaataattctgatatttaactgtcataattctgtagtgctattatagtgaaaaactcagttctataagctagctgtgttgtcacagttttatcatagttcataattatttcatgtgcaatcctatttggaggccctgttagacttttaacaatcccatccatatctgtaattctctgatggcaagaatggatggagcatttctgagttaacagtgctggacagtatcgtactgggtgtcataaactctttatgaatggtaatattatgtaaattgaaatctggccctcaaactatattgcagctttcagcagtatgtttgaaggcctcttttgttaatgattctgtaatgtatgaattatgttcttgagtggttaaaaaagaatatgaaggcttgataattatttattgggtaaagtcaggaaattgtagtgaaagaactaatggttttgttttttggaataaaggcacctaagctattgctaattgaattgctgctagaattagaaattatgctttagaatagaattggtatttctgtgattctttttgcttcttggtattttctcttgtatctatgtatctagtattgaggcttgctctttcatgtggctttatcctctctttaatagctgttgtaaaattcctgagtaactggctgcttcaggatcagcttgcagagtcttgcttttaggttagatacaaacaaagtaaatcatagttggtgtaaatccagcaaaaaacagctggctttggaatggagaacactacaattcaaatttgaagtatattcagaagaaaactttggaattagctttacatttgtttgtaaatctaaacaaatatgcaaaattggtcaaaatgtaagtatatagcatttttaaagattaatggttccttttatgtgctgatttctttgtattctgttctctgcattcatcattcaggaataccaccaataaatgtatttatatatcccttaaaaaaaaaaaaaaaaaaaaaaa

SEQ ID NO: 1105 - DNA, 8080 bp, Homo sapiens
acagcgctctcgacacggagcacccttctagcttcttcgtctccaggactgacgctcaggctcctctctcgccttagcccaacttgctttcccgcctcgcaaactccggtttccctccactcccaactcttttcactacacgtttcccctcctctatctcccacgccacgaaccccgatccccagactcctctctcccgccctcctccttcctctctcctcccttcaactcttcatccgcttccacctcagactctgcgcgcacccaattcagtcgcccgctcccgttcggctcctcgaagccatggcgggacctgggggctggagggacagggaggtcacggatctgggccacctgccggatccaactggaatattctcactagataaaaccattggccttggtacttatggcagaatctatttgggacttcatgagaagactggtgcatttacagctgttaaagtgatgaacgctcgtaagacccctttacctgaaataggaaggcgagtgagagtgaataaatatcaaaaatctgttgggtggagatacagtgatgaggaagaggatctcaggactgaactcaaccttctgaggaagtactctttccacaaaaacattgtgtccttctatggagcatttttcaagctgagtccccctggtcagcggcaccaactttggatggtgatggagttatgtgcagcaggttcggtcactgatgtagtgagaatgaccagtaatcagagtttaaaagaagattggattgcttatatctgccgagaaatccttcagggcttagctcaccttcacgcacaccgagtaattcaccgggacatcaaaggtcagaatgtgctgctgactcataatgctgaagtaaaactggttgattttggagtgagtgcccaggtgagcagaactaatggaagaaggaatagtttcattgggacaccatactggatggcacctgaggtgattgactgtgatgaggacccaagacgctcctatgattacagaagtgatgtgtggtctgtgggaattactgccattgaaatggctgaaggagcccctcctctgtgtaaccttcaacccttggaagctctcttcgttattttgcgggaatctgctcccacagtcaaatccagcggatggtcccgtaagttccacaatttcatggaaaagtgtacgataaaaaatttcctgtttcgtcctacttctgcaaacatgcttcaacacccatttgttcgggatataaaaaatgaacgacatgttgttgagtcattaacaaggcatcttactggaatcattaaaaaaagacagaaaaaaggaatacctttgatctttgaaagagaagaagctattaaggaacagtacaccgtgagaagattcagaggaccctcttgcactcacgagcttctgagattgccaaccagcagcagatgcagaccacttagagtcctgcatggggaaccctctcagccaaggtggctacctgatcgagaagagccacaggtccaggcacttcagcagctacagggagcagccagggtattcatgccactgcaggctctggacagtgcacctaagcctctaaaggggcaggctcaggcacctcaacgactacaaggggcagctcgggtgttcatgccactacaggctcaggtgaaggctaaagcctctaaacctctacaaatgcagattaaggcacctccacgactacggagggcagccagggtgctcatgccactacaggcacaggttagggcacctaggcttctgcaggtacagtcccaggtatccaaaaagcagcaggcccagacccagacatcagaaccacaagatttggaccaggtaccagaggaatttcagggtcaagatcaggtacccgaacaacaaaggcagggccaggcccctgaacaacagcagaggcacaaccaggtgcctgaacaagagctggagcagaaccaggcacctgaacagccagaggtacaggaacaggctgccgagcctgcacaggcagagactgaggcagaggaacctgagtcattacgagtaaatgcccaggtatttctgcccctgctatcacaagatcaccatgtgctgttgccactacatttggatactcaggtgctcattccagtagaggggcaaactgaaggatcacctcaggcacaggcttggacactagaacccccacaggcaattggctcagttcaagcactgatagagggactatcaagagacttgcttcgggcaccaaactcaaataactcaaagccacttggtccgttgcaaaccctgatggaaaatctgtcatcaaataggttttactcacaaccagaacaggcacgggagaaaaaatcaaaagtttctactctgaggcaagcactggcaaaaagactatcaccaaagaggttcagggcaaagtcatcatggagacctgaaaagcttgaactctcggatttagaagcccgcaggcaaaggcgccaacgcagatgggaagatatctttaatcagcatgaggaagaattgagacaagttgataaagacaaagaagatgaatcatcagacaatgatgaagtatttcattcgattcaggctgaagtccagatagagccattgaagccatacatttcaaatcctaaaaaaattgaggttcaagagagatctccttctgtgcctaacaaccaggatcatgcacatcatgtcaagttctcttcaagcgttcctcagcggtctcttttggaacaagctcagaagcccattgacatcagacaaaggagttcgcaaaatcgtcaaaattggctggcagcatcagaatcttcttctgaggaagaaagtcctgtgactggaaggaggtctcagtcatcaccaccttattctactattgatcagaagttgctggttgacatccatgttccagatggatttaaagtaggaaaaatatcaccccctgtatacttgacaaacgaatgggtaggctataatgcactctctgaaatcttccggaatgattggttaactccggcacctgtcattcagccacctgaagaggatggtgattatgttgaactctatgatgccagtgctgatactgatggtgatgatgatgatgagtctaatgatacttttgaagatacctatgatcatgccaatggcaatgatgacttggataaccaggttgatcaggctaatgatgtttgtaaagaccatgatgatgacaacaataagtttgttgatgatgtaaataataattattatgaggcgcctagttgtccaagggcaagctatggcagagatggaagctgcaagcaagatggttatgatggaagtcgtggaaaagaggaagcctacagaggctatggaagccatacagccaatagaagccatggaggaagtgcagccagtgaggacaatgcagccattggagatcaggaagaacatgcagccaatataggcagtgaaagaagaggcagtgagggtgatggaggtaagggagtcgttcgaaccagtgaagagagtggagcccttggactcaatggagaagaaaattgctcagagacagatggtccaggattgaagagacctgcgtctcaggactttgaatatctacaggaggagccaggtggtggaaatgaggcctcaaatgccattgactcaggtgctgcaccgtcagcacctgatcatgagagtgacaataaggacatatcagaatcatcaacacaatcagatttttctgccaatcactcatctccttccaaaggttctgggatgtctgctgatgctaactttgccagtgccatcttatacgctggattcgtagaagtacctgaggaatcacctaagcaaccctctgaagtcaatgttaacccactctatgtctctcctgcatgtaaaaaaccactaatccacatgtatgaaaaggagttcacttctgagatctgctgtggttctttgtggggagtcaatttgctgttgggaacccgatctaatctatatctgatggacagaagtggaaaggctgacattactaaacttataaggcgaagaccattccgccagattcaagtcttagagccactcaatttgctgattaccatctcaggtcataagaacagacttcgggtgtatcatctgacctggttgaggaacaagattttgaataatgatccagaaagtaaaagaaggcaagaagaaatgctgaagacagaggaagcctgcaaagctattgataagttaacaggctgtgaacacttcagtgtcctccaacatgaagaaacaacatatattgcaattgctttgaaatcatcaattcacctttatgcatgggcaccaaagtcctttgatgaaagcactgctattaaagtatgcattgatcaatcagcagactctgaaggagactacatgtcctatcaagcctatatacgaatactggcaaaaatacaggcagctgatccagtgaaccggtttaagagaccagatgagctccttcatttgctgaagctcaaggtatttccaacacttgatcataagccagtgacagttgacctggctattggttctgaaaaaagactaaagattttcttcagctcagcagatggatatcacctcatcgatgcagaatctgaggttatgtctgatgtgaccctgccaaagaatcccctggaaatcattataccacagaatatcatcattttacctgattgcttgggaattggcatgatgctcaccttcaatgctgaagccctctctgtggaagcaaatgaacaactcttcaagaagatccttgaaatgtggaaagacataccatcttctatagcttttgaatgtacacagcgaaccacaggatggggccaaaaggccattgaagtgcgctctttgcaatccagggttctggaaagtgagctgaagcgcaggtcaattaagaagctgagattcctgtgcacccggggtgacaagctgttctttacctctaccctgcgcaatcaccacagccgggtttacttcatgacacttggaaaacttgaagagctccaaagcaattatgatgtctaaaagtttccagtgatttattaccacattataaacatcatgtataggcagtctgcatcttcagatttcagagattaaatgagtattcagttttatttttagtaaagattaaatccaaaactttacttttaatgtagcacagaatagttttaatgagaaatgcagctttatgtataaaattaactatagcaagctctaggtactccaatggtgtacaatgtcttttgcacaaactttgtaacttttgttactgtgaattcaaacattactctttggacagtttggacagtatctgtattcagattttacaacatggagtaaagaaacctgttatgaattagattacaagcagccttcaaaagaattggcactgggataagatttttcagaaaaagaaaaacatcggcaaactgtgtgtgatttttccaaagctatataaagaaccaaaggtttagtcaagaaacaaaaatcttaaagattattataacccagactaaggttgaacaacctgcatgcccagagaaaactatggcgacaaaggggaaaaggccaccactcgttttctcactgattcatgccaattaagcctacagttaaagaccagttttgttcttttcacccatttttaagctggttttctcctgataagaagaaaggaagaaagccccagacgcttggtttttctcagaacccccaaaagatgtgcaatagctgttgttacaaaccaccaaataatacagttgtgagcctgaatacaggactgaactcctatacacgtgtactgtagaatgagtattttttaataccttaaggtaggcgtcaaattctactccccaaagcagagatagattgatttatcaaaattattatctggccaacagtgtgactatcagacagcatcaaatatttgcccaatccaagattagactacacaaaagcttccttccagtattaaacaaaaagaattaaacataactatgaaaaaactttgctaatatctgtgtttttcagatttcattttttgtaaaatcagaaattaatctaaacatattcagtgataagttcatgtgtaacgacttaatgttaaaggttaaaaaaaagatttcacaaaatatacaactttcaccatatatataagcctgcaaaattagagtagtgaaagtcatgctagtccatcacccaaatatgttatagacgccatagacaggtgatgtttggtcacctatggtaactgctacctgatgaagagcataatttctgcatatccatcctcaataccatggtaaattctggggcaatagagaagcaacagaactgccacaaagtatacctcaatataattcctctagttctgcttctaaaatctgaggacagtgctagtgggaaaataattttcaaactacctggttaaccaaaatacaaaagcagctgactatgtgtgatttcataatagcacatttcttgacacttagtgctagaaatgaagatttggattttcctaacaacttacatcaagaatgtagtgtagctcattattgagaatttaggaaagcctgaatccattaattaaggaaataaatgtgactcacatttcttttactgtgacacaataatgtgatcctaaaactggcttatccttgagtgtttacaactcaaacaactttttgaatgcagtagttttttttttttaaaaacaaacttttatgtcaaattttttttcttagaagtagtcttcattattataaatttgtacaccaaaaggccatggggaactttgtgcaagtacctcatcgctgagcaaatggagcttgctatgttttaatttcagaaaatttcctcatatacgtagtgtgtagaatcaagtcttttaataattcattttttcttcataatatttactcaaagttaagcttaaaaataagttttatcttaaaatcatatttgaagacagtaagacagtaaactattttaggaagtcaacccccattgcactctgtggcagttattctggtaaaaataggcaaaagtgacctgaatctacaatgatgtcccaaagtaaccaagtaagagagattgtaaatgataaaccgagctttaaaggataaagtgttaataaagaaaggaagctgggcacatgtcaaaaagggagatcgaaatgttaggtaatcatttagaaaggacagaaaatatttaaagtggctcataggtaatgaatatttctgacttagatgtaaatccatctggaatctttacatcctttgccagctgaaacaagaaagtgaagggacaatgatatttcatggtcagtttattttgtaagagacagaagaaattatatctatacattaccttgtagcagcagtacctggaagccccagcccgtcacagaagtgtggaggggggctcctgactagacaatttccctagcccttgtgatttgaagcatgaaagttctggcaggttatgagcagcactagggataaagtatggttttattttggtgtaatttaggtttttcaacaaagcccttgtctaaaataaaaggcattattggaaatatttgaaaactagaaaatgatggataaaagggctgataagaaaatttctgactgtcagtagaagtgagataagatcctcagaggaaacagtaagaagggataatcattaagatagtaaaacaggcaaagcagaatcacatgtgcacacacacatacacatgtaaacattggaatgcataagttttaatattttagcgctatcagtttctaaatgcattaattactaactgccctctcccaagattcatttagttcaaacagtatccgtaaactaggaataatgccacatgcattcaatgggatcttttaagtactcttcagtttgttccaagaaatgtgcctactgaaatcaaattaatttgtattcaatgtgtacttcaagactgctaattgtttcatctgaaagcctacaatgaatcattgttcaaccttgaaaaataaaattttgtaaaacaaaaaaaaaaaaaaaaaaa

SEQ ID NO: 1106 - DNA, 6409 bp, Homo sapiens
ccgaaaaggggcggggtgggtcggacggcagtttaattacgtccccgggaactgcgccgatttggacttttggcacttggacctatgctttaaaaagaaaaaagtgtcattggcgtggagtggggctagtggagggtgaggtgaatgcgccgtttggaaaccacaggacagtgaacgtttcgtctctcccagcgagactctcccgcgggcccggcggccgcatcgggagcccggcggaaacatggcggcgcccggaggccggggccgcagcctctccggcctgctccccgcgcagacctcgctagagtacgccctgctcgacgccgttacccagcaggagaaggacagcctggtctaccagtatctgcagaaggtggacggctgggagcaggacttgtcagtacccgagtttccggaaggattagaatggctgaacacagaagaacctatttctgtctacaaggatctatgtggaaaaatagtcgtccttgatttcttcacctactgctgcataaactgtattcacctattgcctgatctccatgcattagaacacacatactctgataaagatggtcttcttattattggtgttcactcggctaagtttccaaatgaaaaagtcctggataacattaagagtgctgttcttcgatacaacatcacccaccctatggttaatgatgcagatgccagcctttggcaagaactagaagtttcctgctggccaactctagtcatacttggacctcgtggaaacatgttgttttctttgattggagagggacacaaagataaattatttttatatacttcaattgctttaaagtattacaaagacagggggcagatcagagataataaaattggaataaaactctataaagattctttgccaccttcaccattgctatttcctggcaaagtaacagtagaccaagttactgatagattggtaatagcagacactggacatcatagaattttggtcgtttggaagaatggacaaattcaatatagcattggaggacccaaccctggaagaaaagatggaatattttcagaatcaacttttaattctccacagggtgtagccataatgaataatatcatatatgtggcagacactgaaaaccaccttataagaaagattgacctagaagctgagaaggtgagcactgtagctggtattggaattcaaggtacagataaagaaggtggagcaaaaggagaacaacaacccattagttccccttgggatgtagtttttggaacatcaggttcagaggtccaaagaggtgacattttatggatagccatggcagggactcatcagatatgggcactcctgctggactctggcaaactgccaaagaaaaatgagttaacaaaaggaacctgccttaggtttgctggaagtggaaatgaagagaatcgaaacaatgcctatcctcacaaggcaggttttgcccaaccttcaggcctttccttggcctctgaagatccctggagctgcttgtttgtagcagatagtgagagcagtacagtgagaaccgtttcactgaaagatggagcagtgaagcacctcgtaggaggagaaagagaccccatgaatttatttgcttttggtgatgttgatggagtaggaatcaatgcaaagcttcaacacccccttggagtaacatgggacaaaaaaaggaatttactttatgttgcagactcctacaatcacaagattaaagttgtggatccaaaaacaaaaaactgtacaacattagcaggaactggagacacaaataatgttaccagttccagttttacagagtcaacttttaatgaaccaggaggcttgtgtattggagagaatggagaattattatatgtagcagacaccaataatcatcaaattaaagtgatggatttagaaactaaaatggtatctgtgctccccatcttcagatctgaaaatgctgtggtagatggcccgttcctagtagaaaaacagaagacattacccaaactacctaaatctgctccaagcattaggctttcccccgtgactgcgtgtgctggccagactcttcagttcaaactcagattagacctcccatcaggatcaaagctaactgaaggagtatccagttgctggtttctaacagctgaaggcaatgaatggctacttcaaggacagatagcagctggagatatagagaacatttccagtcaaccaacaatttcactacaaattcctgatgattgcttatcacttgaagccattgtatctgtcagtgtgtttctttattactgtagtgcagacagcagtgcttgtatgatgaaggcaattttgttcagtcagcctttacaaataacggatacacagcaaggttgcatagctccagtagagctcaggtatgtattttagccagccagctagctagcaacccattgccaccacctactgtctcccatcctgactatcactgtaatttaaggaaagaaaacttcagttctgcctctggataccaagatgcccattgctcagttcagacaactgatattaaaataaagctatgctccttacttacttcttttattataaacaaattcctttgctttggctgatactagctgagtcattgatcatcattggtaccatgatattgtaatctatgctgctatttggcacaagactgaagttcacactacagtagagaatactataagataatttgcaataaatactgataataataataccagatattttaactaactttttctacctttattaatagcaatcagcacacttgaatgtgtaaatttcacagtaactttaggcagaacttaagctccaggccacatttgtataagaacaccaagtattcaaggcataaagtctgttgtaagccaaaaaaaagtcttttcatcactgtagaagcttaaggagtacatcagtggtaaatacgatctttattctcttctgtggttttctcagttgagatatttttaaaagagagttttgatctatttttattataaattatttgttatttaacataccattatgaatgccttaaaactttgtacagataaagttggacatagaatctctaaggactgactcctttaactgtttttgagtgactacattaccagataatgaatgagtccccagaaatattatgactttcaaggaaaaagggactttaggacacattacttagtgtctgtgataaataatttattgtgacagctaaatctgatggttacatatcttgttttggaaatgtacatttcacttgtaagcattaaatgcagatttgttgagtttaggttttgaggtttttttcgttcccatattcagaatttaaattatgatcatttattgtgatgtttttaaaaatcacttttaagccttaaaagtgaaattttcagtgtgaggtgctttcatgctattaatagatacagtatatcctaatatattagtcttcaaaatattaaggccgaaacagtgatttaatgatactattttttaatttttgttgttttttatccctaaaaaaagatattggaaaggttttttttctattgtcataatttataactacttaaaagcctaatcttgttttccttaagacctattcaacatgtttgtgatttaatcagcttacaagggtttaaaaacatcaggtgaaccatgtttatttattcagtaaatatttatagacaatatggcataatatgcttcccttccctgtaaaaacagtgctaaatttgaagtgtaatcttttttaaacatcattgtctatttttaattttgtttgaaatgtagtattagtttgttttattcataaggttagctgaatctctgaagtaaggatgtataaatcatgacattgatttaattagtcatctactgaagctacttttaaagagaaatatagatataaaattaaaaggaatcctgtttaaaattatatgtaattacctcataaaccttttctctccacaagcaatcaaaaaaatgaaatgttctgtaataaaagggtgtataacatactctcttttatgagaataggccttagttattttattttatttttgagacgtagtctggctctgtagcccaggctgggagggcagtggcgcgatcttggctcactgcaacctctacctcctgggttcaagagattttcctgcctcagcctcccaagtagctgggattacaggcgtacaccaccatgcccagctaatttttttgtgtttttagtagagacagggtttcaccatgtcagtcaggctggtcccaaactcctggcctcaggtgatccgcctgcctctgtctcccaaagtgctgggattacaggtgtgagccaccttgccctactggccttagttaatttttaatctcatttgacttattatgtttctcatttctagatggacaggatgagaatattttggcccaatcattttctgtttaaggacttaaacaatttcacactctaaatgaagtatatacaattttaatttactaatttagaaatatctgagtttatttttcaatataatatacaaacacagtgtttgttatacatgttcatgtacagtgaaaatgcaaaggcattttttagactctattccccttcatttgtctagacagttttaggttagccttagcttatacttttcttgactttcaaaatacagttttattgaacattcttattcttacccactgccagtctgcattgttttttacattaaaagtattatttatagtagactaatatgattttgaataaaatcacacttaagcaatatagataggttcctagaatttatgacgaggataaacctctcacataagaggaagcactagaaagtttatttttaaaacttgttgatccatattctataaggactaatgcatattttttatcttttgcttttcttgttggataaattattatgtccagtgatagtttaaaaagaacaagattttagtgtaagtcacctcacttgaaatgccagtaatgtggtattacacacattttatataatacctggaatctttgccctaaattattctgctggtttgtcgctatttttttcctctcctctttattatttcacaaatggtagaatttcttgatatgattcttgtaaagagtttagcttatcttgaacattctgtcttaagcaaatatttaacaagagaaaactttgtagtttaatcacccataagtgtaactttagcaaaattcaatgactatgaaaaataatttttttcttaactgttctaataatatttagttataatattatcaaaccttcagaaagttataaatcctaacagccagaaaaaaaaatttactatgtgtatatttatataggtgtgtgtatacacaaagattaagaattattcatgattcttttatggccaatatacttttgagcttgtataactgagataagttactctttgcttgtttttctgtagttggaaaatttaggaagttattaaaaatacatatctctataatgtaatagttttctgcctgcacaaagtttactattaatttatgtctaccagttaaaaatacgatagttagatttggcatcacgtttaaccacaatcatcaaaatctacttaaattctatagttaacagttacataagaatatatgcagagggaaaatgtcaatagttcttgtgaatgaaggaattatggatgtttttattttaattctactttgctgttttttttttcttttcagtgagcaatctgttatttttaaaatcacggtggggggaaacccataaagtttaaagagttaaagttaactgaatcgtaagcacttatataataactttttaaaagtcatttttattaccagagctcagaacattgtttggagtcctttgatctaccggttctcttaagtacgtgatttcgtgaagatagcaatggttatggcttttttgttctgttatttttattgtgtaacgtagtgtagtggttaagagcttggattttgcagtaacttggattctaatcctttaaaatggggctgatatacctgcctcatattcaatgaaatattgtgtgtacagcacttagtaattaatgaaactggtaattattagcttagttactgtaatgataatttgggaccataaacacatatcaccctacattttctttgcaactacaatttgtgaaggaaaatctcccactaactattggttatgttaatattcttcatagagttgggttcaagaagagaaatgttttataatgaagcatataactattttataaacaacattgtagttataaagaagcatgcctatagtgttattaaaaattttttgtacgactttctggaaaaaaaaaaaaaaaaaa

SEQ ID NO: 1107 - DNA, 4506 bp, Homo sapiens
agcagcagcccgggcggtgggcagccaggagcccccggcccggcccggcccggcccgccgagggccccagcgcaggagccgcgcccggacccaggcgatgccctcctagctagccgtcacgggatggagggcttcatggactcagggacacagacggacgccgtggtggtgctgtccttggctcaggccgccgtgcttggcctggtctccgaaaatgagctctttggagctaccataagcgccgaggccttctacccggacctggggcccgagctttcaggggcagccatgggagagcccgagccaccaggccccgacgtctaccagctggcctgcaacgggagggccttggaggagccggcggaggaggaggtgctggaggtggaggcagcctgtgagaagcacacccggcggaagacgcggccacctgtgcggttggtgcccaaggtcaagttcgagaaggtggaggaggaggaacaggaggtctatgaggtttctgtgccaggtgacgacaaggacgcagggccagcagaagcccccgccgaggcggccagtggcggctgcgacgccctggtgcagagcagcgccgtcaagatgatcgacctcagcgccttcagccgcaagccccggacgctccggcatctgccccgaaccccgaggccggagctgaacgtggccccatatgaccctcacttcccggccccggcccgggatggcttccccgagcccagcatggcgctgcctgggccagaggccttgcccacagagtgtgggttcgagccaccccacctggcccccctgagtgaccccgaggcccccagcatggagtccccggagcctgtcaagccggaacagggcttcgtgtggcaggaggccagtgagttcgaggctgacacggcgggttcgaccgtggaacgccacaagaaggcccagctggatcggctggacatcaacgtgcagattgacgactcctatctggtggaggcgggcgaccgccagaagcgctggcagtgccgcatgtgcgagaagtcctacacgtccaagtacaacctggtgacgcacatcctgggccacaacggcatcaagccacactcgtgcccacactgcagcaagctcttcaagcagcccagccacctgcagacgcacctgctgacgcaccagggcacccggccccacaagtgccaggtatgccacaaggccttcacgcagaccagccacctcaagcgccacatgctgctgcactcggaggtcaagccctacagctgccacttctgcggccgcggcttcgcctaccccagcgagctcaaggcccacgaagtgaagcatgagagtggccgctgccatgtctgcgtcgagtgcggcctggacttctccaccctgacccagctcaagcgccacctggcctcccaccagggccccaccctctaccagtgcctcgagtgtgacaagtccttccactaccgcagccagttgcagaaccacatgctcaagcaccagaacgtgcgacccttcgtgtgcactgaatgcggcatggagttcagccagattcaccacctcaagcagcactccctcacccacaagggcgtgaaggagttcaagtgcgaggtgtgtggccgggagttcaccctacaggcgaacatgaagcggcacatgctgatccacaccagcgtccggccctaccagtgccacatctgcttcaagacctttgtacagaagcagactctcaagacccacatgattgtacactcgcccgtgaagccattcaaatgcaaggtgtgcgggaagtccttcaaccgcatgtacaacctgctgggccacatgcacctgcacgccggcagcaagcccttcaagtgcccctactgctccagcaagtttaatctcaagggcaacctgagccggcacatgaaggtcaagcatggcgtcatggacatcggcctggacagccaagaccccatgatggagctgacaggcactgacccttcagagctcgacggccagcaggagatggaggacttcgaggagaacgcctacagctatgcgagcgtggacagcagcgccgaggccagtgtcctcactgaacaggccatgaaagagatggcctactacaatgtgctatagcgcaagctgggccacccctaacgggggccgggggcgagggcatgggggtgagacccatgggctgcaggctgcacctcctgcagccgagaaacaagctactgccccactgttctgagccctccctccccgagtcatttgcaccactagggacctttagaccaaatggagactgtactactggccccggctgtgagccagcacaggcccaggcatcccagcaagggaaggagaacacgcgaggcccagatctgggtctccctggcctgcttccgtggggagtgggagaagtggggccactggggacaggtcacaagggcaccggccctcggggtctctccaggcccagcagagctcttcaggggtcctgacactggaagaagagaccacttgagccatgtctttttcacggccaactcctgcctctaaggatgtctgagctcccctctggccagtactgcccacctctaccttgtccaggcccccttccccgccctgtcgacggaccgccaggcagggcactctgccttctacctcccggggtctcccatgcgctcctcaagccaggtgtgcacgtggccctggccctggcctgcaggacagctggggggcacccagcccccagaagacccctgtcctacatccctttctggaagtgagtgtccctacagtggattgcaacacatgtcgtccacttcgaccctagctggagtgcctcaccagggggccccactaggaacaaagccaggacaggccccgcgtcaggcacacactaacaaaaccagaagcatggggcagggcagggcggagtgagggcatcacaggggaccaagaagggctgtccttgggggaggcccaggaccacctgtcggggagggggaccgcagtcatttctcattcctcagtgtccaccttgcgacggggatagccacgagtcagcagcttcccggaaagagcaacgtattttaaaaaggaaagtaaagcccacagagggaaatcaagggtttttttgagcaaagggggtcttctgaaggtaacttattatttttttctttccaactgtgtgtcacctatgaccttttctgatggagatgcattttctttttccaagcgtaagcttcctaatgtgctgtgcgtgcttcctacccacccaccccgagcagcctggccgggcaggactggggctccatggggactgtcaccctggccctggaggtgcagccgctggcagcagcctcagcaggctggggtgggaggcaggagaaggcagagctgggaagccctccacccctgcctggctcctgcagtcgctgacttgctctgtcccatgtcccatcctcggctgtcagggctgctgactctgctcagccaacagctagctccctcgctcgcctgctctcttcccctctgttcccacgccagctcctgcccctggaaccagagatgacaggcccagggcagtgaaatagcacattcaggaactctagggcacccggacccccccacccacttgcctcctgaggcctcagtggggaggggcaagcaggggtcttccccaaaggcacagatgaagccactagcttcagcctagaaacccggagaagggaacagcctgcggtgggaggaaccaatctgcagcgcagccacccccaaggctggatccttaagtgaaggaccaagccaggcctcagggtgactgtgatcaggactgaggggtggacaaggtggcccaagtatggcttccagaccccgaagccccacgacctcccaggtgcccgccatgatgaccctcaggtggcagtgaccccgtcactgtataagacattttctcctgctgagcagaaggcatcatcccctgcaactacctcttcccacgtctttctcccctggtaccaaaaagaaccctgtacctctcctcctcctcctccctcctgccagtgcagtggccttggtcttggaaactgaagggagaaggtctggcccccagggtggggctctcctttccctcccccagccccgccgtcagcactggccctctgtgaggttcgatacttgaacgccccctgccctgtgccttggacctgggcaaagctaggaggaggaaacagcacaactcacagtttgagctggggggtggtcttggcaaggctcctgtctgtacccctccctaaccttctcaaaagaggtgcacagcctctcgggtgacttggaaactcctggacaaattccattctaacttattttgacatgtatacaaaccaactgtttagagattccacttgtgcaaagccctactgtgtttttatgttcctgtttaaaagagaagtttacttagcaataattataaataaatgaatattctttagtgaggtgaaaaaaaaaaaaaaaaaa

SEQ ID NO: 1108 - DNA, 4746 bp, Homo sapiens
gcggagtcggcggccgggcggaggtaccggctcaggcttgggatcccggctgcgggtttggcggcgctgcgccggcaggcagcgaggccgggcgggccctgggccctcgcgcccctcccgcgaggcctgtcatgcagggccccgccgggaacgcgagccggggactgccaggcgggccgccctccacagtcgcgtccggggcgggccgctgcgagagcggcgcgctcatgcacagcttcggcatcttcctgcaggggctgctcggcgtcgtggccttcagcacgttaatgctcaaacgcttcagagaaccaaagcatgaaagacgtccgtggaggatatggtttttagacacttccaaacaagccataggaatgctgttcatccactttgcaaatgtatacctagcagatctcactgaagaggacccttgttcactgtacctcatcaacttcctcctggacgccactgtgggcatgctgctcatctacgtgggggtgcgcgccgtcagcgtcctggtagagtggcagcagtgggagtccctgcgcttcggcgaatatggagaccctctgcagtgtggagcctgggtcgggcagtgcgctctttacatcgtgatcatgatttttgaaaagtctgtcgtcttcatcgtcctcctaatacttcagtggaaaaaggtggccctgttgaatcccattgaaaacccagacttgaagctggccatcgtcatgctgatcgtccccttctttgtcaacgctttgatgttttgggtagtggacaatttcctcatgagaaaggggaagacgaaagctaagctagaagaaaggggagccaaccaggactcgaggaatgggagcaaggtccgctaccggagggccgcatcccacgaggagtctgagtctgagatcctgatctcagcggatgatgagatggaggagtccgacgtggaggaggacctccgcagactgacccccctcaagcctgtgaagaaaaagaagcaccgctttgggctacccgtatgacacattcccatgctgggggtgacgggagggccccgccagccgctggtgtgcagaggtcatcccgcagcatcgttccttaccctctctctgcccttcctttctacctctgctcctcttgctgtctctgcccgctctcgcctgcccccagactactgtgacttaaaaagagggaagaggagccagcgcccgagggggccactggcggctggaggtccccattcagttgcactacaaacactgaccaaatatgcaaggaaggagctgtgtttgtttgttgtcgtcccagacagtgttgtgagggacctgaggccctgccccgtgtccgaccaccgagtggcaaggtggaaggaagcacaggcacacagaccgtgggtgggtctcctcaccgtggctgtgggcagtgcgaacacataacaccctcgggctaaaagtgactcgttgaccaagttggaaccggaatgctttcttactcaaaatggcttttgtaactattgatttctgaagctggttttatgagttgtgacagtgttaccaggttgggggtatgtgtttatttcctacaaagtacttacgggactaatgggcaaaacagagatttttaagtcttccgtatgctgtttgacttttatatttttaagttatattttcatactattgtatttaaaaactctttttagtccccaaagaaatgggtttatttgcctttcatggggtgtgggctggcaggaggaaaaatcgggagttttttatttggaatattattagatgatgccctatgataagatgagacaaatgatggggagggaaggaggatggcccttctctagaatcagcaaacccaatggttctgtgaaggtcagacccaagcttggagcagctggtctggatgcagatccaggagctgcagagtgtggaacaggaaaggctctgcccagggcccacgagctctagcattcctgctggcagattagagatcttagttaaatttgaccaagaaaggagcttagctaagaggtctttgtttccagaggacccaagactaccagactcctgtgcagtctgcctgtctgcagagcctccaatcacggtttaaagtggtcttggcctcccagcccccactgctgcagccttcagagccagcctctggactcagcgccaggagcctcctctcctgctgccctggtacctgtcatcctagtgtcacctatttgttttgcacagcattctggagaacatgtgcctcacaaagtgatcctgtttttctcaccctccaaagctgaggtggctaagggaggcaggggtgagagagctcactctctaaaccacaggcagggcaaggtgcttctaggccgtgtcccctccctggggaatggtcactactcctcagcatggccacaggcccctgtggttttgggagtttgctgagtgactggaatgggctgaccccagccgtttccctgctgtggaagcagcaaggtaggggcactgctcggtggtttgtcaagctcagaggcagccacggatggttaggaacaggaagccacactgctaaggtgtgatgagctagaagggagacatcctggacttcaagtgagacaagtgcagaggaggccactccacttaggaccttcctcttagacctgcatgagcacgtgtttcacttaagcacattgggtccgaattgtggcgcatgaacccagctgttaaaccaggtaccctgggactgccctctgcctctcagagccctacctgtcctggacttgaaggcgagcatcaggcaggccttctcagcccatcttccaccaggagtgcagagccagggtgctgagaggagcagggactgtaactacagtaggaggcaactttgctggtgtcattcctgctcggattgactttgtgctccctcccatccacagctatggtagccagtatttccccagcagctctctagtggggaagagtggctagaaccaggccattctcagtcgaatttaggaagaccaagactcatgttcctgacaggacggtcattccctcatggcatcactgactcagttctaattcctcccctcctgtttcattttggtttgaacaacctgtgcctgcagctgtttcttccaccttcctggagctcacaattggagcttcatgttcagtcttgagctcctaatgtttccagacagggcaggggataggacagccataatctatgaaagctgtgaaacaaaccctgggttatatagacctcagatggtctcatctgaaggctttgcccacttcccagtgagcagagggtttggggaacaaagaggtagctgaagagtggtggtttttccctgtatcctgattttcagaaagggctttagtctctgagctgtggctagtagctggctggctgaccaggggacgggggtctaatagggtgtctgaccataggacacctctcgtgtttggccttccctttcttgtgtgtttgtgtgtgtgtgtgcatgtacacacacaaatctgtatccccaggagtgcctcctgcagtcactgggggctcttccgtggtgcaccatcccatgagagcagatcagagggctgtggtcaggacttcctcccgagctgccctccctccctgggatgagtttcctctccacctgctccaaggtgccttacgaggtgcagctcttcacctggccacatggcatccatcaccgtgttgagaaatggtgggacgttggctggatattgtgtgctatgaatctgatttgtccaaatctggacctcagccaagccacctgtggtggaaccttgcaagtcaaggtcatgaacaaatttcttgtaactattggaaataaactaatgaggtagaactgtcatatccaaatggaagaggtggttggtactgttacttccttttgctgtcagagggttgttgacaatggcaaggggggatgttagtgagatccaggtggtggtggcttcttggtccactcagcttgcacacatgcaagaggagggtctgtggcccctcagccgtgctggtggcctccttcctcaagctttaacttgtgccctccctggcaacagggagtcatgggttaatgtcacctgtcatgcctctttcttcagggaaaatattaaaaggctcaaatccaagctgtgacttcccttagacagtgtaagcctgtagggtgcagccccaagtttatgtccaaaggctgcctcagaaccctggagggagcagcgcccagctggcagctcactctgcccttgcagttcactggccttttcgcagccaggctaagataggcagtgcaaggagcttcccactggccagagcagctgccttgtagaatgtggggctggcttttagaagtttcacacgcttgcagctaagagtgcagagctctctgttttacttcgtgaaacattagcagctctgaggggcttggcttttggtaagggacttatggtctgacttgccacaagcaccttgagctcctgggttggttggtggttggttggttgggttgttttaaatttgatttttcttttcctgaagtttgttagaagtcagacctatgcaaggaaaaccatggcccacttcagcagccatccagtgggggtgcttaatcggtggtggtaggattcatggaaacgtttttttgaaatgaaagagaagatgatgtacttacattgtaaaatggtttacaataaagtttggcatcttaaaaaaaaaaaa

SEQ ID NO: 1109 - DNA, 3411 bp, Homo sapiens
gggcgcgggccgcgatggcagcggcggagcagggctgagcccgctgcccgcccgcagttcccggccccgctggccccagtcatggcgaagcagtacgatgtgctgttccggctgctgctgatcggggactccggggtgggcaagacctgcctgctgtgccgcttcaccgacaacgagttccactcctcgcacatctccaccatcggtgttgactttaagatgaagaccatagaggtagacggcatcaaagtgcggatacagatctgggacactgcagggcaggagagataccagaccatcacaaagcagtactatcggcgggcccaggggatatttttggtctatgacattagcagcgagcgctcttaccagcacatcatgaagtgggtcagtgacgtggatgaggtaggagatgccacctcactgccggggtgtggagagggtgcctcaccggggaaggcaaggcgagggccagatgggaaggcaaatgcttccaggaagctttgccttccacagccctggatgaagacctctggtacgcaccagaaggcgtccagaagatccttattgggaataaggctgatgaggagcagaaacggcaggtgggaagagagcaagggcagcagctggcgaaggagtatggcatggacttctatgaaacaagtgcctgcaccaacctcaacattaaagagtcattcacgcgtctgacagagctggtgctgcaggcccataggaaggagctggaaggcctccggatgcgtgccagcaatgagttggcactggcagagctggaggaggaggagggcaaacccgagggcccagcgaactcttcgaaaacctgctggtgctgagtcctgtgtggggcaccccacacgacacccctcttccctcaggaggcccgtgggcagacaggggagccggggctttgccctgctgctgtcctctcgtgtgatgaccctattgagtatcagtagccactactccccctgcctggccctgagagcggctctgctgtcatctcaagcagcccctgtccccagcccgtccaccctggagtggtcttcttcagcctgtttccccagccacaggcctgctacgacccccacgatgtgccgcaagcactgtctcaccatcccgcacccaccagacaacagccagggctggagtccaggccactttcagctgctcctttctccgtgcatcgtgtctcttctctgctttttctctcttcccccacttctctttctctgacccctcccctccggtgcgtttcgtatcaaagctcctcaaaccccgtcccccgtgtgtcctgctgtgtgcagctcgctctttccttccttcctaagctatccaaggggatggacccaggctcgtggggaggttccacccttggatccaggaagaaccctccaccctgcctcgtgggtgggccaaaggctacagggtgcttcttcctcttcccccacccccactgtccctcatgtgccatgggcctgcctccccagtgacctgcgaaagtggagcatcgaggtaggagggaaacggcaaccagggagtcctcgagcctggggctgccctacctctacccattccccgaccagagctttgcccttgcttggctgcccgcctgcctctttggggaactgagctcagaggcaggtgcttcagagaaggaaacaaaatgaggggtggcagggataaaaagtcacctccattctctacctcccatgcagcatgaacacaatttctctccacctggctcccaaatttaaagatgtggaccaaggcctgtgggtactccaggggcaaggagagccctggggtcagtgacactgtcaggccaaccatgcactccacaaaggggagcatttggaaatgaaggactagctcctatgtatcaggttaagagcaagggagagctggccagggacagcagtttgcacagcagaggggaatgtagcaacagcagggcctcctaggccccatcttccatttcttaggtaagaagagcatttcctcagactcccaggcggaggactgagcctagccttcagcaaccaaggttctcctgggacccaaagtttatgggagaagggcaaagacttcatgggaagagagaaggaaggccctgggtagaaacgcttggtgctgttctctttggcctttaagacaaagcgctcatcttgccctctacctcctgataggcttgagggtttgccaaccacactgtggctacaggtggagggaagaggactccttcctccagagtgctatgttcaggaagtttctttaaccccatatggcccaagagtagctcgtaggaggccctttaaagacggaacaagtaatttaccagttctactggggttcctgcccaccgtcccaaggtgggcgaggcctaggaagagggtcattcttaagccacacattagctgcactgcgtggctgcagccaaaacaaagaactgggtgttgagtattcatcaactaagaaccaaaatccagggcactcatatgtgaaggataagaacctcacttccttactcctccaaaaagaagtggggaaagaaccatcaaacctttcctcctgacttaccaaaccaggaaaacagcaggagagggtggctcaggacttagggacagggtatagcttagatggtggaaagcaaaggagagcaggaagttgtaaatcactggctaatgagaaaaggagacagctaactctaggatgaagctgtgactaggctggagttgcttccttgaagatgggactccttgggtatcaagacctatgccacatcacactggggctagggaagtaggtgatgccagccctcaagtctgtcttcagccagggacttgagaagttatattgggcagtggctccaatctgtggaccagtatttcagctttccctgaagatcaggcagggtgccattcattgtctttctctcctagccccctcaggaaagaaggactatatttgtactgtaccctaggggttctggaagggaaaacatggaatcaggattctatagactgataggccctatccacaagggccatgactgggaaaaggtatgggagcagaaggagaattgggattttagggtgcagctacgctcaccctaaacttttggtggcctggggcatgtcttgaggcccagactgttaaccaggctctgctggcctgtttactcgtcaccacctctgcacctgctgtcttgagactccatccagccccaggcacgccacctgctcctgagcctccactatctccctgtgacgggtgaacttcgtgtactgtgtctcgggtccatatatgaattgtgagcagggttcatctattttaaacacagatgtttacaaaataaagattatttcaaaccaccaaaaaaaaaaaaaaaaaaaa

SEQ ID NO: 1110 - DNA, 4845 bp, Homo sapiens
gagaatcgtgagggtggccaagtccagtttggacctctgacccttgggcagcacctcccgacagccggctcgggacccaactctgcgagccaggtgaaaatgagttcttcagtaagaagaaaaggcaagccaggcaaaggaggtggaaaagggtcttctagaggaggaagaggaggcaggagtcacgccagtaaatctcatgggagtggtggcggtggcggtggtggtggtggtggaggtggcggcaacagaaaggcctccagtagaatatgggatgatggagatgacttttgtatcttcagtgaatcaaggcgcccttccagacctagcaacagtaacataagcaaaggagagtcacgcccaaaatggaaacccaaagccaaagtaccccttcagactctacatatgacttctgagaatcaagagaaagtgaaagctcttctccgagacctgcaagaacaagatgctgatgctggatctgaaagaggcctttctggggaggaggaagatgatgagcctgattgctgtaacgatgagcggtactggccagctggacaggaaccttccctcgttcccgacttggatcctttggaatatgctggcttagcctcagtggagccttatgttccagaatttacagtctccccatttgcagtgcaaaaactttccaggtatggtttcaatactgaacgctgtcaagcggtcctgaggatgtgtgatggagatgtgggagcatcactagagcatctccttacccagtgtttttcagagacatttggagagaggatgaagatctctgaggcagtcaaccagataagcttggatgagtgtatggaacagcgacaggaagaggcatttgctctcaagtccatctgtggagaaaaatttatagaaagaattcagaacagagtctggaccattgggttagaactggagtatctgacaagtagattccgcaaatccaagccaaaagaaagtaccaaaaatgtacaagagaattcacttgaaatctgtaaattttacctcaaaggaaattgtaaatttggatcaaaatgcagattcaaacatgaagtgcccccaaatcaaattgttggaagaatagaaagaagtgtagatgattctcatcttaatgctattgaagatgcatcttttttatatgaacttgaaattcgattttctaaagaccacaaatatccctaccaagctccgctcgtggcattttattccaccaatgagaacctacctctggcttgtcgtttacatatttctgagtttctttatgacaaggccttgacatttgcggaaacttcggaacctgtcgtatattctttgataacccttttagaggaagagtcggaaatagtcaagttactaacgaatacccaccacaagtatagtgaccctcctgtgaactttctgccagtaccctctaggaccagaataaataatcctgcctgtcataaaacagtgattccaaataattcttttgtttctaatcaaattccagaagttgaaaaagcatcagaatctgaggagtcagatgaggatgacggtcctgcacctgttatagtagagaatgaaagctatgtgaaccttaagaaaaagatttccaaaagatatgactggcaggcaaagtcagtacatgctgaaaatggtaaaatctgcaagcagttccgaatgaaacaggcttccagacagttccagtccattctgcaagagaggcaatcactccctgcttgggaagaaagagaaaccattcttaacttattgcgtaagcaccaggtggttgtcataagtggtatgactggatgtgggaaaaccacacaaattccgcagtttattctggatgattctctgaatggaccacctgagaaggtagccaacatcatctgtacccaaccccgacgaatctctgcaatctctgttgctgaacgcgttgctaaagaaagagcagagagggtgggtctgaccgtgggataccagattcggttagaaagtgtcaagtcctcagccaccagactgttatactgcaccacgggagtgctgctgagaaggctagaaggagatacagctctacaaggagtttcccatatcattgttgatgaagttcatgagaggacagaagaaagtgacttcttgctgctagttttgaaggacattgtatcgcagaggccaggtcttcaagttattttaatgagtgcaactctaaacgctgagcttttttcagactattttaattcctgccccgttattactataccaggtcgtacatttcctgttgatcaattttttttggaagatgcaattgctgtgacaaggtatgtattacaggatgggagcccatatatgcggtccatgaaacagatttcaaaggaaaagcttaaagcaaggcggaacagaactgcatttgaagaagtggaagaagacctaaggctctcccttcacctccaggatcaggattctgtcaaagatgcagtgccagatcaacagttagattttaagcagctcctggcccgctataaaggggttagcaagtcagtcatcaaaacaatgtccatcatggattttgaaaaggtgaatcttgaattaatagaggccttattagagtggattgtggatggaaagcactcctaccctccaggtgctatacttgtatttttaccaggactagcagaaatcaaaatgctttatgaacagctacagtctaattctcttttcaacaacagacgtagtaatcgatgtgttattcacccacttcattcatctttatccagtgaagagcagcaggctgtgtttgtaaaacctcctgcaggagtaactaagattataatttccaccaacattgctgagacatccataaccatcgatgatgttgtctatgttatcgattctgggaaaatgaaagaaaagagatatgatgccagcaaagggatggaaagtctagaggacacctttgtatctcaagctaatgctctacaaaggaaaggccgagcaggccgtgttgcatctggggtctgcttccatttattcactagccatcactacaatcaccagcttttaaaacaacagctaccagaaatacaaagagtgccattggaacagctgtgtctaagaattaaaattttagagatgtttagtgctcataatctccagtctgtgttctctcggctcattgaacctccacacaccgattctcttcgtgcctcaaaaatacgattacgagacttaggagcattaactccagatgaaagattgacccctcttgggtatcatttggcctctctgcccgtggatgtgagaattggcaaactaatgttgtttgggtctatcttccgctgtttggatcctgctctcaccattgctgccagtttggcttttaagtctccgtttgtatctccctgggataaaaaagaagaagctaaccagaaaaagctggaatttgcattcgcaaacagtgattatctggcccttctacaagcgtataagggatggcagctaagtacaaaagaaggcgtgcgtgcaagttataattactgcagacaaaacttcttgtctggaagagttctgcaggaaatggccagcctcaaacgacaattcacggaactgttatcggatatagggtttgcaagggaagggctcagagcaagggaaattgagaaaagggcccaaggaggagatggtgtcttagatgccacaggagaagaggcaaactcaaatgctgagaaccccaagctgatatcagcaatgctgtgtgctgctttgtatccaaatgtagtgcaggtgaaaagcccagaaggaaaatttcagaagaccagtactggagctgtcagaatgcaaccaaaatcagctgagttgaagtttgtcaccaagaacgatggatatgtacacattcacccttcatcagtgaactatcaggtgagacactttgacagcccctacctgttgtaccacgagaagataaaaactagtcgagtattcatccgagactgcagcatggtgtctgtgtacccgctggtcttgtttggaggaggccaagtgaatgtgcagcttcaaagaggagagttcgttgtctccctggatgatggttggatccgttttgtagctgcttcccatcaggtggctgaactggtaaaggagcttcgttgcgaacttgatcagcttctccaggataaaattaaaaacccaagcattgatctgtgtacgtgtcctcgaggatcccggatcatcagcacaattgtgaaacttgtcaccacacaataaaaagcagtcttagagagtgcttgctactcacctgcttctagctcacctgggaaataacagcagaacctctacctcgaactaaagacctattggggctggccctggtggaggagcccagggcatgaagcccaaggcagctgaggcagtgtatatacccttagggccatttctaacaaagccttggccactcccagcacaatttggagtgtcaagggtgagagcctaaaacccagcttgcctgtctttgtctctgtgattgttctggagtgaattaagttcacctgataactcaaaagtgaatgtataatacaattctgttttaatctgtgtattctttttctcctactttttactggggtgagaggggcatgaagagaaatacgccttttttttttttcttttcctgtcgccaaggctcgactgagagaagtcagaacagagaaggggaaaaaaaacccaaaattatgtgaacaagcaaaattaaaatttcattttaggctattggctactgagtaaacttgacttgtgaggggtttttatttttactcattaaaagtcaacttaaaaaaaaaaaaaaaaaaaaaa

SEQ ID NO: 1111 - DNA, 1989 bp, Homo sapiens
gactggaaaaccggaagtgaaatcgtggcagccgcctcggccgccgcaatgcagagagaggagaagcagcttgaggcatcattagatgcactgctgagtcaagtggctgatctgaagaactctctggggagtttcatttgcaagttggagaacgagtatggccggctgacctggccatctgtcctggacagctttgccttgctttctggacagctgaacactctgaacaaggtcttgaagcatgaaaaaacaccgctgttccgtaaccaggtcatcattcctctggtgttgtctccagaccgagatgaagatctcatgcggcagactgaaggacgggtgcctgttttcagccatgaggtagtccctgaccatctgagaaccaagcctgaccctgaagtggaagaacaggagaagcaactgacgacagatgctgcccgcattggtgcagatgcagcccagaagcagatccagagcttgaataaaatgtgttcaaaccttctggagaaaatcagcaaagaggagcgagaatcagagagtggaggtctccggccgaacaagcagacctttaaccctacagacactaatgccttggtggcagctgttgcctttgggaaaggactatctaattggagaccttcaggcagcagtggtcctggccaggcaggccagccaggagctgggacgatccttgcaggaacctcaggattacagcaggtgcagatggcaggagctccaagccagcagcagccaatgctcagtggggtacaaatggctcaggcaggtcaaccagggaaaatgccaagtggaataaaaaccaacatcaagtcggcttccatgcatccctaccagcggtgagtgtggctggcaacctcgactccctggtgctctttgcagagttgggcagtgaaattaccttttgctcaaggctcacctagatgggtacaataaaaagaacatgggctttcagcagcagacaaatcccacttccaccactgactagctgtgtgaccttggacaagtgacctaatttttctgagcctgtttctcatttgtaaatggtgataatacctacctcatagggttgttgtgaggattaaaatgaggaaatgaatgtaaagcacttagtacagtatatgaaataatgggtattcaataaatgatagtttctacagatccttctccccaccaccctccacagtccttgatccagaacttaccctaatctgatactgcctcacgtcaatggtgagctgatggacacaagatcaaataaggctatgcttattttgtgctgccagaaactgtagcaacctctgtgttcttagaggcacactgtttttgcaggccctcctgcctgggtttcattctggctatccctctaaggcgcaaggtgaagaagcttctgggccaggaaggaaaaaaaaatgcccacctgcagctctggtgaagcttgggcctgctctcctttccatcctctaaggagccaacttggcttttacctgtcaaatagtcataaagtcccctatcctttaccccaccttatacacacgaggctttctcaggaagtggctctgccaggcaggactatgtgggaaagggtttttccttagcacacgaaaaagccccttcccctggattcatgtttcttattttggagggagaagggaattgcacttcacactgccatcagggtttagttgacctcataatggtgcccactttctcgactttggccaggatttccttcaaagaaaacgactttccttcatttccctaagcctgtggcccaaatggtggaccagaatgatggtgggagggggcaacccccagtagctttgcctgcttttataaagttgaacaaattgaatttagacattcaggctaacctgcctttcttagtactcctttgttggcatgggcaggggttgagtcagcagaagtggaccaaaggattcctctgaataaagttatttaaattgatgttcactg

SEQ ID NO: 1112 - DNA, 2006 bp, Homo sapiens
ggcttgggcacaagatggccgctgcgcgcccagaggcccagagtcggagctcaccgactccggagtcgcgatcccaggagccactggacctggtcctggtgcctgatgactgccggcctggcacacccccgagtgacctcatcgagatccaggtggtgaaggtgacggacaccacgctggtccctgagcccccggagccaggttctttccactgtgccttgtgccctgctgccttccggctggtttccgagctgctgttccacgaacatggccacttggctggggccgagggaggcgggcagggtggggacccgagccggtgccacgtgtgcggccacagctgcccgggccccgccagcctgcgcgcgcactacagcttgcacacgggggagcggccctaccgctgcgcgctctgcccccgcgccttcaaggccttggcgcccctgctccggcaccagcaccggcacggggtggagccgggcacctctcggaggcctccggacacagcggccgttgcagaacagaggcccggggtggccccggagagggcggaggtggtgatggcggcggcggcggcgggcgcagcggtggggaagccttttgcctgcaggttctgcgccaagcccttccgccgctcctcagacatgcgagaccacgagcgcgtgcacactggcgagcggccataccattgcggcatctgcggcaagggcttcacccagtcctcggtgcttagcggccacgcccgcatccacactggcgagcgcccgttccgctgcacgctctgcgaccgcaccttcaacaactcctccaacttccgcaagcaccagcgcacccacttccacgggccggggccggggctgggagactctggaggccagctgggctcgtcggcggctgaggggtcggggagcgggtgtggggtaggggaccctgcggaggaggggcggggggagaccgcgaaggtgaaggtggaggccgaccagtaggctgcagaccagggacatgggttagttaaggcggaggtacgaggccgacccggggagggggacggggtggggaaacggaggcaggggacagaagaggggagattgggggagagatgacagctgcagggatggttgtgagccgctagtgatggagagcagagggagagggccaggctccagactcccacacgcccacacagcacctctgccaggcctaggagaggacaggtgcagctcttgcagctctgcgggtgtgcggccaaaggcaaggcccacgggctggatgtcacttccccgactgtctcttggttggcttgtccttgtgcaagacccagcctgtcacgacagagcctgggcacttcagaggaggagccaggatcgaatggaaggggggaattggggtccaccatagtcttctgctctggtcctccacgggtggaccaggatggagtctcctgcctacctcactgcattgcactggacctgggatgcctatccaccctctggcagaagacactcaccaggttatctgtgaagagactctgggatcccatcacctcaaagccagagggtccccaagtcaccgctgagagcacttgagcctcaaggatgtaagcctgaccataggatcttgactccaacagcggcaacccccacccccattgtggtccgtccttaacccatccactcttcttcggaggcaactgagaacacataaagcaagcagctacctagcatccccctcctaaagctttagactcagagcccagggtcccccacaagcctcaaggtagcctcaggtttctctaatttcctccactcccagttcgaagcaaacagcttactgcctagtccccgccaatcccaagggcgggctggctgatggcagcatggtgggctggcctgggtgtggagtgaaagagtcactgtggtgggggcgagaggaggacttgggagctggaggtgtgacaccttcagttctgttcctattaaaggaccttctgaagggcaaaaaaaaaa

SEQ ID NO: 1113 - DNA, 2981 bp, Homo sapiens
agtgcggaagcggaagaggctgcagggccgggaagcctctgtttggtccggccaggtcccgggatccgggccgccagctgcgatgccaagtccccggaggagcatggagggacggccgctgggcgtctccgcttcgagcagcagcagcagccccggcagcccagcccatggcggcggtggcggcggcagcaggtttgagttccagtccctgctcagcagccgcgccacggccgtggaccccacctgcgcccggctccgtgcatcggagagcccagttcaccgccgcggctccttccccctggccgcggcgggcccctcgcagtcgcccgcgcctccgctgcccgaggaggaccgcatggacttgaacccgtccttcctgggcatcgccctgcgctccctgctggccatcgacctgtggctgtccaagaagctgggggtgtgcgcgggagagagctcgtcgtggggcagcgtgcgaccccttatgaagctgctggagatctcgggacacggcatcccctggctgctgggcaccctctactgcctgtgcaggagcgacagctgggccgggcgcgaggtgctgatgaacctgctcttcgccctgctgttggacctgctgctggtggccttgatcaaagggctggtccgcaggcgccgcccggcccacaaccagatggacatgtttgtcactctctcggtggacaagtactccttcccctcgggccatgccacaagggccgccctgatgtcgaggttcatcctgaaccacctggtgctggccattccactgagggtgctggtggttctgtgggccttcgtcttgggcctatccagggtcatgctggggcggcacaatgtcaccgacgtagcttttggcttttttctgggctacatgcagtacagcatcgtggactattgctggctctcaccccataatgctccggtcctctttttactgtggagtcaacgatgacaccatctcattgattatggcaccaggaagtctgaaggtttccacattcgatgatgtcaacctaaaccagcagccatcccgcttgtccctcttaggcatttcaggcttcctttgggatttcaggtgtcccatgatcttgatgtgctgctaggctggagcacacactggccattactgaacacagccatattagggaaagcaaaaaaacccaaaaaatcctctattgtatatttattcaacaactgtttatgtttccaggacaactgcaaagaaaacaagctgaggtggttatactgttgctgttaaaagttggtatcagtaagatttgtgttttgtgataatccctaaatcaacataccacttgtaaactgaacttcgagaaagaaacatgatgttcattctgtaaatatacatgcagacaggtcatgtactaatcctagtccttttcctgaggtagattttaaacagtatttttaaagtccaagacataggtttttctagtttattccctgaagatctgttgccacagttgggagatttcttcttaatcctgattttcttggtaagcttttttactttattatctctataatttattatctctatccatatttgtggatcgggtagtgggaaaagagattataatacttgtctttctctcctctccctccatccctcaaaagatctttatgcatttcccactactcccttactgtcttttagcattcagagaaaaagccaacttgcttaaagaggaatcacttaaaaggtaggcatatctaagatgctcatagaagaggaagaatgggacatggccccatgcttatttttgtttacaacgtaacatggcatgagagagggcagagaaactaagttgctggggaaagttagaggaactgaaagtttgggaataggctgaccacatattatgccagtgaccagtatgacaggagatggggccctgctgccagtcatctccactgaataaagaataatgctcctctttcagggtaataaagtggggaaaaggaacgtcttctcaatgcaagaacataagctttctcgtatatacctgtatgctacagtttttcacatggaattccgttttctgaggtacagcacattttaggtaacagtatttaacttgaaattcatcatgggagtctgctgctataccaggcacaagataaaactccaaaatttctgtttacattgacctttacatttaaagctgttcatccatggtgcctccccaaatcataagaccaaagaccaccaaacgcagggtggactctgctcattattctttgacccagaaagactggagaaggtatgtgctttaagtgctgctctacctgaaaagaaatcctttaaattacctatggaagtgatgtcctcagataatcttaatgactattttggcatttataaatagaaatgattatggactttgatctgccatacggaggttcggaacctggagaacggctgtgataagtaggttttgattgagtgaaagcatgagcttgttcagagtgaggggcatagtgaaaaaggaacagccatgcctcaaaatcaaatcatttgcattcccacagcatcctgaataccgactacctcttcacttgctaaagcagctaaactgtgaagctctaagtggtttgggtttgttgtttaaccttagcgagatcctttaactgcagcaatattcaagccagatatttggaagcaaatgatatttcctcttgcagtgtccacaaatctgaatattaggggcatgaaattaggcttaccatctgatttgtaattacaattttggaattctctgttttagttgctgaggcctgagttttctggctcttaaagcatagatcatttcacctgatgtttttgaagcatcctaagtacagtagagtagaaaactgatttctttgttaattgtacactgaataatgccttttaaaaatcaaaataaaattaacaaataatggtgaatgaagtgagatgaaaa

SEQ ID NO: 1114 - DNA, 2122 bp, Homo sapiens
acgtgctaggggagcgggcgggcagatggctgtgtctgtaagcgggaggcgtgcccggttcatccaaggcgcaagatggcgctgctttttgcacgttctttgcgcttgtgccgctggggagccaaacgattgggagttgcctccacagaggcccagagaggcgtcagtttcaaactggaagaaaaaaccgcccacagcagcctggcactcttcagagatgatacgggtgtcaaatatggcttggtgggattggagcccaccaaggtggccttgaatgtggagcgcttccgggagtgggcagtggtgctggcagacacagcggtcaccagtggcagacactactgggaagtgacagtgaagcgctcccagcagttccggataggagtggcagatgtggacatgtcccgggatagctgcattggtgttgatgatcgttcctgggtgttcacctatgcccagcgcaagtggtacaccatgttggccaacgagaaagccccagttgagggtattgggcagccagagaaggtggggctgttgctggagtatgaggcccagaagctgagcctggtggatgtgagccaggtctctgtggttcacacgctacagacagatttccggggtccagtggtgcctgcctttgctctctgggatggggagctgctgacccattcagggcttgaggtgcccgagggcctctagtatgtccattactggagtccctaatcacgcctttggccagcctccttttgaaagtgtccgaagcctttttactttgcctcaagcaacctctagctcccacaattcagtgttgggtcctctgtgcaatatcatgatcatcttcctcatcccctaccttgtgaaagctaggcatacagccaaaccctccttttccccacccaccaactactgccaatttcctaggctaccatgggtgtatcttccttgacctgcttccttcagtccctctgcctccctttgcccaggcctttctcagactgtattccatcctggggtcttatcattcagctttgtttgaatttattaatcaccatgatacctctccctccctttgtccacatgtaacttgttcttggggctctaccagatggctgaagagtaaatcctttctacctctggctgaaggagtggtgcagtcaatgacttggccctttttctacagcacatttagagtttgggctctggctccctcagtaagtgctttattaactcagtgtgtcaaaatgaaaacagagccctccttccccagtagctcagtgccacagaccttcagccccacacagctgtagctatccttaccctgagtccatctaccttaaatctgtacctctgacacccagccagtctgtcataatcattatcccagttataaccttgaccaaaggggaagagagacacttgggggatatctaggggatgagtgctagaaactatttatttatttttgagacagagtctcactctgtcacccaggctggagtgcagtggcatgatcttggctcactgcaaactctgccttttgggttcaagcgactctcgtgcctcagcctcctgagtagctaggattacaggtgtgtgccaccatgcccgtctcatttttatatttttagtagagatggggttttgccatattggccaggctggtctcgaactcctggcctcatgtgatcagcccaccttggcctcccaaagtgctgggatttcaggcgtgagccaccacacccggccaaaactgtttattcttgagaagttccatcttcatttctgccacagttggaacttcccgaggaaggaaggaggcctgaggttttgcacaatctgtttcagagcctgtttagactcaaacctatgcttcccttggcagcagaatacacttaacctaaagcagtatttggagttgagaaaaacctggtggggtaagtgaatatgtactgtttggtagggtaggtagagaagctgtgctttgaccctgtgattccatctttttctaccttctatgatggtgatgaagctagatacccctagggaagaaagaaggactgggtttagcaaaaatgatttggtaattaaagtttatttgaacacaaaaaaaaaaaaaaaaaaa

SEQ ID NO: 1115 - DNA, 16179 bp, Homo sapiens
gggatttccctcaaagcccagggtccggggacctggaaagtagaagtggagggattcaattctccgcgcgattgaggcgctagcggcggagctggacggcctgggaaggcttcggctcctcggctgcggctccagcccggacggcgccgcgcaactttgccatccttctggcccagccccggctacaggaggaccccgcgggcaacgcgcggagttcctggcacttcccggcggtgtctcttgttgtctgcccggggaccgacttcgcatgctctcaggctgacctgtccaagcccgaacaccgggaccatgcactcagccgggactcccgggttatcctcgcgccggacaggcaactccaccagctttcaaccaggaccgccaccgccgccccggctgctgctgctgctgctgcttctcctgtcactggtaagccgcgtcccggcacagcccgctgccttcggcagggcgttgctgtcccctggtctcgcgggggctgcaggggtccctgctgaggaggccatagtgctggcgaaccgcggactccgggtgcctttcggccgtgaagtctggctggatcccctgcatgacctggtgttgcaggtgcagcccggggaccgctgcgcggtttcggtactagacaacgacgcactggcccagcgaccgggccgcctgagtcccaagcgcttcccgtgcgactttggccctggcgaggtgcgctactctcacctgggcgcgcgcagcccgtctcgggaccgcgtccggctgcagctgcgctatgacgcgcccggaggggcagtagtgctaccactggtactggaggtggaggtggtcttcacccagctggaggttgtgactcggaacttgcctctggtcgtggaagagctgctggggaccagcaatgccctggacgcgcggagcctggagttcgccttccagcccgagacagaggagtgccgcgtgggcatcctgtccggcttgggcgcgctgcctcgctatggagaactcctccactacccgcaggtccctggaggagccagagagggaggcgccccggagactctcctgatggactgcaaagctttccaggaactaggcgtgcgctatcgccacacagccgccagtcgctcaccaaacagggactggatacccatggtggtggagctgcgttcacgaggggctcctgtgggcagccctgctttgaaacgcgagcacttccaggttctggtgaggatccgaggaggggccgagaacactgcacccaagcccagtttcgtggccatgatgatgatggaggtggaccagtttgtactgacggccctgaccccagacatgctggcagccgaggatgctgagtctccctctgacctgttgatcttcaaccttacttctccattccagcctggccagggctacttggtgagcaccgatgatcgcagcctgcccctttcctccttcactcagagggatctgcggctcctgaagattgcctaccagcccccttctgaagactctgaccaggagcgcctctttgaactggaattggaggtagtggatctagaaggagcagcttcagacccttttgccttcatggtagtggtgaagcccatgaacacaatggctccggtggtcacccggaataccggtcttattctctatgagggtcagtctcggcccctcacaggccctgcaggcagtggtccgcaaaacttggtcatcagcgatgaggatgacctagaagcagtgcggctagaggtggtggctgggctccggcatggtcaccttgtcattctgggtgcttccagtggcagctctgctcccaagagctttacagtggctgagctggcagccggccaggtggtctaccagcatgatgacagagacggctcgctgagcgacaacctggtgcttcgcatggtggatggaggaggcaggcaccaggtacagtttctgttccccatcaccttagtgcctgtggatgaccagccacctgttctcaatgccaacacggggctgacactggcagagggtgaaacagtgcccatcctgcccctttccctgagtgcaactgacatggattcagatgattctctgctgctttttgtgctggagtcacccttcttaactacggggcatctgcttctccgccaaactcaccctccccatgagaagcaggaacttctcagaggcctttggaggaaggagggggcattttatgagcgaacagtgacagagtggcagcagcaggacataacagagggcaggctgttctatagacactctgggccccatagtcctgggccagtcacagaccagttcacatttagagtccaggataaccatgaccctcctaatcagtccgggctacagcggtttgtgattcgtatccatcctgtggatcgcctccctccggagctgggcagtggctgtccccttcgtatggtggtacaggaatcccagctcacaccactgaggaagaagtggctgcgctacactgacctggacacagatgaccgagaactacgttacacagtgactcagtcccccacagacacagacgaaaatcacctgccagccccactgggtaccttggtcttgactgacaacccctcagtcgtggtgacccattttacccaagcccagatcaaccatcataaaattgcttacagacccccgggtcaagaactgggcgtggctactcgagtggcccagttccagttccaggtggaagaccgagctgggaatgtggctccaggtacctttaccctttacttgcatcccgtggacaaccagccacctgagatcctcaacaccggcttcactattcaggagaagggtcaccacatcctgagtgagacagagttgcacgtgaatgatgtagacactgatgttgcccatatctctttcactctcactcaggcacccaaacatggccacatgagagtgtctggacagatcctgcatgtagggggtctcttccacttggaggacataaaacagggccgagtttcctatgcccataatggggacaagtccctgactgatagctgctccttggaagtcagtgacagacatcatgtggtgcccatcactctcagagtaaatgtccggccagtggatgatgaagtgcccatactgagccatcctactggcactctggagtcctatctagatgtcttagaaaatggggctactgaaatcactgccaatgttattaaggggaccaatgaggaaactgatgacttgatgttgactttcctcttggaagatccacctttgtatggggaaatcttggtcaatggcattccagcagagcagtttactcaaagggacatcttggagggctctgttgtatatacccacaccagtggtgagataggcctattgcctaaagcggattcttttaacctgagtctgtcagatatgtctcaagaatggagaattggtggcaatactatccaaggagttactatatgggtgaccatcctgcctgttgatagccaggccccagaaatctttgtaggtgaacagttgatagtaatggaaggtgataaaagtgttataacatcagtgcatataagtgctgaagatgtcgactccctgaatgatgacatcttgtgcactatagttattcagcctacttcaggttatgttgaaaacatttctccagcaccaggctctgagaaatcaagagcagggattgccataagtgctttcaacttgaaagatctcaggcagggccacataaactatgtccagagtgtccataaaggggtggaacctgtggaggaccgatttgtatttcgttgttctgatggcattaacttttcagagagacagttcttccccattgtaatcattcccaccaatgatgaacagccagagatgtttatgagagaatttatggtgatggaaggcatgagtctggtaattgatacacccattctcaatgctgctgatgctgatgttcccctggatgatttaactttcactattacccaattccccactcatggtcacatcatgaatcagctgataaatggcacggttttggtcgaaagcttcaccttggatcagatcatagagagttccagcattatttatgagcatgatgactccgagacccaggaagacagttttgtgattaaactaacagatgggaagcactctgtggaaaagacggtcctcattatagttatccctgttgatgatgagacgcccagaatgactatcaataatggactagaaatagaaattggggataccaagattatcaacaacaaaatattaatggcaacagatttagattcagaagacaaatctttggtttatattattcgttatgggccaggacatggcttattacagagacgaaaacctactggtgcctttgaaaatatcacactgggcatgaattttacccaggatgaagtagacagaaacttaattcagtatgtccatttggggcaagagggcattcgggacctaattaaatttgatgtgactgatggaataaatcccctcatagatcgttacttttatgtgtccatcgggagcattgacattgtcttccctgatgtgataagtaagggagtgtccttgaaagaaggtggcaaagtcactcttacaacagacctactaagcactagtgacttgaacagtcctgatgaaaacttggtttttaccatcaccagggctcccatgcgaggtcacctggaatgcacggatcagcctggtgtgtccatcacgtctttcactcagctgcaactggctggaaacaaaatctactacatccacacagctgatgatgaagtgaaaatggacagttttgagtttcaagtcaccgatggacgtaaccctgtctttcggacattccgtatctccattagcgatgtggacaataaaaagccagtggtcaccatccacaagctggttgtcagtgaaagtgaaaacaagctgattactccttttgagctcactgtcgaagacagagatactcctgacaagctcctgaaattcactatcacccaggtgcctattcatggccatctcctattcaacaataccagacctgtcatggtttttaccaagcaagacttgaatgaaaacttaatcagctacaaacatgatggcactgagtcaagtgaagatagcttctccttcacagtgactgatggcacccatacagacttctatgtttttcctgatacggtgtttgaaacaaggagaccccaagtgatgaagatccaggtcttggctgttgacaacagtgtcccccaaatcgcagtgaataagggggcctctacacttcgcactctagccactggccacttggggttcatgatcacaagcaaaatattgaaagtggaggacagagacagcttacacatttctcttagatttatcgtgacagaggcccctcaacatggatatcttctcaacctggacaaaggcaaccacagcatcactcagttcacacaagctgacattgatgacatgaaaatatgctatgtcttaagagaaggggctaatgccacaagtgatatgttctattttgcagttgaagatggtggtggaaacaagttaacgtaccagaattttcgtctgaattgggcatggatctcctttgaaaaggaatattacctggtcaatgaggactccaaatttctagatgttgttcttaaacgtagaggttacttgggagaaacttcttttataagtattggcacaagagacagaactgcagaaaaagacaaagacttcaagggcaaagcacagaaacaagtgcagttcaacccaggccagaccagggccacatggcgagtgcggatcctgagtgatggggagcatgagcagtctgaaacctttcaggtggtactctcagagcccgtgctggctgccttggaattccccacagtcgccactgttgagatcgttgatccaggagatgagccaactgtgtttattccccagtccaaatactccgttgaagaagatgttggtgagctgttcattcccatcaggaggagcggagatgtgagccaggagttgatggtggtctgttatacccaacaaggaacagcaactggaactgtgccgacttccgtgttgtcttactctgattacatatccaggcctgaggaccacaccagtgttgtccgctttgacaaagatgaacgggagaaactgtgtcggatagtcataattgatgactctttgtacgaggaggaggaaaccttccatgtccttctgagcatgcccatggggggaagaatcggatcagagttcccaggggctcaagttacaatcgttcctgacaaagatgatgaacccatcttttacttcggtgatgtggaatactctgtggatgagagtgctggctatgtggaagtgcaggtgtggagaacgggcactgacctgtccaagtcttctagtgtcacagtgaggtctcggaaaacagatcctccctctgcagatgctggaacagactatgtgggcatcagccgtaatttagattttgcacctggagtcaacatgcagcctgttcgtgttgtcattctggatgaccttggacaaccagcgctggagggaattgagaaatttgaactggtgcttcgcatgcctatgaacgcagcccttggcgagcccagcaaagccacagtgtccataaatgactctgtctccgatttgcctaagatgcaattcaaagaacgaatatatactggcagcgaaagtgatgggcagatagttacaatgatccataggactggggatgtccagtacagatcttcagtgagatgctacacccggcaggggtctgcacaggtgatgatggactttgaagaacgcccaaacactgatacctccatcatcacattcctccctggtgagacagaaaagccctgcattcttgagctgatggacgatgtgctctatgaggaggtagaggagctccgcctggtactcggcactccacaaagcaactctccctttggggctgcagttggtgaacaaaatgaaactctcataaggatccgagatgatgctgataagactgttattaaatttggagaaaccaaatttagtgtcactgaacccaaagaacctggagagtcggtggttataagaattccagtgattcgccaaggagacacttcaaaggtttccattgtgagagtccacaccaaggatggctcggccacctctggagaagactaccaccctgtgtcagaagaaattgagtttaaggaaggggaaacccagcacgtggttgaaatcgaagttacctttgacggggtgagagagatgagagaggccttcactgttcacctaaaacctgatgaaaatatgatagcagagatgcagttgacgaaagccattgtgtacatagaagaaatgagcagcatggcagatgtcacttttccttctgtccctcaaattgtatccctgttgatgtatgacgacacttccaaagctaaggagagtgctgaacccatgtctggctatcctgtcatctgtatcacagcttgcaaccccaaatattcagactacgataaaacaggctctatctgtgcaagtgagaacatcaatgacactttgacgcggtaccggtggctgattagtgcacctgcgggccctgacggtgtgaccagccctatgagagaagtggacttcgacaccttttttacgtcatccaagatggtcacactggactccatatactttcagcctggctcccgggtacagtgcgcagctcgtgctgtgaacaccaatggggatgaaggcctggagctcatgagccctattgtaaccatcagcagagaagaaggtctttgtcagccccgtgtacctggggttgttggagcagagccgttctcagctaaattgcgctacacaggccctgaggatgcagactacacaaaccttatcaagctcactgtcacaatgccacacatagatggcatgctccccgtgatctccactagagagctttccaactttgagctcaccctcagccctgatggcacaagagttggaaaccacaagtgctccaacctcctggattatactgaagtgaagactcattatggtttcttgactgatgctaccaaaaatccagaaataattggagagacatatccttaccagtacagcttgtccatcagaggttccactaccttgcgcttctaccggaacctgaacctagaggcctgtttatgggagttcgttagctactatgacatgtcagaactccttgctgactgtggtggcaccattggaacagatggacaggtcctaaacctagtgcagtcctatgtgacccttcgagtccctctgtatgtttcctacgtgttccattcccccgtgggggtaggaggctggcagcattttgacttgaagtcagagcttcgtctaacttttgtgtacgacaccgccatcttgtggaatgatggaattggcagccccccagaggctgaacttcaaggttctctctatccaaccagcatgcgcatcggtgatgaggggcgcttggccgtgcacttcaagacagaggctcagttccatggcttatttgtgctgtcacatcccgcatcctttacaagctcagtgatcatgtcagctgatcatccaggcctgacattttccctccgcctcataaggagtgaaccaacctataaccagccagtacagcagtggagctttgtctctgactttgccgtacgtgactactcagggacctatactgtgaagctggtgccatgcactgccccatcacatcaggaataccgcctgccagtcacctgcaaccccagagaacctgtcacctttgaccttgacatccgattccaacaggtcagtgatccagtggctgctgagtttagcttgaacacccaaatgtacctgctctctaagaagagtctctggttgtctgatggatccatgggattcgggcaagagagtgatgttgcttttgcagaaggtgatataatttatggtcgtgtcatggtggatcctgtccagaatctgggtgactccttttactgcagcattgagaaggtgtttctatgcactggagctgatggctatgttcccaagtatagtccaatgaatgcagaatatggctgcttagccgactctccttcactcttatatagatttaaaattgtggacaaagctcagccagagacacaagcgaccagttttggaaatgtcctatttaatgccaaactagcagtggatgaccctgaagccattctcttagtgaatcagcctggatctgatggatttaaagtcgactcaacaccactctttcaggtcgctctaggccgagaatggtatatacatacgatctatacagtgagatcgaaagacaatgccaatcgaggtattggcaaaagaagtgtggagtaccattctctggtgagtcaaggaaagccccaatccaccaccaagagccggaagaagagagagatcaggagcacaccctcactggcatgggagattggtgctgaaaacagtcgaggaacaaacatccagcacattgccctggaccgcaccaagaggcagatcccccatgggagagcacctccagatggcatcctcccctgggagctcaacagccccagctctgcagtcagcctggtcactgtggtgggaggcaccacggtagggttactcaccatctgcctcactgtcattgcagtgctgatgtgcaggggcaaggaaagtttcagggggaaggatgccccgaaaggctccagcagcagtgagcccatggtgcccccacagagccatcacaatgacagctcagaagtttgatgactgcaggtagaattcaaccttttccgtaagtgcctcggaaaagatcacaatggaaccttaaatacttctggtaaaccatagagaatggaggatggctgtgatgaagctgcttagagaatatgactgtactaatggagtttgatttgaattctccatactcttttttgcatcaaaggacaaattaaggcatctttcctcttgccccaaaggcagcaacaacgtactcatatgtacacagagccatgatgtgaggaatgtactcctcattttagacatattctctatgcagtggagataaatctattaaaaggtgctaacagactctcttacaagtgtaagaggaatctactgttgctatgttagtgtgaatgttgaaggtgcaattatcacattgtttattaattgtataacagattattactagaaaggtttttgttgctagtctggaaaactggtgaacacactgtttattatgacaagttttcaaataggtgaagacagcatagaattatgaccagggtggctcaacccacaaatcaactgatctactacttgggagacagtggaaggaaagatagagggaaggaagttcactcacttgaatttgaattgcttctcattctcatcagactctccttgttttgtttgcatatttaattttaaattaaaccaaagaatatgttaattctgaaagagatttttaagagatgctgctctgttttggcatatagtgagtaatggtagagctcttgcatggtaatataccttattggtgctcaacatttgtgggaaattagagggttggtgagattttggtgatgaataaatgccatagagttagagtcactacaagacaatgttctctaagaactgagcctagatgtttgcagtattgaacccataaatgataataagaaacattgttacagatggtgaagggagaaagtggtatttattaatataatgtgtataatcagagtgcctcttatacatactttatagaataaaggaacattttgacagatgaggttatccctcggagtagcgtaatcacacaataacatttagaacttaaattggctacaggacattttattagctttctatccagcatctggtccaaacgatgggactctctgcaactatcattccagaaatggtcttggaggtggccagaatcattgaccatatttttatttggttcaagaagacatcgctctggcatccccagttcagtgaactggtacaatgtggtccctctcaatatttaaaaatataatttgtaacagtgcttaccattcacctcccaaagccaaggaacttgagtgagcttccttggcaagcctcccattgcctttctgcatcaatgtgtttgttaccaaatagcagaaatttcgcttagaaggggaaaacttcagctttccaaaagctagtaaacatgtttcaaagaaaaataaggtcaggagaaaaagaataatgcctacagattatccttcagatgctggctagaatcccctttgacttctagccataagctggccacattggacatcttggtcactgcagaattttaaaaggcaaacttctcagaacagatgtgcacatcttaatttggtgtctgtaagtatcaaccatttcttgatcaagataaggaagcaacactgatactgagagagaggtcatatgtccaatagttgcctttcttctcttaggcagctctgcacttcatgttcagttttttaaaaatagactgtagtatcctttcattggagaatttacaaaaatatcatctacagctcaaaagtcccactaacggcttatatgaacagaaagtactgtgtagcccaggagtttatttagcaagataaatagtggtaatttcttaatcattcccctttcctttgctttaccttctggcagatgcttagctacttctttggctacctcataatttgtatgggaatgaacatgaattagggaacttcaaatagtgcgtagacttttccctacttaccattgggttcaattgatgtagactgttagagcaagtatactcaatcaacttgctgatattttagtagttaacagcttccgagcctatcatgcaatttggagtctgtcaatgaatatagcaatcggtgaagcattactgtacgaagtctgttttcaggctttgggtcaagctggttttataccaaatttcactctacaatgcatattctaatgaagctactttatataaattggagagcttataaaatgcagaacatttctatcctatcctaccaaatatttatccttctctgtcctctattctcttactctcctctctccctttttccttccctttattcccttgaaaaaagagaatctgtgggaaataggcagatatagctttttaaaatataaagtacttgggattttgcattatttttcttaatatctatttactaagtatgtaatttaatatacattaattattttttgaaactcttgttagtgggaagaatatggtaaattttttgttaaataaaatagacccttatgtttagcattttgtttttagagaactattctggtactatcagaacaaatacataaaataacttcccatagagaacaggatatagcaataatagctccttagatactcagtggcttctgactccaatcaaggtcttgttgatattatatagtaaaaataaaaccaaaaataaatattattcaagtggctcttctaagcatgtgaatcatgaagcactgaaatatgtattttaatgatgatcttatttattcccatttttgcccttagttaacatttactggtgctcacctaggattggctattctgagggattgcatagaaaccaagctccacttgctgtccttgggaaggttataactgaatgcagctctttatttggactaaagtgtcaggatatgcattagattctctcctgaaccaaaaacacaacagtcattatctgtgaaccataatttaaaaatctttctagaataacaacagcagactccactcttgtttgtctaaaagagccctactgggtatggatcattctgatgacagatttatacaaaatgattcaaaccagtaacttagtaaaattgaccttcgcaaaacctcactgggggagtgccttgtagagctgtgggtgggactgcacattcttttcctcttagtaaaagataggcccactttattccaagaataacacttagcacataaactcttcttccagctcgttagcagcattagcaccttctgaattccaccctctcagaagaatccacagtgtttgaacaatttgcataaaggtcagctagcatcctgctgccaagccactgcatagcatttgtgataagaaggaccaactctaggctcaatatgaagggatttagttctgtaagcagcaaaaaagcttctttatcaagtcatcttacctctaattcttttccagtgtgccaactccaaagtcaacattaaaaatgtaaatggacctgtgtaaatatcacagagagcttttccttatacatctcaatgctgagagttaaaatattcccaggttaaaatttttttaaagtaccaataatagagctaaatacaatgacatttgcttttaaaaggtggatattttatttctgctttttgaaaatacttatttagtattgacttggaagccaatttggtcctttaataagtaaagaaaataatatgtttaaaaatgtaaatgttttacaaatttgaaactttcataattgtattaatcagaaaacaagcacattgccattctttgaaactcatgtttctagacatgacagcagtaataaaaggatgaaaacaagtgtcttcactaagcgtatggccaataaatgggacccaaacgttcaatctgttcagtttaccaaggttcagaaatacgtaatttagcaggaaactataaataccagtgctatcacagccacacatacacacacacagacataaaataaccaaacatctcatttctaggaaagagataacactaaaggcatcataggtttaactgaaatacgttatatgaagttttacaaaaaggtcaacagaaagctcatttgtgaaaacatactctcatgggagcttctttaacattagttcagaggttaatatatttcctggaggtgttttcctagaattgattgcactattgcatggtaataacatttaattgttaaggaaacattatatataggttcaaattatcccttaatgttgatttctccccttttccatggattttgatactaagaaacaaaatgctttgagattttggtaactattttgattttgataaaacatgttaaaatagaaggacatgatatttttctatagtttccatcaggaagagtacatcagaaacttctccataaggaaagaaaactgactctctcttgaactagtgttgacaaaatacactaatgtctttcttaattttattttattaggagaaaaatcagaatattaaatttgcaaacttttgaacagcagtaatagctccttagacactcagtatctttcttccctatctttcaagcacatttaatttctttcccctggtatttgtttgctttgtgttttttcaatattttgtttgctaaagaacaataacaacaacaaagctggtccagccctgacacctacttttgctttttttctttctttcttttaatttgttgaactataggtttctttctgagatgtatttttcattcttccaataatgctctctttttcatttcaaaaccattaccactttcaatatgtaattaacatcctcattcatcagaaagctggtaagtccacacagcatttgtgcagtatcccttctgtgtaaaatgttaaggctttcagatgaaagaaaaaagaacttcctgcaaaagatcaaaagcatcatactaaataaaatgatgacaatatgtgccttgatttttctctcaatggaggttcaacattgacatttaagatgtaaaaaaaattactttgatggtttaattaagaataataagtcaaatatcacatgtatgtagttcttttggatgaccgaataccttaaaatgaactaaataactgaaataaagtgttaaaatgttaacagcgttgaagtttttaaaattataattatcaaatgcacaatgttcttttactatgccaaatgttgcctacactgattacatgattgtcacagtttaagtgaatttctactatggatctttattttccccaatgtttggatcatcctctcagataagaattgtcagtattgcacctcaagaaagaagaaaaaataagaatgtaaatttttaaaagctagcattaaaagtaaagagcagtacaataaaaatcacttaaaatagagaaaggcaactactgagtaagaagaaaagataatttctgtaaaagctaaatttatgcacattacaaaaagtagtcaagtcagtcttccattgtgacttcaggaattcaaatgcaagttgttggcaaaatatatatatacacacacacacacatacacacacatatatgtacatacatatatatatagagagagagagatagattttttttttttgagacagagtttcgctcttgttgcccaggctggagtgcaatggaatgatcttggctcaccgcaacctccgcctccagggttcaagtgattctcctgcctcaacctcctgagtagctggaattacaggtgcccactaccatgcctggctagtttttgtatttttagtagagacagggtttctccatgttggtcaggctgatctcgaactcccaacctcagatgatcctcccgcctccacctcccaaagtactggaattacaatggcgtgagccaccacaagatatttttaaagcccatttgtctataaaagaaaactcttggacaaggagctttgtgttttataattgtattacgtgcctgcttccttaccaagtgccctccataacactaagtaaatttatatttatctagcctctgagtgacatatctgtgtgtaatggaattatttgcagaatttaatagccttttttattttcgcatgagaatttttcaaaaactatcagggtctagttttatcatacatttactaagttactacatattggtggatattgacgtttattcctgggaatctaattttgcaaacaatttggagccattcagtcataaattcatgtcaacaataagtcttgctgccgcttgtgtttcataactacgcttgctttccttcaaaatataccaagtgtgtaatataaataaagcccatatcaatataaaaaaaaaaaaaaaaaaa

SEQ ID NO: 1116 - DNA, 6613 bp, Homo sapiens
tttgctttaacaacaagtgggggtggttgaatttactcctccctctcctctctcctccccttcctcttgctgcggttcttgacactactacaaaccaggactataaacataaacatgtgtcactgtaacagggcaggttcccagtagctgcagcagtgaaagacagtgattggctccagtgctcccagaaggatttgggctgaagccaggggaacagaaccagaagaggattccctttccagagaccatcaggctcctcatgtcttgtctctcctctctcccctcgtggtggctcaggatttcagtatggctgagcagcccatagagtcagctgacatggtcaacaaatttatcaaagaaaccccctggcttttgaagaatagtactttatacatctggatctgcacatcaggcaaagctcagaaatatccgtttattcttttaatcacgcggatgtgtctatttttggaggaacaaggaaacacataaatgcctgggttgcatttatgttgtagttgcaaacactgaacagttaagaagattttgccgaattttgcaaagcagccaaggagccgccttgggatcgtggtaatgcgactgggaggacccttgctctcatttggcaatattttggatatccttgaaaacgacaccaaaatttgccttaatttgactaagaagaggttaaaccacattgattttcatccaaagtgattttgttaaagcagatgcttgactttgatggaaaaactgggagttgtggaagatttacctaaactaccaaccaaaagcatcacaaaccactgaaacagtctgcatcgtacatcagcactttcttttcattgttattacgtaaaacctctggaagcaccttgggcgtttgacagtttcttttctttgctgcagaaggaagcaatctgctccctggaattctgacctgtggtgaacaggaccctggcaaaggctttgctggggactcttggacgatcccgcctccaatccagtacggttaattgtggaaaagtgtacacatttctggcttatctatgctttgttatgggtctgacgtgaaactacctcctccccaccccaccccccagcagagaaccgaaatccagttgaattgttacagtgtttcggagctggagccttgaactgcttccttggtcaaataactttgtttctggttgtaaaaaggcatttcaggaaaaaaaaaaaaaaaaaaggaaaatcgagagaaattccaaacgtaagtccgcactggggtggttcacggggcgggtttaactttggagctcccagccggtctccttccccactcctgtaagggaaataccaggctattctgcacattttcccttaagctccattttccaaaaggaaaagggggtggggtatctctctttcggcttgataatgttttttaaatgcttttctttgaaatgataatagctgtatcggtaaaatgcaaataaacgaaaaaaataggcagtatttctttaaaggcgaatatacggtgcggtttttttttttttctcccttaagcgtacacacactgcttctgatgaagtctgtgagtcaggctgtttctgagctccgatagtttaatggaaagatttatataccgactgtattatttactttgggaggggaggtggcagtataagggtatgctaattagtgggagattttggggggaaggggtggaatatcaatttttattgcatcacctgtcaggagtgtccaatcagcgctggctttaggggaattaattgatgaaggtgtctccggacgagctcacttcactctgtcattttatttgtagctaaagcagcggcgggaatagcagctgcatttcttttctctttctcccttcacattccattatcatagtgctccaatggagaaggaaggaatagaggggcccaggtactgatctgcatcggggactcagaccaacacactggcagatcagaaaccggatggttttttccctcttttttaaaaaaacgaaaacaacaacaacaaaaaagcaagaatcaagtcagtgtaatttcatggggtttccccccccccaataatttcgcctagagtttggcacttccttcgccgggaataacagtctttgttattttattagcaggatgccttgagacacacgcagcatctggctgaggattaacatacatacatgtgtatgtatgcgtcacgtatatatttactgcaaatggtggggatcatttagtgcccgagatgggagacctgaagtcaggttttgaagaggtggatggcgtgaggctcggctacctcatcattaaagggaagcaaatgtttgccctctcccaagtcttcacagatctgctgaaaaacatcccgaggacgaccgtgcacaagcgcatggatcatctgaaagtgaagaagcaccactgcgatctggaggagttgcggaaactcaaggcaattaacagcatcgccttccacgccgccaaatgcacgctcatctcccgggaagacgtggaagcgctctacacctcctgcaaaaccgagcgcgtcctcaagaccaagcgcaggcgggtcggccgggccctggccacaaaggcgccgccgccagagcgcgccgctgccgccagcccccgcccgggattttggaaggacaagcaccaactttggcggggcctgagcggagccgcgcggcccctgccaatcagcgcgcagtcccagcgcccgggcgccgccgccgcgcgccccgccgcccatctacctcagatttttagcaaataccccggctcgcactacccggagatcgtgcgctcgccgtgcaaaccccctctaaactatgaaactgccccgctccagggaaactacgtcgccttcccctcggaccctgcttattttcggagcctgctgtgcagcaaacacccggcagccgccgccgccgccgccgccgccgctgctgccgccgccgccgccgccgccgccgccgcctattaccaggtatcggcggccgggccccagcccaaggcagcggcgggcgccggaggcccggggagcctgagctaccgctgcaagcgcaagcgcggcggcgccaaggactgcctgctcgcgcctcacgccggcgcgcggcgcctgctgctgttgcccaggtcctacaaagccaaggcggcggcggcggcggcggcggcggcagcggcggcggcggccgccgcgggggccacttgcctggagaggtttcatctggtcaacggcttctgcccgcctccgcaccaccaccaccaccaccaccatcaccaccaccaccaccaccaccgggcccagccgccgcagcagagtcaccacccccctcaccaccaccggccgcagccccatctgggcagctttcccgagagctgcagcagcgactccgagtccagctcctactcggaccacgcggccaacgactcggattttggctccagtttgtccagctccagcaattctgtgtcctcagaggaagaggaggaggagggagaggaggaggaggaggaagaggaggaggaggggggcagcggggcctcggattccagtgaagtcagctcggaggaggaggactcgtccaccgagtcggactccagctccggctccagccaagtgtcagtgcagagcatccgattcaggcgcaccagcttctgcaagcctcccagcgtgcaggcgcaggccaacttcttgtaccatctggcctccgccgccgctgcaaccaaacccgctgctttcgaggatgccggcagacttcccgacctcaagagtagtgtcaaagcggagtcgccggcggagtggaatctgcagagctgggcccccaaagcatctccggtgtactgcccggccagcctggggagttgtttcgctgagataaggaacgatagggtatctgagattacattcccacactctgaaatttccaatgctgtaaagagaactgacctgacaattaactgcctggcagagggggcctcttcacctagcccaaagacaaacaatgcatttccacaacaaagaatactccgagaggctaggaaatgcctacaaacaactcctactacacactgtgcagataacaacacaatagctgctaggttcttaaataatgattcttcaggagcagaagcaaattcagaaaaatattccaaaatccttcattgtcctgaatttgctacggatttgccctcttcgcagactgatcctgaagtgaacgctgcaggagcagcagcaactaaagccgagaatccctgcactgacacaggcgacaagacattgccatttctgcacaatattaaaatcaaagtagaagacagtagtgctaatgaagaatatgaacctcacctttttacaaataagctaaagtgcgagtgcaatgatacaaagggtgagttttacagtgtgactgagagtaaagaggaggacgccttgttaaccacagccaaggaaggttttgcatgccctgaaaaagaaactccttccttaaatccactggctcaaagtcagggcctttcatgcactttaggttctccaaaacctgaggatggggaatataaatttggtgccagggtgagaaaaaattaccggacactagtactgggaaagcgacctgtccttcagacacctccagtcaaaccaaatttgaaatcagctagaagccctcgtcctacaggtaaaactgagacaaatgaaggaacactggatgattttacagttataaacagacgcaaaaaggtagccagcaatgtagcatcagcagtgaaaaggccatttcatttcatggcaaattttccttgtccaccatcactcattattgggagagatggggatttgtggccggcgtattccttaaacaccactaaggattctcaaactcctcacaaggcccatcctatatggaaatggcagctgggcggttctgcaatacctcttccacctagtcacaaattcaggaaatttaattcataaaaatgttttggaagatattttcttgaaccatattaccttccttttgttgtaaactgcacaggatggtttgtacaagtccattaatgtgttacaccccctttggagtcctggtttatcgcattttgaagacagaaatcggattactttttttccgttgcgggtttttttttttttttctggagtagggtgggggcggggtgggagaagggttggtttacattccacagactacttcaggctaaagactcaagtaaaactcagttattacggtagagctggaacactttactgtttcgatgctaataatgcacccggtacctcaattcaactgctacaaataaatgtcaaaaggttgaataataaatattacaatgagccattaagtttatgcactagatttcagagctgaaagtgtaactgttaattcagtgaaagtttgttaggttacatggttacacagtgaggtgaggtgaggtagcaagaagtttctgtgagcccaaaatgttattttctggagctcttgtttgtggggtatctttttcttttgactccccttattccctctccaagagtagttgcacttaactttttttttttttttttagtggaaagattggggtgtgagtcctgattaaatgctagtaaaagctgcctcatacatactgagtaaaataaatacggaattgtattttttttgtaaagggtgtgattttacttttaaagccactcctttgcaacaggaaaagtctgttttgtgttctcacccaaaggttttaaataaggtgactcttactattgtcctgcttatcttgtggtctgaacatgactcttcaaactcccaaaacaattgaaatatttctttttttttttttttttttttttggagagagtctcgctgtgtcgcccaggctggagtgcagtggcacaatcttggctcactgcaacctccacctcctgggttcaaacgattctgctgcctcagcctcctgagtagctgggattacgggcgcgtgccaccatgtccggctaatttttgtatttttagtagagacggggtttcaccatgttgaccaggctggtcccgaactcctgacctcaggtgatccgcctgtctcggcctcccaaagtgctgggattaaaggtgtgatccaccatgcccgggctgaaatatttctcgtaatagcagaatatttcatggccgaactcttgatagtgacaaatcagtaaatacaaccaagaaaaagaaaatgaggggtcagagttgcaataccccaaatgaaaaataacagttttttcagggctttttggtaccagaactcaggcacttggattttatgaccttatactttttctgcatctctctaaaacttgtgttttcagaccatcctgtgtatagagcaggagagtttctactgcaagtgacaatcagaggtgactatctatatttgcacttaaaatcaaagtagttcaacatgcaaatgctagggtctagccctgggtaagggccatgctggtgtactgtgttgtgatgatggaagcagtaaatcaaaattatggaaatttgcactgttgaaaagcatgctttagctttattttcaattaaaaacactgtttaaaaaaaaaaaaaaaaaaa

SEQ ID NO: 1117 - DNA, 1286 bp, Homo sapiens
aggacctgggtcccggcagctctttgctcacccatctccccagtcagacaaggtttatacgtttcaatacatactgcattctgtgctacacaagccttagcctcagtggagctgtggttctcttggtactttcttgtcaaacaaaaccaatggctctgggtttggagaacacagtggctggttttaaaaattctttccacacctgtcaaaccaaaaatctatcagcccacgtggtgtggttggtgaacagtgcatgccaggaggaagcagtccctcctcaccagctctccagccaggacgatcacacagagatgaatggcatctgagtattacggcatccagagccactgctgactcccacttgcacgccaccattcagtcaccagactgggtgccctccgatgggtggaataagtctgcttcatgccaaggctgggctttgggtcccaccaagatgagttctctgtaagactgtggtggagttgcaccaggaggtgcctctgcctctcgacttgcaccctggtcatttgtaagggaaaagagctggaggtggggagagaaagatctccttcagttgggagtccttccacttcaacactggagaactgagccttgcatctctccagggtccaaggccacgcttggtgcacaggcaagacttgcttcagccccaggtgtggtgacttagacctaggaaaccaattatgagtggaaagtgaccctctagttcaactgtgccagaggaaacagccctccagtgcccacctgcctcactcctccctatcatgtaccgtgaaaaccccctctgatggcctcaaggcagtgcctgcaggccgaggcccttctgggggtttctatctttcttccaccagactccaagcccactctcctccaagactgtgttgtcttttctcaccaagagtattaacactactaagtctttcaccttaacttatgactcaggatttattcacgtcctgcccactctaggctcacaggaataaaatcaagtgctagacacactggctgctactaaggcactagcctctgtagctggtggtggcagcgtggggtgccgcccagcgtgctgggtcctggcagtgcctctgctgtgctgcacattgagccctttctcagtcagtggagtatcaagttgggccatctgtctactgacctggccttcatgtaagcagctgtgggctgcgggcagacaggagctcagagatgcagcatgaggcgcttagaaaaacctggccatttgctgcctctaattcccttttgctttg

SEQ ID NO: 1118 - DNA, 335 bp, Danio rerio
actatctatttttcaactgtaaacatattgggggatttgggctagcttgaactgtgcagaggaatcttctgtaaatgctgtagccaaatgtcctttgctggtgtgtacagcgtctacagatggagaaacactctgaggcctgatctgctgctgcttcagcatgaggttatgggttttagccaggataaacagtagagactgactaggtaaggtgttttttcatgcaccagtcattgattgatattttattgcacatgccagcttattttgggcaaaatgttcccagagtgtacgtggcagtgggttctggacagaaataaagacttggatggaaa

SEQ ID NO: 1119 - DNA, 420 bp, Danio rerio
gcaggcaggcatttcacacacctcactcggcgaggagcttcagtacagcaatactgcattgattgttacgggtcccactcatgtactgtatggatttgcagcactgatcctcgcctctcaagtagcttggccttcttaacaaggtgtagagttgtaaattaggtctcttttagttatataatgtaactacggctgtgctgtcggatgtgttttgtatttatggctacttcaaatttttttttgtaccacattccatttgcttgtatcagtttaatttgcagtctttaccccctcattattagtgtcttcagtattgtattgtctctgtatccgccattggaaagtgactaataaatgtggtttttataaatgctgctctgtatgtttcctacaaataaatgtaatgtcttttgccttgta

SEQ ID NO: 1120 - RNA, 22 nt, Artificial Sequence
  Synthetic polynucleotide
aacccguagauccgaacuugug

SEQ ID NO: 1121 - RNA, 22 nt, Artificial Sequence
  Synthetic polynucleotide
caagcuuguaucuauagguauc

SEQ ID NO: 1122 - RNA, 22 nt, Artificial Sequence
  Synthetic polynucleotide
aacccguagauccgaucuugug

SEQ ID NO: 1123 - RNA, 22 nt, Artificial Sequence
  Synthetic polynucleotide
caagcucgauucuaugggucuc

SEQ ID NO: 1124 - DNA, 20 bp, Artificial Sequence
  Synthetic polynucleotide
acaagttcggatctacgggt

SEQ ID NO: 1125 - DNA, 20 bp, Artificial Sequence
  Synthetic polynucleotide
acaagatcggatctacgggt

SEQ ID NO: 1126 - RNA, 21 nt, Artificial Sequence
  Synthetic polynucleotide
ggcuacguccaggagcgcacc

SEQ ID NO: 1127 - RNA, 21 nt, Artificial Sequence
  Synthetic polynucleotide
ggugcgcuccuggacguagcc

SEQ ID NO: 1128 - DNA, 25 bp, Artificial Sequence
  Synthetic polynucleotide
gcgcctcttccatgatgagctctca

SEQ ID NO: 1129 - DNA, 25 bp, Artificial Sequence
  Synthetic polynucleotide
cttcttcccgctgctgctccatgct

SEQ ID NO: 1130 - RNA, 22 nt, Artificial Sequence
  Synthetic polynucleotide
guguucuagccuagaugcccaa

SEQ ID NO: 1131 - RNA, 22 nt, Artificial Sequence
  Synthetic polynucleotide
guguucaagccuagaugcccaa

SEQ ID NO: 1132 - RNA, 22 nt, Artificial Sequence
  Synthetic polynucleotide
guguucuagccuagaugcccaa

SEQ ID NO: 1133 - RNA, 22 nt, Artificial Sequence
  Synthetic polynucleotide
guguucaagccuagaugcccaa

SEQ ID NO: 1134 - RNA, 22 nt, Artificial Sequence
  Synthetic polynucleotide
guguucuagccuagaugcccaa

SEQ ID NO: 1135 - RNA, 22 nt, Artificial Sequence
  Synthetic polynucleotide
guguucaagccuagaugcccaa

SEQ ID NO: 1136 - RNA, 22 nt, Artificial Sequence
  Synthetic polynucleotide
uugauauguuggaugauggagu

SEQ ID NO: 1137 - RNA, 22 nt, Artificial Sequence
  Synthetic polynucleotide
uugguauguuggaugauggagu

SEQ ID NO: 1138 - RNA, 22 nt, Artificial Sequence
  Synthetic polynucleotide
uugauauguuggaugauggagu

SEQ ID NO: 1139 - RNA, 22 nt, Artificial Sequence
  Synthetic polynucleotide
uugguauguuggaugauggagu

SEQ ID NO: 1140 - RNA, 22 nt, Artificial Sequence
  Synthetic polynucleotide
uugauauguuggaugauggagu

SEQ ID NO: 1141 - RNA, 22 nt, Artificial Sequence
  Synthetic polynucleotide
uugguauguuggaugauggagu
